United States Patent Application Publication US 2006/0134663 A1 - sequence listing, part 71

SEQ ID NO: 185809 - DNA, 2966 bp, Homo Sapiens
  misc_feature (2651)..(2675): n is a, c, g, or t
ttgggtccagcttgcacagatttttgagccactcattacgagtctgaatgctgatgtgccataacaacttataactcccttaatttcattggcacatttctatgttagcaccagatcagtttgcttccccaatgaaatctgtagtagcaaattttattgtgaaagatctgctaatgaatgacaggtcaacaggtgaaaagaatggaaaactgtggtctccagatgaagaggtttcccctgaagtactagcaaaggtacaggcaattaaacttctggtaaggtggctgttgggtatgaaaaacaaccagtctaaatctgccaattcaacccttcggttattatcagcgatgttggttagtgagggtgacctgacagagcaaaagaggatcagtaaatctgatatgtctcgcttgcgattagctgctggtagtgccataatgaagcttgctcaggaaccttgttaccatgaaattattaccccagaacagtttcagctctgtgcacttgttattaatgatgagtgttaccaagtaaggcagatatttgctcagaagctgcataaggcacttgtgaagttactgctcccattggagtatatggcgatctttgccttgtgtgccaaagatcctgtgaaggagagaagagcacacgcacgacaatgtttactgaaaaatatcagtatacgcagggaatacattaagcagaatcctatggctactgagaaattattatcactgttgcctgaatatgtagttccatacatgattcacctgctagcccatgatccagattttacaagatcacaagatgttgatcagcttcgtgatatcaaagagtgcctatggttcatgcttgaagttttaatgacaaagaatgaaaacaatagccatgcctttatgaagaagatggcagagaacatcaagttaaccagagatgcccagtctccagatgaatccaagacaaatgaaaaactgtatacagtatgtgatgtggctctctgtgttataaatagtaaaagtgctttgtgcaatgcagattcaccaaaggacccagtcctcccaatgaaattttttacacaacctgaaaaggacttctgtaacgataagagttatatttcagaagagacaagagtacttctgttaacaggaaagccaaagcctgctggagtactaggtgcagtaaataagcctttatcagcaacgggaaggaaaccctatgttagaagcactggcactgagactggaagcaatattaatgtaaattcagagctgaacccttcaaccggaaatcgatcaagggaacagagttcagaggcagcagaaactggagttagtgaaaatgaagagaaccctgtgaggattatttcagtcacacctgtaaagaatattgacccagtaaagaataaggaaattaattctgatcaggctacccagggcaacatcagcagtgaccgaggaaagaaaagaacagtaacagcagctggtgcagagaatatccaacaaaaaacagatgagaaagtagatgaatcgggacctcccgccccttccaaacccaggagaggacgtcgacccaagtctgaatctcagggcaatgctaccaaaaatgatgatctaaataaacctattaacaagggaaggaagagagctgcagtgggtcaggagagccctgggggtttggaagcaggtaatgccaaagcacccaaactgcaagatttagccaaaaaggcagcaccagcagaaagacaaattgacttacaaaggtaaaaatgcatttgcaaagggagaaaatgaaggccaaacagaagcaggctccagcttctgcaaaaacttggattcacaaatgtccctgaacagaaaatgaagctcacttcagaacacacactctctgccttgaaaactaaagagactattacttccttttcacatgaccacaagtcctctgatggaaatgtacagcagaaactcttgagagagaggctaaaagcaactctgttctcccccttcccctagacttttcttacgaaaagtcaataattaagcaaattgcttaacacttggttccagttcctgcctatctggagtttaaatgcgtaatacaccattaatttccacgctgcagtttttattttaaagaaagtaacaagatgtctttacactgacactgaaaattcatccattttagagccaggaattcccatgttacacaggaaaaaatagaagtctactgaattaattttttaaaagaaaagagatcagattaaatatttctttgtttttccttttggaaacttttatgtataattctttctgcctgcctacttttctgcaaaaatgagatgtacagatttcggttccctgctatgaaaagtgatgtggtagcaattttataaatgttgctttctgatttttatcagagtgagaaaattaaaattattgatttgcaagtagtaaacagttcatattttgatttcccctcattttagtttaatataatttgcaataaatgtacatattgttgtttgtttcataaagcatatcactttaaaatggtttttactcctgtgattatgttggaatatttggaattttaaaggagtaaagactgtccagcatttggttttataatgtttgtcaccagatttttattaatgnnnnnnnnnnnnnnnnnnnnnnnnntagttggactttggcagcttttaaggaaagttggaggtgttttagattgctatcaattttcagcattgtgctatttggaaataagtgttttgcttttgtctgatggtctgggctcatttttatgtttattttagaaaactgttgcatcaatatattatgtttcttggcattgttcagcataggtaatgtgtgcactttatgtgtacacataatcatatttaagttttttgcataaaataaatgcttctagatgtcatggcagtctttttaatctttttatcatatgctttc

SEQ ID NO: 185810 - DNA, 1312 bp, Homo Sapiens
  misc_feature (1189)..(1204): n is a, c, g, or t
ctttgtacaaaaaagttggatgtaagacctgattctggaggaacatgaaatttgtcttttctcatgtccagagttctatcctgcccccactgtccactgtagggtcatccgcaaagccctagcagaatgtgctcactccatttccttacacgtttctagcatgggtcagaggaaacaacatttgtgttataacttcgtcttgataggctgtagtgtacatgggatgtaaaacaaacaagtgtatcaaaggtggatgattctgttagagtgaagtttgagagtaaatgtcacttacgtttctcatagataatcaagagttggctgtgtattgactgaaagatgggtaattattttaaatatgcatttacacacatttaggtatcagaagatgcttagggaacaatggataccaatgatagaaaatgatacctttacaggggcagaaaaatccccactcttccttattgcctcttcagaaccctttagaaagtataaaatattgcctccaacatgctgaaaaagagtatctatgcataagtatcagagaagtccctcaagcaatcagtaggtgtgttctatttagagagagtttaaagttctcttagcatcagacaacttgattcctaaggtttccagtgtgtcaccaacaaaaagtgcattgatagggacctttgtctcttcctccctttgattaattgcccggcatcacagtttactagattaccaagtgttacatcatattaaataaaatgtagcagaaccatctgcatcaatatattcctgtttagatttttgcaggagagaagttaaaaggatttgctccttgtatgatgtaagtggcccaccccaattttgtaacatgatgcaagtgtctggcactaagggaagcaagagtagggttgtggaaagaccaagctgatggggagggacttgtttacgggaatttttttagttttccttttcaaaggaaaacattaaaatcccttaggaatttggtattcacatctcagagaactacaacacaaaagtgcagacttatatttgagaattaatgttaaccctttgtgtctagtttgaagcttcttgtatttgtctaaaacaacaagccagaattttgtatctcctttgataaaaagtgtgtataatgtaaagtagttttgcatattcttgtgctgcacatgggctgaannnnnnnnnnnnnnnnaaaaacttgaagcagaaccttgtaatttgtgtaaatgacaagtgtaaaatcctaccataaaatgctaaaaatatgcactgtttcaaataaaaccaagaaatgcagcat

SEQ ID NO: 185811 - DNA, 1062 bp, Homo Sapiens
  misc_feature (68)..(90): n is a, c, g, or t
ttggaaaggagtaaagactgtccagcatttggttttataatgtttgtcaccagatttttattaatgtnnnnnnnnnnnnnnnnnnnnnnntagttggactttggcagcttttaaggaaagttggaggtgttttaggattgctatcaattttcagcattgtgctatttggaaataagtgttttgcttttgtctgatggtctgggctcatttttatgtttattttagaaaactgttgcatcaatatattatgtttcttggcattgttcagcataggtaatgtgtgcactttatgtgtacacataatcatatttaagttttttgcataaaataaatgcttctagatgtcatggcagtctttttaatctttttatcatatgctttcttgtgaattttttcatgttaaagagctaaagtcataacatgattacagtcaactctccattatctatataaaatagtgactaagcctcaggtttttaattttgtgataacaaaataacgaaggcatgtaagacctgattctggaggaacatgaaatttgtcttttctcatgtccagagttctatcctgcccccactgtccactgtagggtcatccgcaaagccctagcagaatgtgctcactccatttccttacacgtttctagcatgggtcagaggaaacaacatttgtgttataacttcgtcttgataggctgtagtgtacatgggatgtaaaacaaacaagtgtatcaaaggtggatgattctgttagagtgaagtttgagagtaaatgtcacttacgtttctcatagataatcaagagttggctgtgtattgactgaaagatgggtaattattttaaatatgcatttacacacatttaggtatcagaagatgcttagggaacaatggataccaatgatagaaaatgatacctttacagggggcagaaaaatccccactcttccttattgcctcttcagaaccctttagaaagtataaaatattgcctccaacatgctgaaaaagagtatctatgcataagtatcagagaaagtccctcaagcaatcagtaggtgtg

SEQ ID NO: 185812 - DNA, 1217 bp, Homo Sapiens
  misc_feature (496)..(602): n is a, c, g, or t
  misc_feature (763)..(805): n is a, c, g, or t
ttgggtgcatgtgagtatgtttgcaaaataataaaggatattggagacctgttttagaaggagcctaggctgaatttgattccaagagagcttaggatgacagcacccctgagctgggcaaaggtactcaggacctcataggagtcttaggcagttacctgaaactgccttcattcactcatttgtgtattcattcatttatgtattcatcagacacataccgaacaccctctatttgtcaggctctgtgcttggaatacagagttgaatcagacatgatctctaccctcctagtaaggagatacagtgggttcatgaatgactatagttagctgaatgtcatatgtactttgaatttgagaagtgggtgatcccctctaggcttcctggaggtcacatttaagctagaccttgacaaattggtaggatttggtcaggcactaggagtggagcatgagctctggggacagacagttatgggttctggtcccacttnnnnnnnnnnnnnnnnnnnnnnnnnnnnnnnnnnnnnnnnnnnnnnnnnnnnnnnnnnnnnnnnnnnnnnnnnnnnnnnnnnnnnnnnnnnnnnnnnnnnnnnnnnntaatgatgtcaagctcctcactggaggccttatcccttcgtggagcccactaggtgccgacccctcagaatataaccctcatgcctggacccctgagagcttctgatcccagctattagggacagaagaagcctccaaatctggaaggtgctgaatgcccnnnnnnnnnnnnnnnnnnnnnnnnnnnnnnnnnnnnnnnnnnntaagcggagggcctgaggaaacctgtagcttcaatcatgtctggtaaccgggtgcctgagccccaatctgggttgtgaggaaataggggagaggtatcctgggccacatcccagcctaacacctgtgaggttcattttaggaactaacctcattagctataaggatcatgcagaggcagcaaagccgggtgcgatgagctcagcctttactcattcacatacaccatcacactttaatttccaatctgtatattgctttttaaaagttaagtccattctaaattacccaatatgcatgaattcattctccttttgagaagttagattgttaaagatagtctcatcagctaccaaccactccttggatccttcccctccttatgggctgtggtttgttggactcccgtttaaa

SEQ ID NO: 185813 - DNA, 1655 bp, Homo Sapiens
gccaactttgtacaaaaaagttggcagatactcacctctttctgtgggatgcacccctctctggtttcacacccattcccggcagtgccaggggtgccaagatcttgcatcccccatctgttttcacttaagctccacaggtggttaggaatgagaactgggagctcacactagtcttgcaggtttactctggcctccccctgcaagctgtcctggagtgtgtggccttgcagctggggaagggtctaggggaggacacttgccagtggagcagggtagtgagtggagttgtggcgatagcatgccctgggtgtgcacgcaggccaggagccctgatggcataaacacccccccaacagaggcagaggagtcgtttgaatttgtggtggtgtccctcactgggcagacgtggcacttcgaggcttcaacggcggaggagcgggagctgtgggttcagagtgtgcaggcccagatccttgccagcctgcaaggctgccgcagtgccaaggacaagactcgactggggaaccagaacgcagctctggctgtgcaggccgtccgcaccgtccgcggcaacagcttttgtatcgactgcgatgcacccaatccagactgggccagcctgaacctgggtgccctgatgtgcattgagtgctcaggcatccaccgacacctgggggctcacctgtcccgggtgcgctcccttgacctcgatgactggccgcctgagctgctggctgtcatgactgccatgggcaatgccctcgccaacagcgtctgggagggggccttgggtggctactccaagccagggcctgatgcctgcagagaggagaaggaacgctggatacgggccaagtatgaacagaagctcttcctggccccactgccaagctcagatgtgccactggggcagcagctgctccgggccgtggtggaagatgacctgcggctgttggtgatgctcctggcacatggctccaaagaggaggtgaatgagacctatggggacggggacgggcggacggctctacatctctccagtgccatggccaacgttgtcttcacgcagctgctcatctggtacggggtggacgtgaggagccgggacgcccggggcctgactccactggcatatgctcgccgggccggcagccaggagtgtgcagacatcttgatccagcatggctgccctggggagggctgtggcttagcgcctacccccaacagagagcctgccaatggcaccaactcctctgctgagctgcaccgtagtcctagcctcctataaggcccaggaagagggcagaggggctagaaggactctatggctcaaagatccttctctctgcaggcactgtgggaacagacacagagatggagaagcagggacatgctgagaggacgaagctaaggaaattatggaggagagtcaaagggatcaaggagagttggggatttgagctgcagcagagagggatgagggatttagctctctgcctctaacgtgccattgaaaagggacaggacccttcggaggtgcctgtgaggagaggggagcggacctctctctcctccagatctctgcctcctagtgccagctctcacacgtcttcatcctgaaacaggaagaggacggcacctagttgggggtg

SEQ ID NO: 185814 - DNA, 1506 bp, Homo Sapiens
gggatggccgtagggggacagagcctggcaggagacacatggaagttccgcctttgtcagtctcagagcaaacgcttttagtctttacagtacaggaatttggacactgcccacgttctcagtggacagcagccatcagaggtgacccaggaggggaagtgggcattggtcaccaaggtatttacagacttctatcatgggggacagcggggtgggtccagcagcctccctcgcgggggatctgagggagaccgagttcgctaaatattataaataggtcttgccgtcctcctgcccccgcccctcggcacagtcagtggagcacgtcagcctcggtttacagttctctgaaaaggaaccaaaaaacacaaccaacaccaagtatatctccaaaagggccttggagacaacacaagaatggaaatgaaatggtatccacagaggtttgcacatttctcctgcaaaggcgcgtcggccgggcactggtgtcccgtgtcactcagcggagggaggctgccctggacgcggtgccgcccgcccggggccacacctgctgctccgagtcaccccacaggctcttggcgtctctggtgccagggctctgggcagggcgactcgaggactccctgggaggactggtgtggcctctgggggttgggcctttgagatgacaatgcccctgtccctgctggccatccaggtcccagacaccccttctgacctctgcccctgcctccccggggggtgcctgctgggtgtccttcggagggacagggcgggggctgatgggtggatgcccggtgccagcagatgagcaccaggctgtgaactgaggccaaggtcgcttcccagggctggacagaccctctgagcacgcagggaggaccccacgtgggcttgtcctgatggatgctgggagccacgcggctggccggttcccgaggagggtcggcccctctcctgggcagagtggaggggctgctctcgtggagtgtgtcctcgctggggacctcggggatgggtccggcttctccacagcaggggccttccgggcgcagcgtgtgggctgtgcaggaggccgacgggacgtgaacagcgggtggcgtggcgtcatacggaggttgtaacagacaaaacacagagccctgcctgggaggttctccggccgtctcagaccccacaccaggctctgccaggtctggagaggaattcttcccaaaggtgcagcttccactccagctcctcacatcctgggcacatcttggaagtgggggattcccacagccatcaccaataagcccctctcaggggtcctggggaagggcagggtgggtgactctgccgagctctggcctccaaccagcaccctctgagcgcagcgggcccaggaagctgccccagggcagtctgggctgagtcccaccactgggagcgctgccctcttggagggtgatgagtcggaaacaaagtcttctctcccctcctcggagacatcacatcacccaa

SEQ ID NO: 185815 - DNA, 1423 bp, Homo Sapiens
gaacttgctgggagactcccagtccttgagccatctccttcagtgatgccaaccggcacgttccttctgggcagaggctgcctggctgagggaccatcttcagggctccgcgccccccgccgataggagcgagtgctctcggagctgaatctgacggggaggtacatctccgaaggggtggtcccggatgtcaggctgggtctggaggtgcctgggggctctcggaggccctcttcagagttgggtggggcttggctgggatccccaggttccaaggggctcatcagactggaggaggaggctggactgcccaggctctcaggggtctcaggggcctctgaactcaggctggagacttcagaacgatctccactggcatgtcttgcacacccttggaccaaagtccgagaagagtttttgactggcaagggcgggggacagtcctcactctcgccctgaggggtggctgctcccaggctggcgacagtctcataggtcttgttgctgatgtccagcctcccactggcccagtgagcctgggccgggagcttcagcaagcagcgcttctcttcctcatcctcctcactgtcagagccaggctctgtggaaattacccaggagtagtccacatgtagagggaaggcaaaggtccccgcctgggcctgctccagcagctcctcacactccttgtggtgcttcttcctggctatgtccagagctgtctcgcctgcttcatttactgtgccaaccaaagctctccccttcagcagcagcttgaggcagtcgggctggttgtagagtgctgcgtagtgcagagccgtgttcccgtcagcagccttggcatccaggtgaccaccgttctggatgatgaaatccaccagaggcagggaagcctggttggcgactttgacagccaaatgcaagacgagttcttcaggtgcctgtgcatcaggccctggcagcggctgtccaaagtcctgcccattggcaaaggcctccagtaccgacaggaggtccctgttgcaaatggctgtccagagtcgctgaggctcaggtgtgcaccggcgtgcaaacctatgctccacatacttggccataatgtagtccctgcgggtgcccatgtcactctcagctgagggtttagggccgccgtgtgagggtagctgggcctccatgacctcattgaagctcgtgtttcccatgttcaaggccagcaacaactcggaggggcccagcaggtccaaggtgagtgactgcatgcgcgaaaagcgcacgcccagttcgcggtggacgcccgagcactggatgcaggtgagcacgcccaggttggtgctgagccacgtggggtctgcagccccgcagtcgcagcactggctattcccaggcctgctcttcacctccgcgatgagcagctttgtgccaa

SEQ ID NO: 185816 - DNA, 970 bp, Homo Sapiens
ctttgtacaaaaaagttggcacagagcctggctctgacagtgaggaggatgaggaagagaagcgctgcttgctgaagctcccggcccaggctcactgggccagtgggaggctggacatcagcaacaagacctatgagactgtcgccagcctgggagcagccacccctcagggcgagagtgaggactgtcccccgcccttgccagtcaaaaactcttctcggactttggtccaagggtgtgcaagacatgccagtggagatcgttctgaagtctccagcctgagttcagaggcccctgagacccctgagagcctgggcagtccagcctcctcctccagtctgatgagccccttggaacctggggatcccagccaagccccacccaactctgaagagggcctccgagagcccccaggcacctccagacccagcctgacatccgggaccaccccttcggagatgtacctccccgtcagattcagctccgagagcactcgctcctatcggcggggggcgcggagccctgaagatggtccctcagccaggcagcctctgcccagaaggaacgtgccggttggcatcactgaaggagatggctcaaggactgggagtctcccagcaagttctgtgcaacttttgcaagactagctccttgctggcccccacatgccccatgctaggccccaatgttcagagctgggacttgagctcacaaaactggggagctgagacatttgttctcttggatctcactctctctgtcccttgtgcctctgtagctggccttcttcctgccacaggccatgcctctaccaaggacacatggcctttccctgttagggctgatggcggttctttcctatctcattacccgctagggcctgggagccctgtggctggatctgagtgctcctgagctggcttcagctgcataactctcagtcctcatcagatcgagactctatttcccc

SEQ ID NO: 185817 - DNA, 1613 bp, Homo Sapiens
  misc_feature (278)..(293): n is a, c, g, or t
  misc_feature (1401)..(1413): n is a, c, g, or t
ttgggacggatgttacgattcgaaatggtctcctgaactgtaatgattgctacatgcgatccagaagtgccgggcagcctacaacattgtgacacggctttcaagcttccggatcactcaccatttctttactgagagtgtcccctggcaactgcttaacaaaatcccaagctcaggggcttctcagcatttacctaatttctgaaaggctcttctgaaaggtggtatctgttctttcgtagcacagtgtttatgtttttcctgtttattgttttggnnnnnnnnnnnnnnnngcatttgcacagtatacacaaaagaatatggggttgtaatgatcctgaatagctcaaaaaaggttttagcatggtcaaacaggcttatggtttaaaatgtgttattctcttctttgggaattagctaaatgatgcaataaacctgttttgttttagaatgtctaggaattaaacactttatgtttacagaattgagctgcagaaagtgcaagacatgccaatttgagacacacggtcttctaagactgaaggataaatttaatgcatttcagaaactaaacatcacagcaagctctatctctgagctataatttgtttttaatgcaaagacactagtttgataatatatactgtaatcctgaaacatttgtgttacttacctttggaggtagaaattataccaataaattattgcaccgttagtattaaattctgtgtaccttggaagttatgtcattaatataggctggttcatcaaataaagcaaaaccttgcaatatcagctagatttacactccgggacgttgcccaaaggtaggaagaaagcagagggaaatatttcagtcatcatttccaaagtcattatcaaaatctgtgaggaagtttaatcttccaaagagtcaatgtcagacatcaggcctctgttgcctgcttctctcgaggcactagattaggagtcttcaataagagacttaacatgaggtatatggaagatgaggcaccgagataagttcatcattaggtgtgagcactgctcacccttgctggcaagttctccttaagggcctgaagcacaggtgtccaaagaaaagcgttaagtccatcttaatagaatctatgtggtatatgatgtggtcagcccctggtctgtgatcagcaagaacctacagcacagattatgccctgcccacttcaatgaatacctactctcctccattctccatcactttttttgctatcaagaactccggaccttgcccatggagaagtttagagaggaactcttgtggagagctggtttattttctgccctgtgcgacgagtttcagctggccaagaaaggagtcaagttattaaaaagcatcacaatgtagatctccaggctggnnnnnnnnnnnnngttgttaagactggggaaagggggactatttattctgccttaaatcaatggcaaataagtcaagatgacattttgtgaatgtagactatggatacactcctaaatagattgatgtagtcataaaagggggtcaagtagatgtttttctgttatgtaagcaataatttttccgtgtcttaatgagtatgagctagcgatta

SEQ ID NO: 185818 - DNA, 906 bp, Homo Sapiens
ttggggggctcaaagctgtgaatgtggccaaggtcgtcggaaccaacccgtgtgcggacaggaacggggggtgcagccacctgtgcttcttcacaccccacgcaacccggtgtggctgccccatcggcctggagctgctgagtgacatgaagacctgcatcgtgcctgaggccttcttggtcttcaccagcagagccgccatccacaggatctccctcgagaccaataacaacgacgtggccatcccgctcacgggcgtcaaggaggcctcagccctggactttgatgtgtccaacaaccacatctactggacagacgtcagcctgaagaccatcagccgcgccttcatgaacgggagctcggtggagcacgtggtggagtttggccttgactaccccgagggcatggccgttgactggatgggcaagaacctctactgggccgacactgggaccaacagaatcgaagtggcgcggctggacgggcagttccggcaagtcctcgtgtggagggacttggacaacccgaggtcgctggccctggatcccaccaagggctacatctactggaccgagtggggcggcaagccgaggatcgtgcgggccttcatggacgggaccaactgcatgacgctggtggacaaggtgggccgggccaacgacctcaccattgactacgctgaccagcgcctctactggaccgacctggacaccaacatgatcgagtcgtccaacatgctgggtgagggccgggctggggccttctggtcatggagggcggggcagccgggcgttggccacctccaagcctcgccgcacgtaccctgtggccctgcaagttccccaacctggcaaggagctgtggccacacccacgactgcccagcagcctcaccctctgctgtggg

SEQ ID NO: 185819 - DNA, 976 bp, Homo Sapiens
ttggcaggaaccaacccgtgtgcggacaggaacggggggtgcagccacctgtgcttcttcacaccccacgcaacccggtgtggctgccccatcggcctggagctgctgagtgacatgaagacctgcatcgtgcctgaggccttcttggtcttcaccagcagagccgccatccacaggatctccctcgagaccaataacaacgacatggccatcccgctcacgggcgtcaaggaggcctcagccctggactttgatgtgtccaacaaccacatctactggacagacgtcagcctgaagaccatcagccgcgccttcatgaacgggagctcggtggagcacgtggtggagtttggccttgactaccccgagggcatggccgttgactggatgggcaagaacctctactgggccgacactgggaccaatagaatcgaagtggcgcggctggacgggcagttccggcaagtcctcgtgtggagggacttggacaacccgaggtcgctggccctggatcccaccaagggctacatctactggaccgagtggggcggcaagccgaggatcgtgcgggccttcatggacgggaccaactgcatgacgctggtggacaaggtgggccgggccaacgacctcaccattgactacgctgaccagcgcctctactggaccgacctggacaccaacatgatcgagtcgtccaacatgctgggtcaggagcgggtcgtgattgccgacgatctcccgcacccgttcggtctgacgcagtacagcgattatatctactggacagactggaatctgcacagcattgagcgggccgacaagactagcggccggaaccgcaccctcatccagggccacctggacttcgtgatggacatcctggtgttccactcctcccgccaggatgacctcaatgactgtatgcacaaacaacgggcagtgtgggcagctgtgccttgtcatccccggcggg

SEQ ID NO: 185820 - DNA, 1012 bp, Homo Sapiens
ttatttgcttggatattcagggacccaggcacaggaccaggcaccagggatccggaaactgcagagcatgccaggccggtctattcctgctgggtgactattgacgaacagtgatgctgggagcagggtggcacagcctggagtctctgcgagtcccatgaggcatagcagaatgtgggaatccaagtgattcagcgaggcccagcacaccgaattcactttccggttggtgaagtagaggttttcgtgcatgaacaccttgagcgtaggggtcttcagactttgcaggttgatgataccatacttggagcctccaactttaacatcgttcactgtgaagagccggtcactgttggtatctgccagtatgaggttaaatcggtcgcttgccaaggcggagggatccatgcttcgaatctggacctttttcctctccatgcagctgagacgcagctcgtgggctaaatggcagtaattggtgacgttgagaaaacccagctggctttttcgtagcatggaagatgcattaaatcccatcctggcaatctttttccgtctgtcttcttcctggagcagccgcagtctcttgctctccatctccttctgccggatgctctctttcgtcagggggttgcagttgttatgtccagggagcaagcggaagtagcgtttcttttcagggtcaaagtaaaacccaggtagctctggcacagaggaggtcccagctgtgccagacgaggttgacggagactcgtcatcaccgtggccggaatcgtgagcgggctgtgctgcccgggagtcagacctgtcttcagaatcacggagtctgaaccaagggttctgctggtggcttcttctcccatgtcgtcttctactctgccagcgacttttattcatttctgttccaagtttgtagcgggacatgatccgggaggtgtgtggcttcgcttcgtacgagctgcgcgccatggagtcactgaaggtcttcaaggagaaatccaacttttttgta

SEQ ID NO: 185821 - DNA, 1420 bp, Homo Sapiens
actttgtacaaaaaagttggctgtgttccatgttagcctttttagatggctttctaccccctgaacaataaataggatgaggttttactgtaattgggtaaagtttactcttggacattatttcgatgctaaagtaaggattctgtggatgttacttaaagagaaaagcataagagcatgaagcatatctgggaatatcttttgcctttaagacgattcattcttgtctagagggaaaatctggctgatttgggaataaaatataatcgaatattcaacaccatgaagataaatcttattttggaaatctactgaccttaataccccaagcttgccctgaatactttgattggaattggaatatatcaaaaaaggttagtatttttgttgtagttaggatactaaaaggatattagttacccaagagatccaatttgtttttctgatgaatagtgttcagtaaaatgaagcagtcttaagagtgactaataatttcaaagtgatttttcgtctattcttaatattttttaattatttatttttaagagttttataccttgagcagatacaatgatctgctttagtgagaggacaatttctgattgattgttttctcttcaggccatctcacctcttcattctcttgttacatttgaagcagttgatataatgggtttatactttaaaagatagacatggtgccatgaagttggggagttgggtgaattatcccattctagttacagaggagctttccttaaatgccctttaacttctaggttttgttcaagaagttcattttctgagtaaaagttattttcatatatgttgggggaaaattaactcatctaaaaagaatcttattaggtatttgaactctaaaactaacagataagacagatatgtaccttattagagcaccagaactaatttgctaagtcttttgtttagtcctgcaagactgatgcttaatacacagtctgttctcctgtgtctaggtcaggaactccagtttgcttttctgttttgtgtcctggtagcagctgttgagtaactttcattggaggttgggaaggaagtgaggagaaagtgttcttgtttagtgttttatttcctataataggatgctgcctaacccagttcatctctatgtcctgttcactgaatattccgggtaattgaaagaaaatataatggatgggctccatttaaaaccagctcaaaaataaattcttgtcagtaaagatttcttgtcaagatgtcttggattgcacttttgttgaggaaagacagtgtaaatagttaaagaatgttgataaaattgaaacatttggttgtggaattgtgtgtggttttagagggtttctgtttgtgaaatgtatgtattaaaaataataaaattccacaaactaacattgta

SEQ ID NO: 185822 - DNA, 2618 bp, Homo Sapiens
ttgggggtgtctatggagaggcggcggccgcggctgctgaggcggaggctgaggcagtggcgatggcgccctttcctgaagaagtggacgtcttcaccgccccacactggcggatgaagcagctggtggggctctactgcgacaagctttctaaaaccaatttttccaacaacaacgatttccgtgctcttctgcagtctttgtatgctactttcaaggagttcaaaatgcatgagcagattgaaaatgaatacattattggtttgcttcaacaacgcagccagaccatttataatgtacattctgacaataaactctccgagatgcttagcctctttgaaaagggactgaagaatgttaagaatgaatatgaacagttaaattatgcaaaacaactgaaagagagattggaggcttttacaagagattttcttcctcacatgaaagaggaagaggaggtttttcagcccatgttaatggaatattttacctatgaagagcttaaggatattaaaaagaaagtgattgcacaacactgctctcagaaggatactgcagaactccttagaggtcttagcctatggaatcatgctgaagagcgacagaagttttttaaatattccgtggatgaaaagtcagataaagaagcagaagtgtcagaacactccacaggtataacccatcttcctcctgaggtaatgctgtcaattttcagctatcttaatcctcaagagttatgtcgatgcagtcaagtaagcatgaaatggtctcagctgacaaaaacgggatcgctttggaaacatctttaccctgttcattgggccagaggtgactggtatagtggtcccgcaactgaacttgatactgaacctgatgatgaatgggtgaaaaataggaaagatgaaagtcgtgcttttcatgagtgggatgaagatgctgacattgatgaatctgaagagtctgcggaggaatcaattgctatcagcattgcacaaatggaaaaacgtttactccatggcttaattcataacgttctaccatatgttggtacttctgtaaaaaccttagtattagcatacagctctgcagtttccagcaaaatggttaggcagattttagagctttgtcctaacctggagcatctggatcttacccagactgacatttcagattctgcatttgacagttggtcttggcttggttgctgccagagtcttcggcatcttgatctgtctggttgtgagaaaatcacagatgtggccctagagaagatttccagagctcttggaattctgacatctcatcaaagtggctttttgaaaacatctacaagcaaaattacttcaactgcgtggaaaaataaagacattaccatgcagtccaccaagcagtatgcctgtttgcacgatttaactaacaagggcattggagaagaaatagataatgaacacccctggactaagcctgtttcttctgagaatttcacttctccttatgtgtggatgttagatgctgaagatttggctgatattgaagatactgtggaatggagacatagaaatgttgaaagtctttgtgtaatggaaacagcatccaactttagttgttccacctctggttgttttagtaaggacattgttggactaaggactagtgtctgttggcagcagcattgtgcttctccagcctttgcgtattgtggtcgctcattttgttgtacaggaacagctttaagaactatgtcatcactcccagaatcttctgcaatgtgtagaaaagcagcaaggactagattgcctaggggaaaagacttaatttactttgggagtgaaaaatctgatcaagagactggacgtgtacttctgtttctcagtttatctggatgttatcagatcacagaccatggtctcagggttttgactctgggaggagggctgccttatttggagcaccttaatctctctggttgtcttactataactggtgcaggcctgcaggatttggtttcagcatgtccttctctgaatgatgaatacttttactactgtgacaacattaacggtcctcatgctgataccgccagtggatgccagaatttgcagtgtggttttcgagcctgctgccgctctggcgaatgacccttgacttctgatctttgtctacttcatttagctgagcaggctttctttcatgcactttactcatagcacatttcttgtgttaaccatccctttttgagcgtgacttgttttggccccatttcttacaacttcagaaatcttaatttaccagtgaattgtaatgttgtttctcttgcaaattatacttttggtttagaaagggattaggtcttttcaaaagggtgagaacagtcttacatttttcttttaaatgaaatgctttaaagaatgttggtaatgccatgtcatttaaagtatttcatagataattttgagttttaaagtccatggaggtgattggttctctttacacattaacactgtaccaagctttgcagatcttttccgacacacatgtctgaagacttattttcaagacagcacatttttggaaactaatctcttttccgtaatatttcctttatttcaatgattctc

SEQ ID NO: 185823 - DNA, 1554 bp, Homo Sapiens
ttacagacacccataggaattcataatgccctatcatatcatctctcaatactggatgtttattgttttatagttttactactttaagtaaccaagaagccttttcagaggaagagttccatctcttccctttgatcccccaaagtataggtaacaaaatataaaattaaacaagatttatgtttgataaactaacatataaaattaccattgcaattttcatagtgactgcttataaacataacagtcatcataaagcctataaagtatatacttagttttataaaagaaatgcagattgtctcaaggtaaaaaatacagtgctggctgctaaaaagcactttgtcgcaataagatgtgcaataatgagcaaaacttcagaaaacatgaatatgttccccaacttttaatattagttaagcaagaattgcactgcagcagcaggatgctttttagtggctgacactataaagctaacgttaagaaagaaaaaaggcagaaagtgtgagcaacaaatggtgtaaccaaattattgcaaatggagattagcaataagaagtgaggaaggtgaccgtccactccattctgataagacaccatctttaaatattaagttttttgcaggaagtggaacacccatgtcagcatacgatgactgtgaaagcaaacttgaaaaactgggctctgtgtgaatatccaatattgaagcaccttcctggaatgagtgaacaaagttaaggacttgcagagagagttttctactggaatgtaagaggttttgaaggctctcttttctgcaaaggccatgtgcagcaattttcctacaaactttccggtttaattcggaactgaacagtggaattccaaagcacagctcgagaggaacccaatctgcttctgttgtggcaccagaggtttgctttgttgctgaatctatagttgcttcctcaatgaccatttcaaatgactctgtactcccatttacatctgagccagaagccaaatcaggttctcctctctcatcagaagcatcactgagttttctatctgcaagttggctggaagcattcaacatggtgacatatccacagagatgctgtaagtccactctgttccttagtatctgcaatgctttatgaacacccatattgacacgagtgaactctccttgtagttctgtttcatcaaatggaaatgggacatggacagtttctcctatcccatgcagaccatgcccctgaattaaaactgcagaatgtgttaaagcatcattcaacatcgtgagcacatttgaggtaggaactactccaggatcatgaccccaagatgttattagcaatcgatcataactctgaaatatatctggcagttttcgaagtcttgtacctttggacaataaaagggatggtggtccttgtccagtgacatgataaatgtacagtttaaaccagacagagctgacttctgggatagctggtccaatatgctgaggggtgcagctgctgacaggccggatttcattggtgaggggagccatggaaacaagcagcccaa

SEQ ID NO: 185824 - DNA, 1735 bp, Homo Sapiens
ttggcgcccgccccggggtaagctcgcgccgccgcgtcagctcagcgctgggtctctcggtcccgcagccgtgaggaggacggtctgcatactcgctgcccgccggctccctcccccgcgtccctgcgaccgccgcggcgaagatggcctcaggagtgcaagtagctgatgaagtatgtcgcattttttatgacatgaaagttcgtaaatgctccacaccagaagaaatcaagaaaagaaagaaggctgtcattttttgtctcagtgcagacaaaaagtgcatcattgtagaagaaggcaaagagatcttggttggagatgttggtgtaaccataactgatcctttcaagcattttgtgggaatgcttcctgaaaaagattgtcgctatgctttgtatgatgcaagctttgaaacaaaagaatccagaaaagaagagttgatgttttttttgtgggcaccagaactagcacctctgaaaagtaaaatgatctatgcaagctccaaggatgcaattaaaaagaaatttcaaggcataaaacatgaatgtcaagcaaatggaccagaagatctcaatcgggcttgtattgctgaaaagttaggtggatccttaattgtagcctttgaaggatgccctgtgtagattattcagtgccacaaattgaaagcttccatgtttaatgttatcctcttgctatataaataaagcaaatatatttaggccagggtctcactgagggggagctgtcttgtcatcttttagagtaaactattctataaacatatgcaaacagccctaaataaatctaaagtctaaagttttattgatgtgaaattaaattcttattggccaaatgcctgttttgatgagttgatttataaagatttttgttaagctcaggattttaaattacacagttcacaaacagtaaaggccatgtgaagagaattattacatctttattaacctcagcatttactttgtttcttttgcttaggaaattgctcataatctggttataattttggtccaaattctttattcttccttgagctaagcagaataatggaatataatatgtcttcataatataacaacactaatacactaatagtaagattaagttaggcagtcttctaccaaatgtgtaatggagattgcctcaaaattgtgtccacataatccacgctcatcttgcaaagcgctatttcaggcacatcattggaatacaggaagtagccctgcacctgccagtgagctcgccattcactgattggaagagtgacctggcatcttggaaatcattgtgtgtcttcaggagaatgtgcagtgtcttgtaacaactaattataatgcaaattagggctacattgtaatctgctttgttaatgaaaatgataaaacagaatattgacaagctaggacacctgtggtatctttaattgtatctccttcagaagtttgcttcttatggtataataaagtatggaagaatattgagtatatgtttactctgggcctgggagaacttaactttctagagcagtttgttgacttgtgtgcaatggggagaggtaccatgatgacactcacagggagccactgttcactgacacttggaagcggtcattgttaatatcacggggcgtaacactttgaacgatatagagatgcacaaacagttgaacttagaagtagcagtattggctttatgtaataaaggaagcatttttgac

SEQ ID NO: 185825 - DNA, 1381 bp, Homo Sapiens
actttgtacaaaaaagttggctcaccacagtccctgcgacagactgccacactcaccctggcctggcctcagagaagttgagctactggcctcagttcacacagagcagatggaggaagagctggcactaggacccagggggcaggggggagcctccctggctggaagggatggcaggagcgctggtgcaggtagctatggagctctggccaactctgcctggggaggtcccaggaaggtggcgtcagcatctgcagccgcgtcgacgttgtcggagcctccgcggaggacccaggagagccggactaggaccagggccctgggcctccccacactccccatggagaagctggcggcctctacagagccccaagggcctcggccggtcctgggccgtgagagtgtccaggtgcccgatgaccaagactttcgcagcttccggtcagagtgtgaggctgaggtgggctggaacctgacctatagcagggctggggtgtctgtctgggtgcaggctgtggagatggatcggacgctgcacaagatcaagtgccggatggagtgctgtgatgtgccagccgagacactctacgacgtcctacacgacattgagtaccgcaagaaatgggacagcaacgtcattgagacttttgacatcgcccgcttgacagtcaacgctgacgtgggctattactcctggaggtgtcccaagcccctgaagaaccgtgatgtcatcaccctccgctcctggctccccatgggcgctgattacatcattatgaactactcagtcaaacatcccaaatacccacctcggaaagacttggtccgagctgtgtccatccagacgggctacctcatccagagcacagggcccaagagctgcgtcatcacctacctggcccaggtggaccccaaaggctccttacccaagtgggtggtgaataaatcttctcagttcctggctcccaaggccatgaagaagatgtacaaggcgtgcctcaagtaccccgagtggaaacagaagcacctgcctcacttcaagccgtggctgcacccggagcagagcccgttgccgagcctggcgctgtcggagctgtcggtgcagcatgcggactcactggagaacatcgacgagagcgcggtggccgagagcagagaggagcggatgggcggcgcgggcggcgagggcagcgacgacgacacctcgctcacctgagcgccgcaccgcttcagggacggagacaggaccgggcgagccctggggcggcggccgctcctgcactttctcccctcccccacccggcacctggtggcaccgggccaggcccaggcgggtgctgcagcctggctggacagagccccaataaacgatcccacagcc

SEQ ID NO: 185826 - DNA, 1645 bp, Homo Sapiens
  misc_feature (1185)..(1199): n is a, c, g, or t
ttgggttcatcttctcggaggagaaacggcggcagctgcaggaggagcggcctgagctctccgagagcgagctgacccgcctgctggcccgaatgtggaacgacctgtctgagaagaagaaggccaagtacaaggcccgagaggcggcgctcaaggctcagtcggagaggaagcccggcggggagcgcgaggaacggggcaagctgcccgagtcccccaaaagagctgaggagatctggcaacagagcgttatcggcgactacctggcccgcttcaagaatgaccgggtgaaggccttgaaagccatggaaatgacctggaataacatggaaaagaaggagaaactgatgtggattaagaaggcagccgaagaccaaaagcgatatgagagagagctgagtgagatgcgggcacctccagctgctacaaattcttccaagaagatgaaattccagggagaacccaagaagcctcccatgaacggttaccagaagttctcccaggagctgctgtccaatggggagctgaaccacctgccgctgaaggagcgcatggtggagatcggcagtcgctggcagcgcatctcccagagccagaaggagcactacaaaaagctggccgaggagcagcaaaagcagtacaaggtgcacctggacctctgggttaagagcctgtctccccaggaccgtgcagcatataaagagtacatctccaataaacgtaagagcatgaccaagctgcgaggcccaaaccccaaatccagccggactactctgcagtccaagtcggagtccgaggaggatgatgaagaggatgaggatgacgaggacgaggatgaagaagaggaagatgatgagaatggggactcctctgaagatggcggcgactcctctgagtccagcagcgaggacgagagcgaggatggggatgagaatgaagaggatgacgaggacgaagacgacgacgaggatgacgatgaggatgaagataatgagtccgagggcagcagctccagctcctcctcctcaggggactcctcagactctgactccaactgaggctcagccccaccccagggcagccagggagagcccaggagctcccctccccaactgaccacctttgtttctcccccatgttctgtcccttgcccccctggcctcccccactttctttctttctttnnnnnnnnnnnnnnntacggtgggggtagggggctggaggagcccaggccaggactctgcagcctcagagacatcagcccttgggggtcctcctccagggacagcaactatcagactaagccagcaccggaccagcctggcccaccccacccacttctgcacttgcggttccggcatggacaatggaccggagagtgggggtggggggtcccaaagagtttgatgaggccctccacacctgcggcccaatccaaggtggggtggaagcttggggaagacccattccttcccagaggggcctgccacctggacccctgcattggaactggaggcagggaacatggggaggaggagggtcggtgccttcaagaaaacaggcactgccctggtggctctctcccctgctccctgcagaagagctgcctggacccgttcatgggggaggggcagaagtgtttttt

SEQ ID NO: 185827 - DNA, 1534 bp, Homo Sapiens
  misc_feature (431)..(473): n is a, c, g, or t
  misc_feature (645)..(674): n is a, c, g, or t
  misc_feature (1118)..(1132): n is a, c, g, or t
gggggtggtgggaggattcaaggaaggctggagggatgtgtaagttaggagctccagcacatttcttgaagcccaggtctgagccttggggtggccaggcttggcctctcagatgaacaggggagaccttttccatcaaatacaagctttaagcttcacaccatcttgcctgcctttccgccttctgctggacaatggagaccagcagctcggatgcatgtgactctggcagagagagcctggtctgggaagcatccgagaatggcttcagcacactccccctaatggaatcagagactgggcaaaacagaggatgtggagaacggggcagcctcagcctgctcccaccagggtcaacatctcccggccctcaccgaccctttttccagattcacaacaaactgatgtgggctctaggacagacccctttnnnnnnnnnnnnnnnnnnnnnnnnnnnnnnnnnnnnnnnnnnngctgcacccatgctatgtacaggaacacacatacacatactctcttccacatacatcaagaccatttttaaaaggttccaaatctacccctaaaccctccctctcccagaaatgacaacagagacggcagccgagatcggtaggaaacgtctcgttgacagctcagagcttnnnnnnnnnnnnnnnnnnnnnnnnnnnnnncacttctgccccctcccccatgaacgggtccaggcagctccttcctgcagggggcaggggagagggccaccagggcagtgcctgttttcttgaaggcaccgaccctcctcctccccatgttccctgcctccagttccaatgcaggggtccaggtggcaggcccctctgggaaggaatgggtcttccccaagcttcccccccaccttggattgggccgcaggtgtggagggcctcatcaaactctttgggaccccccacccccactctccggtccattgtccatgccggaaccgcaagtgcagaagtgggtggggtgggccaggctggtccggtgctggcttagtctgatagttgctgtccctggaggaggacccccaagggctgatgtctctgaggctgcagagtcctggcctgggctcctccagccccctacccccaccgtannnnnnnnnnnnnnnaaagaaagaaagaaagtgggggaggccaggggggcaagggacagaacatgggggagaaacaaaggtggtcagttggggaggggagctcctgggctctccctggctgccctggggtggggctgagcctcagttggagtcagagtctgaggagtcccctgaggaggaggagctggagctgctgccctcggactcattatcttcatcctcatcgtcatcctcgtcgtcgtcttcgtcctcgtcatcctcttcattctcatccccatcctcgctctcgtcctcgctgctggactcagaggagtcgccgccatcttcagaggagtccccattctcatcatcttcctcttcttcatcctcgtcctcgtcatcctcatcctcttcatcatcctcctcggactccgccaa

SEQ ID NO: 185828 - DNA, 2192 bp, Homo Sapiens
  misc_feature (963)..(989): n is a, c, g, or t
  misc_feature (1556)..(1575): n is a, c, g, or t
  misc_feature (1935)..(2000): n is a, c, g, or t
ttggcagagagaaaatccttctgcctgttgatttatggaaacaattatgattctgctggagaacttttcagctgagaaatagtttgtagctacagtagaaaggctcaagttgcaccaggcagacaacagacatggaattcttatatatccagctgttagcaacaaaacaaaagtcaaatagcaaacagcgtcacagcaactgaacttactacgaactgtttttatgaggatttatcaacagagttatttaaggaggaatcctgtgttgttatcaggaactaaaaggataaggctaacaatttggaaagagcaactactctttcttaaatcaatctacaattcacagataggaagaggtcaatgacctaggagtaacaatcaactcaagattcattttcattatgttattcatgaacacccggagcactacactataatgcacaaatggatactgacatggatcctgccaactttgctctacagatcatgctttcacattatctgtctagtgggtactatatctttagcttgcaatgacatgactccagagcaaatggctacaaatgtgaactgttccagccctgagcgacacacaagaagttatgattacatggaaggaggggatataagagtgagaagactcttctgtcgaacacagtggtacctgaggatcgataaaagaggcaaagtaaaagggacccaagagatgaagaataattacaatatcatggaaatcacgacagtggcagttggaattgtggcaatcaaaggggtggaaagtgaattctatcttgcaatgaacaaggaaggaaaactctatgcaaagaaagaatgcaatgaagattgtaacttcaaagaactaattctggaaaaccattacaacacatatgcatcagctaaatggacacacaacggaggggaaatgtttgttgccttaaatcaaaaggggattcctgtaagagnnnnnnnnnnnnnnnnnnnnnnnnnnncagcccactttcttcctatggcaataacttaattgcatatggtatataaagaaccagttccagcagggagatttctttaagtggactgttttctttcttctcaaaattttctttccttttattttttagtaatcaagaaaggctggaaaactactgaaaaactgatcaagctggacttgtgcatttatgtttgttttaagacactgcattaaagaaagatttgaaaagtatacacaaaaatcagatttagtaactaaaggttgtaaaaaattgtaaaactggttgtacaatcatgatgttagtaacagtaatttttttcttaaattaatttacccttaagagtatgttagatttgattatctgataatgattatttaaatattcctatctgcttataaaatggctgctataataataataatacagatgttgttatataaggtatatcagacctacaggcttctggcaggatttgtcagataatcaagccacactaactatggaaaatgagcagcattttaaatgctttctagtgaaaaattataatctacttaaactctaatcagnnnnnnnnnnnnnnnnnnnnctattatgaaagtcaataaaatagataatttaacaaaagtacaggattagaacatgcttatacctataaataagaacaaaatttctaatgctgctcaagtggaaagggtattgctaaaaggatgtttccaaaaatcttgtatataagatagcaacagtgattgatgataatactgtacttcatcttacttgccacaaaataacattttataaatcctcaaagtaaaattgagaaatctttaagtttttttcaagtaacataatctatctttgtataattcatatttgggaatatggcttttaataatgttcttcccacaaataatcatgcttttttcctatggttacagcattaaactcnnnnnnnnnnnnnnnnnnnnnnnnnnnnnnnnnnnnnnnnnnnnnnnnnnnnnnnnnnnnnnnnnnccttaataagctgtatctgtttcatatgcttttaattttaaaggaataacaaaactgtctggctcaacggcaagtttccctcccttttctgactgacactaagtctagcacacagcacttgggccagcaaatcctggaaggcagacaaaaaataaagagcctgaagcaatgcttacaatagatgtctcacac

SEQ ID NO: 185829 - DNA, 1467 bp, Homo Sapiens
ttggccttcatccagtctacaaatacccaaggaccataatgcaagagaacatatccaccagtcagatgaacagaaacttgaaaaatgcgaatgaatgcaaattttctgagtggcttaatatagaaaattctgagagaacaggtttgccttttcacgttgataactctgcttctgggaagagagtgaacagtaatgaaccatcttcattatggtcttcacacctaagaactgttgggttaaagccagaaactgctcctctcatccagcaacaaaatatcatggatcaatgttactttgagaactctctatccacagaatgtataattcggtcagccagcagatctgatgggtgtcagatgccaaaacttttttgccagaatctaccaccccctttgccaccaaagaaatatgctataaccagtgtgccacagtcagagaaaagcgaatctacacctgatgtcaaacttacagaggtgtttaaagctacctctcatcttccgaagcacaggttaagtacagcttcagaaccaagtttagaagtgagtacacatatgaatgatgaaagacataaagaaacatttcaagtgagagaatgttttggcaacacaccaaactgtccatccagctcctcaactaacgattttcaggcaaactcaggtgccattgatgcattttgccaaccagaactagactctatttctacctgtccaaatgagacagtttcattaactacctatttttcagttgatagctgcatgacggatacatatagattgaaataccatcagaggcccaagctctcttttccagagagcagtggcttttgtaataattcactatcttagagtgaaaaaggactagacctgtgttacataataatcttggttcaagctgcccttctgaacaaagatataaacctagcatacattgtaatagataactggtaaaactgaccaacttttacttctcagaggccatttaaatataataggaacctactgaccaaacctagtgatacataaaattaaagcctgtggcatttttaaagttgttaatcactatacatatgtatgtgtatatgtgtatacacatatataattttatgatcaatatcttagatattttagaaattccctttgaatagtcttggcgtgccgtgaaaaatagaaaatcagggagatataataattcatttgtcatatgctacagttgaataaaaattaaatttgtctctctattttgtggccagtagactgggaagtattaaactaaccagtactcatgtatggagattataaactatgctaattgaaaagtaccaggtgatacatagcctggtacttttttgtcaaagaattgctttatgaagaagcactttctaatgggtaaccagaaaagggcttcacccatttgttttgacttctatgatagtcactgcatatgatccctttaagtgtctttaaaaaa

SEQ ID NO: 185830 - DNA, 1678 bp, Homo Sapiens
ttggactgtcttgctggaagctttttcctagaggttgagcggtttgcacaatgtcggaaatggctgagttgtccgagctgtatgaagagagcagtgacctgcagatggatgtgatgcctggcgagggtgaccttccgcagatggaggtaggcagcgggagccgggagctatccctgcgtccctcccgcagcggggcccaacagctcgaggaggaaggcccaatggaggaggaggaggcccagccaatggcggcgccagaggggaaacggagccttgctaacgggcccaacgctggggagcagccaggccaggtggcgggcgcagacttcgagagcgaggacgagggcgaggaatttgatgactgggaggacgactacgactatcccgaagaggagcagctcagtggtgccggctacagagtatcagccgctcttgaagaagccgacaagatgtttctgagaacaagagaaccagccctggatggcgggtttcagatgcattatgagaagaccccgtttgatcagttagcttttatcgaagagcttttttcactgatggttgtcaatcgtctgaccgaagaactcggctgtgatgagattattgatagagagtagttagatgctgttaaaagaggaggaaactacttgaggagggacccaactttccgctatcttttgggttcattccaaatagttttgtgccattgaaaaacttgaccttcaaaaaaatttgtttttcagaatagaacacaataggacagtgactgcacagttgtgaaaaaggaagagaatcattaaagaaaaagaaaaaagattttaagaccgttgaaatcaattatcaagaacgtcctaaaacacctatggctttgactttgttattgatccagattattttccttgcattggggaaaatatctttcatatttgtttgctgtaaagatggttttgcaagaataagtcatgaccaagacaaactgccaatacaaaagcccactgatactaattatataatgagaaaaaaatgtatccaactaggacacatatcttttgagttatttggactgaaagcttaagaaaacttggaaaattctattttgtgatctagtcaagccacagttatcaaaggctacattttcagtgtaagataaatggatgagtaaactcaaatatgtatcacgtgtgctttgtatcttaagatgtgtttccaagagcatctgaaattttgtttgtacatgtatcttgatcatttataaagccactgtgatctataaatcaagaaaatccattgtcataaccatttttaaaagtcaaaaattaagacatccttaattaaaaagtttcaaatctagacactaaatgtgtgtgaatgtacaaagaaaacaaaccattgcttatgctgttatatactagagaaattttgttttgcttgctgttttaacttgacagatgaaggactttagttgaacttcatattgtaagaactgttaataaaagttgtcatgtaaaaagcgctatatctaaaaagactttatgaacagttattctatcaacttttaaaggatttaaacctgcccagaaattaccttggtatctgaagtttccctctgtctcctcctctaataaacttgttatttgtcatgcaccagcattggagataataaaaatttcttgttctgtgt

SEQ ID NO: 185831 - DNA, 1954 bp, Homo Sapiens
  misc_feature (1365)..(1378): n is a, c, g, or t
ttggggccgccagcttggggctctttctcctgctgctgctcccgggcgcgcctgagccccgcggcgcctccaggccgtgggagggaaccgacgagccgggctcggcctgggcctggccgggcttccagcgcctgcaggagcagctcagggcggcgggtgccctctccaagcggtactggacgctcttcagctgccaggtgtggcccgacgactgtgacgaggacgaggaggcagccacggggcccctgggctggcgccttcctctgttgggccagcggtacctggacctcctgaccacgtggtactgcagcttcaaagactgctgccctagaggggattgcagaatctccaacaactttacaggcttagagtgggacctgaatgtgcggctgcatggccagcatttggtccagcagctggtcctaagaacagtgaggggctacttagagacgccccagccagaaaaggcccttgctctgtcgttccacggctggtctggcacaggcaagaacttcgtggcacggatgctggtggagaacctgtatcgggacgggctgatgagtgactgtgtcaggatgttcatcgccacgttccactttcctcaccccaaatatgtggacctgtacaaggagcagctgatgagccagatccgggagacgcagcagctctgccaccagaccctgttcatcttcgatgaagcggagaagctgcacccagggctgctggaggtccttgggccacacttagaacgccgggcccctgagggccacagggctgagtctccatggactatctttctgtttctcagtaatctcaggggcgatataatcaatgaggtggtcctaaagttgctcaaggctggatggtcccgggaagaaattacgatggaacacctggagccccacctccaggcggagattgtggagaccatagacaatggctttggccacagccgtcttgtgaaggaaaacctgattgactacttcatccccttcctgcctttggagtaccgtcacgtgaggctgtgtgcacgggatgccttcctgagccaggagctcctgtataaagaagagacactggatgaaatagcccagatgatggtgtatgtccccaaggaggaacaactcttttcttcccagggctgcaagtctatttcccaaaggattaactacttcctgtcatgaaggctagaggaagacttcctggaactgcctttcttccactaacaggaccctgggacctgtaggagcaccccgtttgggactgtgaggtgtttgagggtgtggactggcatccagcagccactaacaaacacacaactggtgtgtaaaaggcaggccttacattagaagccaagccaatccnnnnnnnnnnnnnnggaggtcccaccgagatagataggaacttggattgctgaattcaaaaacagagcccattcttaagatcacttggtgccttaaagacacgcattccaaagtggaatgtggttgaagaaagtgggccaggtggttgaagaaagccatgtgggagctcagcaaatcccaagggcttattatgacactccagatggtctccttagcatctcagctcttctgcaaggaagagcttgggtgttaggcctcagaggctgtagggtccttgggttacagagccggggagaacgaagttctgtgacccaggggtggagaatacactctaggtttgcgggctggtgggctttcaaattggtacttccagaggaaagccaagctgcttctgttgtgagcgaatcagccaagagcctgaggctgaagggaaaagtacacagaggaagatattttacaaaccaggtcagtgtaggccaagacttatggtctacagattttggcgggggaggggggaccttttcttttcaagagggggtcttgacatgtttgttgtatgtgacgatcataagattaaaatttttgatttt

SEQ ID NO: 185832 - DNA, 1506 bp, Homo Sapiens
ttggcaaatatacataaatcttattgtttggcaagatttttcaaaaattagagaactagttaaaccaccatactgtccttaaatcatatttcaaacttacatacctagtgcttttatgttctgaatgtagagtcttcaatttaatgacaatctagactgaatgctgtaatatacaagcaagtcacagttcacttcaaaccaaaagaaataatcagtcttctgtttttatcaaaatcatgatattaagataactatacaatttatctgtgaccagtgatggacccagagagtgttgtgttatggcattctgtggaaagtctttgttccttctttacttttggcttcttcttctgaaacatcttctttatccgcctcttgttcttcctccagttttttcaaaggttgagcagattctgataatttttttgaagggtatggctgtggtgtgtgcctttctgaaggacaaaggcaacctgccacaaatatcatacagagtcctagtaacagtccagaatgcagagttgctaaaggaaaaacagcatatgatccccacactggcaatccaatgtcttcaataaagtagttatggcaagtcctgatccacgtagatagctgaaagagtgctgacgtactactcatctgaacagaacctgaaacaaaccatgatgaaacgggttcaatactcttccactctttatcacttataaagtttatgaagtccttctgagtccttggaccctgaggatgcctaaattcaccatctttacaatgataaatagtaggaagaacagttattgtaaactgtccagtcagtcctggctgctctgtgacatctactttcacaacattaacctcagatcttctccccattcagcaaaactttcccattccggttaatggttttgacaagcagggcaccacggggcataaaattgtatcatccagcctccttccagcagctctctccagttcttgtctgtgatgatgcgtacgttgctctgccgcctgtgggtccagggagcacccccaagcaacagtaccaggactgccagcggaactgcaagactcctggagggtgccatgtctgccgcttgcccacctcacagcaagcgtggcggcccaacactaggttttttaaaaactgtgactatcagtgttttaaaaattgcccggtaactctagacttcaaaagtgggataagtaatgataaaccaataataaacttaggagaagcatagtctgctttagttatattgttatgccatattatggtcagtaacacagtaaaggcctaattcatctgctttctaaattggttctgtacttttctagaaaagcctacatgtatatacttagttacagctgcacttctccattacttatttttaggaaattatagagatggaatagatgctggcaaagcagttactcttcaacacgcttcaatcaagttataagaaagtgcagaagtcattttaaactatggacgactccgaggaacattga

SEQ ID NO: 185833 - DNA, 2105 bp, Homo Sapiens
  misc_feature (1825)..(1840): n is a, c, g, or t
ttggcaggcgctcctcgcagcaccgtagtgcgcttgcgctgagcagcccgcgagggcggaagtgggagctgcgaccgcgctccctgtgaggtgggcaagcggcgaaatggcgccctccgggagtcttgcagttcccctggcagtcctggtgctgttgctttggggtgctccctggacgcacgggcggcggagcaacgttcgcgtcatcacggacgagaactggagagaactgctggaaggagactggatgatagaattttatgccccgtggtgccctgcttgtcaaaatcttcaaccggaatgggaaagttttgctgaatggggagaagatcttgaggttaatattgcgaaagtagatgtcacagagcagccaggactgagtggacggtttatcataactgctcttcctactatttatcattgtaaagatggtgaatttaggcgctatcagggtccaaggactaagaaggacttcataaactttataagtgataaagagtggaagagtattgagcccgtttcatcatggtttggtccaggttctgttctgatgagtagtatgtcagcactctttcagctatctatgtggatcaggacgtgccataactactttattgaagaccttggattgccagtgtggggatcatatactgtttttgctttagcaactctgttttccggactgttattaggactctgtatgatatttgtggcagattgcctttgtccttcaaaaaggcgcagaccacagccatacccatacccttcaaaaaaattattatcagaatctgcacaacctttgaaaaaagtggaggaggaacaagaggcggatgaagaagatgtttcagaagaagaagctgaaagtaaagaaggaacaaacaaagactttccacagaatgccataagacaacgctctctgggtccatcattggccacagataaatcctagttaaattttatagttatcttaatattatgattttgataaaaacagaagattgatcattttgtttggtttgaagtgaactgtgacttttttgaatattgcagggttcagtctagattgtcattaaattgaagagtctacattcagaacataaaagcactaggtatacaagtttgaaatatgatttaagcacagtatgatggtttaaatagttctctaatttttgaaaaatcgtgccaagcaataagatttatgtatatttgtttaataataacctatttcaagtctgagttttgaaaatttacatttcccaagtattgcattattgaggtatttaagaagattattttagagaaaaatatttctcatttgatataatttttctctgtttcactgtgtgaaaaaaaagaagatatttcccataaatgggaagtttgcccattgtctcaagaaatgtgtatttcagtgacaatttcgtggtctttttagaggtatattccaaaatttccttgtatttttaggttatgcaactaataaaaactaccttacattaattaattacagttttctacacatggtaatacaggatatgctactgatttaggaagtttttaagttcatggtattctcttgattccaacaaagtttgattttctcttgtatttttcttacttactatgggttacattttttatttttcaaattggatgataatttcttggaaacattttttatgttttagtaaacagtatttttttgttgtttcaaactgaagtttactgagagatccatcaaattgaacaatctgttgtaatttaaaattttggccacttttttcagattttacatcattcttgctgaacttcaacttgaaattgnnnnnnnnnnnnnnnnggatgtgaaggtgaacattcctgatttttgtctgatgtgaaaaagccttggtattttacattttgaaaattcaaagaagcttaatataaaagtgtgcattctactcaggaaaaagcatcttcttgtatatgtcttaatgtatttttgtcctcatatacagaaagttcttaattgattttacagtctgtaatgcttgatgttttaaaataataacatttttatattttttaaaagacaaacttcatattatcctgtgttctttcct

SEQ ID NO: 185834 - DNA, 1643 bp, Homo Sapiens
  misc_feature (1388)..(1408): n is a, c, g, or t
ccaactttgtacaaaaaagttgggactaagaaggacttcataaactttataagtgataaagagtggaagagtattgagcccgtttcatcatggtttggtccaggttctgttctgatgagtagtatgtcagcactctttcagctatctatgtggatcaggacgtgccataactactttattgaagaccttggattgccagtgtggggatcatatactgtttttgctttagcaactctgttttccggactgttattaggactctgtatgatatttgtggcagattgcctttgtccttcaaaaaggcgcagaccacagccatacccatacccttcaaaaaaattattatcagaatctgcacaacctttgaaaaaagtggaggaggaacaagaggcggatgaagaagatgtttcagaagaagaagctgaaagtaaagaaggaacaaacaaagactttccacagaatgccataagacaacgctctctgggtccatcattggccacagataaatcctagttaaattttatagttatcttaatattatgattttgataaaaacagaagattgatcattttgtttggtttgaagtgaactgtgacttttttgaatattgcagggttcagtctagattgtcattaaattgaagagtctacattcagaacataaaagcactaggtatacaagtttgaaatatgatttaagcacagtatgatggtttaaatagttctctaatttttgaaaaatcgtgccaagcaataagatttatgtatatttgtttaataataacctatttcaagtctgagttttgaaaatttacatttcccaagtattgcattattgaggtatttaagaagattattttagagaaaaatatttctcatttgatataatttttctctgtttcactgtgtgaaaaaaagaagatatttcccataaatgggaagtttgcccattgtctcaagaaatgtgtatttcagtgacaatttcgtggtctttttagaggtatattccaaaatttccttgtatttttaggttatgcaactaataaaaactaccttacattaattaattacagttttctacacatggtaatacaggatatgctactgatttaggaagtttttaagttcatggtattctcttgattccaacaaagtttgattttctcttgtatttttcttacttactatgggttacattttttatttttcaaattggatgataatttcttggaaacattttttatgttttagtaaacagtatttttttgttgtttcaaactgaagtttactgagagatccatcaaattgaacaatctgttgtaatttaaaattttggccacttttttcagattttacatcattcttgctgaacttcaacttgaaattgnnnnnnnnnnnnnnnnnnnnnggatgtgaaggtgaacattcctgatttttgtctgatgtgaaaaagccttggtattttacattttgaaaattcaaagaagcttaatataaaagtttgcattctactcagggaaaaagcatcttcttgtatatgtcttaaatgtatttttgtcctcatatacagaaagttcttaattgattttacagtctgtaatgcttgaatgttttaaaataataccattttatattttttaaaa

SEQ ID NO: 185835 - DNA, 1550 bp, Homo Sapiens
  misc_feature (1239)..(1247): n is a, c, g, or t
  misc_feature (1419)..(1428): n is a, c, g, or t
tttatcacctagagagaaccaactattaacattcttttaaactctcagtcttttgttctgcataaattttaggttttaagaatgatttttctttctctcccagtcatggcacagattgaaaaacaagagagatttgaacagtatactacctgtaagagctgctgtcctgaaaagataactggcctctatttcttaataaattcttccaagaaataaagaacaatagtttcatcataatacattatgtttacctccatcatagttgcttttttcatagttcttgttttcatgttttatttttaaaaagacatataaagattgcatattttattatgacatttcctaataaacccctttgatttaaaaatgtatttttaaaaatgtttacattgatgatgagtaatattgcatgtgttttcaggtgatcagataaaatatattttgggaaattaactgaacaaataaaaagtttttgatataacttcaattaattgtaccacatgctaatcctgaagagatgtgtagaattttggaaagggtctaattcatacatgcttaaagtataacctacgttagatagtttgttgtcaaagtctgttctagtaaagtgaagattcaagtcagttgttcagttacttgaagcaaaacgaaatctttcatttcagtcaaatcactgcagtcatgaaatactgaacaattgccttaagtctttgcttgactcactgggatagactgaggctttgggtgtgtctgtattagcatttcattagtacttcacatgcttttgatgtactcttgagattgctttaaattttgtattgaaacaacaatacattttgcactgtagtaatgggagcactaactcttacaacagttagtgaatcgttttaaagaatcagttcagtgtagacattttgaaaagattgtttcctgtgctttacgatagcttagtgcaatgtgcacttctgttttacttgccattttcctgctctgttttctctgtgacatgaagcaacagaaactgagatcaaagttaagattatatcctgtttgtagtatcagatatttttctgtgtacaattataggattgtaatctaaactggaatttttaggcagtaagtcaccacaaaatgttttagataagacacaataaaattattataaataaaagcttaatgtttgtaaaaaatctcttttttagtatttcttttttcacatgaaagaagtggtggctgctnnnnnnnnngctacagtgtttattaagggtcgttttgatttatgtaaatatttgtaaattggtcagtgcctgtaaatttaaatataaaaagtaaccttgaaaacagttttaactttttcaaaagaactatgtccaacattttttagacctgctgtagtacagttttgtacctctaacgtannnnnnnnnngcagaccaaatgctaaacttttgcttttctttgacttgtaaaagggcacattttcattttcttcctaagttcaaattttgtatgatgtcgatgcaataaattatatatggacattgttgagg

SEQ ID NO: 185836 - DNA, 1468 bp, Homo Sapiens
ttggcagcagtgtaggcccaggtcggcggcggggcacgggaaacttttccgaaacggtagcgttttgttttgcgtgggaggttccagcagtatctcttggttattccaaatttatgggcggcatctgggctgctgtacattttgaagaatcttaggaccgcttactttgcttactcgttttctattcctcgcgtactgcctcgtccaccactccaggaccaaaagaggaagatagtcttgggacccttgcatggtgtttcaaagggtggtgaagaactaaggtagaagaatacatgttcacttccagtgaacaagagcatgttcccaaactcaattttgggtcgcccacccttcactccaaatcatcaacaacataataacttctttaccctgtcacctactgtttattcacaccagcagcttatagatgcacaattcaactttcagaatgcagacttgtctagagctgtgtcattacagcagctgacatatggaaatgtcagtccaatacagacctcagcttccccattatttcgaggaagggagagattaagcgatgaaaaaaaccttcctcttgacggtaaacggcaacgtttccattcaccccaccaagagccaactgtagttaaccagatagtgcctttatcaggtgaacgaagatactcaatgccaccattgtttcatacacattatgtaccagatatagtcagatgtgttccaccttttcgagaaattgcatttttagaacctagagaaatcacactgcctgaggccaaagataagttgagtcagcagatactggagttatttgaaacatgtcagcagcaaataagtgatttaaagaagaaagaactctgtcgaacacagctgcagagagaaattcagctgttatttccacaaagcagactttttttggttgggtcctctttaaatggatttggtacccggagcagtgatggtgatttatgcctagttgttaaggaagaaccatgtttttttcaggtaaatcagaagactgaagcacggcatatactcaccttagtccataaacacttctgtactagactttcgggctacattgagagacctcagctgattcgagcaaaagtgccaattgtgaagttcagggataaagtcagttgtgtggagtttgacttgaatgtaaacaatattgttggaataagaaacacattccttctcagaacttatgcataccttgaaaatcgagttcgtccgttagtgctggtgattaagaagtgggcaagtcaccatcagataaatgatgccagtcgtggtactttaagcagctatagtcttgtattgatggttttgcactatttacaaaccctacctgaacccatccttccatccctccaaaaaatttacccagagtcttttagtcctgctatacagctgcaccttgtacatcaagctccatgtaatgttcctccttacctctcaaagaatg

SEQ ID NO: 185837 - DNA, 1512 bp, Homo Sapiens
  misc_feature (1332)..(1341): n is a, c, g, or t
gccaactttgtacaaaaaagttggctggaatagtcaaatgatttcagttcgtgaagccaaagccattccaaggcctgatggtattgaatggagaaataaatacatctgtgtagaagaaccttttgatggaacaaatacagccagagcagtgcacgaaaagcagaaatttgatatgatcaaggatcaatttttaaagtcatggcacagattgaaaaacaagagagatttgaacagtatactacctgtaagagctgctgtcctgaaaagataactggcctctatttcttaataaattcttccaagaaataaagaacaatagtttcatcataatacattatgtttacctccatcatagttgcttttttcatagttcttgttttcatgttttatttttaaaaagacatataaagattgcatattttattatgacatttcctaataaacccctttgatttaaaaatgtatttttaaaaatgtttacattgatgatgagtaatattgcatgtgttttcaggtgatcagataaaatatattttgggaaattaactgaacaaataaaaagtttttgatataacttcaattaattgtaccacatgctaatcctgaagagatgtgtagaattttggaaagggtctaattcatacatgcttaaagtataacctacgttagatagtttgttgtcaaagtctgttctagtaaagtgaagattcaagtcagttgttcagttacttgaagcaaaacgaaatctttcatttcagtcaaatcactgcagtcatgaaatactgaacaattgccttaagtctttgcttgactcactgggatagactgaggctttgggtgtgtctgtattagcatttcattagtacttcacatgcttttgatgtactcttgagattgctttaaattttgtattgaaacaacaatacattttgcactgtagtaatgggagcactaactcttacaacagttagtgaatcgttttaaagaatcagttcagtgtagacattttgaaaagattgtttcctgtgctttacgatagcttagtgcaatgtgcacttctgttttacttgccattttcctgctctgttttctctgtgacatgaagcaacagaaactgagatcaaagttaagattatatcctgtttgtagtatcagatatttttctgtgtacaattataggattgtaatctaaactggaatttttaggcagtaagtcaccacaaaatgttttagataagacacaataaaattattataaataaaagcttaatgtttgtaaaaaatctcttttttagtatttcttttttcacatgaaagaagtggtggctgctnnnnnnnnnngctacagtgtttattaagggtctttttgatttatgtaaatatttgtaaaattggtcagtgcctgtaatttaaatataaaaagtacctttgaaaacagttttacctttttcaaagaaactatgtccaacattttttaaacctgctgtagtacagttttgtacctctaacgta

SEQ ID NO: 185838 - DNA, 1817 bp, Homo Sapiens
ttggccagcaccggctccagtgggctctacaaggcgcctctgtcgaagagccttctgctggtccccagtgccctctccctcctgctcgccctcctcctgcctcactgccagaagctctttgtgtatgaccttcacgcagtcaagaacgacttccagatttggaggttgatatgtggaagaataatttgccttgatttgaaagatactttctgcagtagtctgcttatttataattttaggatatttgaaagaagatatggaagcagaaaatttgcatcctttttgctgggttcctgggttttgtcagccttatttgactttctcctcattgaagctatgcagtatttctttggcatcactgcagctagtaatttgccttctggattcctggcacctgtgtttgctctgtttgtaccattttactgctccataccaagagtccaagtggcacaaattctgggtccgttgtccatcacaaacaagacattgatttatatattgggactgcagcttttcacctctggttcctacatctggattgtagccataagtggacttatgtccggtctgtgctacgacagcaaaatgttccaggtgcatcaggtgctctgcatccccagctggatggcaaaattcttttcttggacacttgaacccatcttctcttcttcagaacccaccagcgaagccagaattgggatgggagccacgctggacatccagagacagcagagaatggagctgctggaccggcagctgatgttctctcagtttgcacaagggaggcgacagagacagcagcagggaggaatgatcaattggaatcgtctttttcctcctttacgtcagcgacaaaacgtaaactatcagggcggtcggcagtctgagccagcagcgccccctctagaagtttctgaggaacaggtcgcccggctcatggagatgggattttccagaggtgatgctttggaagccctgagagcttcaaacaatgacctcaatgtcgccaccaacttcctgctgcagcactgatagtcccaggccaacactgggaccggaccggcagccgagtgacagtgcgtggtccccaccatcagatcagcccggggaccgagcatctctggtgctgatgttcttgtgggaagagggaggttccaccgcacccctgccctcaaccgcaagactgttgccgttttagtgtggagataagtttgccattacattagcatgtattttctatctatattttttattgggcattttccctaggttggagagtcagcactcgttttgaatgtgtttaaaatgcattaaaatggaagatttctgcaggcagttgaatggcactccagatggggaattgctgtaaccctcttactgtaacatgtcatctcctgcgtcgtgatggggagagggtaatgttacttcacaaaggacatgtcagatccttcttcatggacttttttagttactgttttttctctcaaacttgttttcgaatctcctgggagtgagggagaaacagggagctgaatcctcccccaagctgttccaggccagaggactctgcagtaccttctcctacatctagtaacaaagaatggtgataaccatgcactggttcaaggttctggagttctccatgaaacttgggttaattttgctcagagtatccggagttagccactaggctgcgggtgaaatgggatggagtagaacaacagcaggcttcctggagccacatgggctgactatggcactctgtggctggcctggcacgggctcagcccaggaagaggagaaacgatcccttgcct

SEQ ID NO: 185839 - DNA, 2740 bp, Homo Sapiens
  misc_feature (1840)..(1891): n is a, c, g, or t
  misc_feature (2538)..(2572): n is a, c, g, or t
ttggcttaggggcgcctggcgctacgggtttctcgttggaggcggccttcgtggcagctgtagacgccgggaaaaggcataaagtccgttggccgacacctttctttcctccggcctcggtagaaccgccagcccgcgtccgaaggcggaggcgaggggaactggccgcgtgaggggcctgaggcgagcggttagagcgtctcccggaaggatgggccggtctcggagccggagctcgtcccgctccaagcacaccaagagcagcaagcacggtgagcaagcgcagcagcctggacgagaagcagaagcgagaggaggaggagaagaaagcggagttcgagcggcagcgaaaaattcgacagcaagaaatagaagaaaaactcatcgaggaagaaacagcacgaagagtagaagaattggtagcaaaaagggtggaggaagaactggagaaaaggaaggatgaaattgaacgagaagttctccgaagggtggaggaagccaaacgcatcatggaaaagcagttgctcgaagaactcgagcgacagagacaagctgagcttgccgcacaaaaagctagagaggtaacgctcggtcgtttggaaagtagagacagtccatggcaaaactttcagtgttgggttctgcctcctgctcagttcagaaagagatggaatacagactatctaattcctttctcgtctaaacttaacattgctgcgaaagttaattttttagcctattcagaagtgctgactgataacttaaaagttggaagcttttataaaacatattcaaggatactttttgatttaatggaactggctatttgagaagtgtttgaaacttttgccatggctgcaggacttacattcttttttgggaggacggtggggagacagggagtggtaaagggaaaaggttaaaaatccacctgtggttgtatattcttctattctgtcactctgttacctagactgtgagaggcttttgccttcagtcagattaaaaagagcagggcctaacattgagtgatagcacctgctttgataaataggttttctcactcttctttttttccttcttttatccctcactccctcccctaaaccctgcttcagcacaatggactaattctagcattctgatcataaggccctccattttcctaatgtgtttcaaggaatctttttaggaaaaatatccagattattcatccactttttttagtatctactaacaactcctttttttctctagagagttatgaaggaacaggttgtccttgtctggagtcaagctaaacacatgatttgttttatcagcagctggagcagaagttgaaaatgtctttctgtgagacagtaatttgctactgaagctttatggcttgtttgcactgattactccaggatccaaaaacttggtgaaagtcactgaaacactcaaggcaaattactttacagccctgagtgtctgtcaccatagtttgcataatgaatatgaatcccattggtgtgtggtgtaggaaatcctgtagttgtattttcttgaactgaaatatttgactcaaaataattaagactcattgtcatttttcatcttggcattattgtggacaagttgacatattaaatctctttgctttctggtaagcttagcttttaaaatgcattttcccttgtcctgtctttaactagatatacatgcttatatttatagtgggtttcacagactataaaattgaatgtatgaaatttttatttatatcagtgcttttaataatgaagatatttttggagtaatggtgctgtcttgtagcgagttattaatcatagtaagnnnnnnnnnnnnnnnnnnnnnnnnnnnnnnnnnnnnnnnnnnnnnnnnnnnnacacggacacaaccctctgacagtctttccaaatattaaaatcatttgaatatgtatgctgtgatctgaacactgctcaagccatcaagcagtcttcatacagtttgcattataaaatctcattaaattctccaagaaaaaataagttgaagaattttatttcctgaccatgcatcccctggatttctgagtttcagttcagattgtagatgacaatataagctgccttccgaaattgtcaacatctgaatgttaagtccattttccccatggaagaagcccgtagttccatgaagtatggattaccatttgtatttttcactaacagtaaatgtatttttcttattaattgtttgccttaggaatgatgaattacattttttgttccttcttaccataaacatctgcattcctcagctcagccttccttgtatgttgtttctttataaatggttgagctgctgatgcaggtattgccaagctaacagtacaaatcattttaaagaggaagctggcgcgtatggcagccgaggagcacactctgcaggacactggacaagacagtaaatattcaacttttaatgctgattaaaggagtataggtaaagaatacgtaggtatacataattggtgagacaaatattcannnnnnnnnnnnnnnnnnnnnnnnnnnnnnnnnnnggtaaatactatccagttttgtagttgtccttgttgatttgtgtgatattaaagtattagtaataattgccaggaaactatcattaggggagggtttagttggtcgctgtttggactgggagggatgatttaaaatttagtgctagaaaccaattttagtgactgcac

SEQ ID NO: 185840 - DNA, 831 bp, Homo Sapiens
acacggacacaaccctctgacagtctttccaaatattaaaatcatttgaatatgtatgctgtgatctgaacactgctcaagccatcaagcagtcttcatacagtttgcattataaaatctcattaaattctccaagaaaaaataagttgaagaattttatttcctgaccatgcatcccctggatttctgagtttcagttcagattgtagatgacaatataagctgccttccgaaattgtcaacatctgaatgttaagtccattttccccatggaagaagcccgtagttccatgaagtatggattaccatttgtatttttcactaacagtaaatgtatttttcttattaattgtttgccttaggaatgatgaattacatttttttgttccttcttaccataaacatctgcattcctcagctcagccttccttgtatgttgtttctttataaatggttgagctgctgatgcaggtattgccaagctaacagtacaaatcattttaaagaggaagctggcgcgtatggcagccgaggagcacactctgcaggacactggacaagacagtaaatattcaacttttaatgctgattaaaggagtataggtaaagaatacgtaggtatacataattggtgagacaaatattcactttatttatattttatatattatttttgtaatttggtaaatactatccagttttgtagttgtccttgttgatttgtgtgatattaaagtattagtaataattgccaggaaactatcattagggagggtttagttggttgctgtttggactgggagggatgatttaaatttagtgctagaaacc

SEQ ID NO: 185841 - DNA, 875 bp, Homo Sapiens
cagggaaagaataaaacacactgtggagaaagaacgttcacctccagacaaggctctcatgtcattgaaagcagctttatttccttctccaggctgaactgatatacttagagtttcattcttgtggtcaaaattcatttttccacaataggcccgctgagatagtaagttgtcaaagtataatttgcatcgtaaagtcaaacaccttctaaattgttgatatgtcttgaatctgtgctccatgatttctcccagtaatttaataaacttttttaaagtcctcactttactatccagatcaagataggtctctcttgcttcttggtactgcctcattatttcctctcgatctccatgactagcatgttctgcctgtatcttctgccttaatcgattaatttctttgtccagaattgatgcagatttttctacttctatacgctctgggcagatttgtcttgcttgtgacattttctcctctagttctttctctttcatatccagttctcgtttctttttatttaaggtatccaagtgttctttttgtttttcttcataatgtcgtttccctcgtttttggttatccacttcagaatcagcaaggtttaattcatccttaagtgggtctgctagctccgatagttgattaattttgaatttaattgcatcatacttattttctgcttctattttcagacttttaagatgctccatattttctttttgttgctccatatgttcctcaaccattttcattttgcttttattttcctgagcttcatcttccaaagttgcaatatctacagactggtgttcttctatgttctcaagttcccgaatttcagaaatattttttcttattttcatctttccaa

SEQ ID NO: 185842 - DNA, 1146 bp, Homo Sapiens
  misc_feature (954)..(1014): n is a, c, g, or t
ttggctctttaattcatttcattaatttttttgttataaaagtaaatgaactggtgaaagtgtagggacataaatgaatataaagacacaaggcaaaaaatactacctaaaactcaactattaaatgagtaaccaatgtttacattttggcatatttccatctggttttctcacatgcttagatcatgctgaatatagtttttaaaaaacctttgccctctttttaatgtgcctaatttttaaatttcaaggtgtttggctttacgatgcaaattatactttgacaacttactatctcagcgggcctattgtggaaaaatgaattttgaccacaagaatgaaactctaagtatatcagttcagcctggagaaggaaataaagctgctttcaatgacatgagagccttgtctggaggtgaacgttctttctccacagtgtgttttattctttccctgtggtccatcgcagaatctcctttcagatgcctggatgaatttgatgtctacatggatatggttaataggagaattgccatggacttgatactgaagatggcagattcccagcgttttagacagtttatcttgctcacacctcaaagcatgagttcacttccatccagtaaactgataagaattctccgaatgtctgatcctgaaagaggacaaactacattgcctttcagacctgtgactcaagaagaagatgatgaccaaaggtgatttgtaacttaacatgccttgtcctgatgttgaaggatttgtgaagggaaaaaaaattctggactctttgatataataaaatgagactggaggcattctgaaatgaaagaaactcctttatatatccaaccacaatcaaacatataaataagcctggaaaaccaactacaaccagcaatttaagattactattactttaagaaaatcaatttcatagtattggttttaaannnnnnnnnnnnnnnnnnnnnnnnnnnnnnnnnnnnnnnnnnnnnnnnnnnnnnnnnnnnngtacatatatacatgtacatatctgtttagtttgggttcatttctataacattttgtaagaaaataaaagtttgagcacctgattatatttagttttgcttttccagatattacattctatagttaccaaaa

SEQ ID NO: 185843 - DNA, 3264 bp, Homo Sapiens
  misc_feature (1028)..(1037): n is a, c, g, or t
ttggggtcaaggtcctggaggagaggcagcggttccaggaagagaggcagaaactcactgcccaggtggaagaactgagtaagaaactggctgactctgaccaagccagcaaggtgcagcagcagaagctgaaggctgtccaggctcagggaggcgagagccagcaggaggcccagcgcctccaggcccagctgaatgaactgcaagcccagttgagccagaaggagcaggcagctgagcactataagctgcagatggagaaagccaaaacacattatgatgccaagaagcagcagaaccaagagctgcaggagcagctgcggagcctggagcagctgcagaaggaaaacaaagagctgcgagctgaagctgaacggctgggccatgagctacagcaggctgggctgaagaccaaggaggctgaacagacctgccgccaccttactgcccaggtgtgcagcctggaggcacaggttgcccatgcagaccagcagcttcgagacctgggcaaattccaggtggcaactgatgctttaaagagccgtgagccccaggctaagccccagctggacttgagtattgacagcctggatctgagctgcgaggaggggaccccactcagtatcaccaggtcaggaggcagccttcctccctatgtctgtttatggagtgcctgctgtttatcacgctgtatcctagtgagataaataagatgtgatctaaatttattcttagagaagaataaagaaaaacgggtattataccagatatctatttagggcacagttggaataaaaagcaagtggtcaagaaaggcttcgtggaagctatcgctcctgctgagtcttgaaagcatccataggtgtgtgtgccaggttgacgagaagagcagtgtgaacagaggctgtgaaagagcctgactaagctgagatgtgaggccaggaaggcccattggagaccggctattaagacttgatcctaaaggcattgaggaaaccttggtggctgtaattgaaaggtttaggagnnnnnnnnnnggaaccttggaagaatttgaaactgaagagtacatggttaatttgcatcttaaaaagattattctaatagctagtatagaagttaagactggaaaaatgtttttattaaacacttacatttacttattttgtgctagacataaagcactcatgacaattatacctgatttgtcccccaacaaccctctgaggtaggtttattctgtctcctttaacagatgaatctggggcatagaggggcagtcacttgcccaaggttccccagtggtagagctggggtttgaccctgggcagcctggcctgagttcttggcttgtcaccactcatcttcctctgtcagtgccatgatgagtctaggtgagaggagatgaagcagaccagggaaaggacatgagcatggagtggggtgtggttagttgctgttcaggaagcttggtgattgggctcgccaagcaggacgacattggattatgcccacgttcatggcttgggggcctgagtggggggcgttcctattcactgaaatgggagatgcaggaggaagaacagagaagtgggcttagattgggacgtgtttgctgtgaagcagccatgggcatctggtggggatgggacatctgggtctgggcattgccactatgaggagctattaggagaagccaggggagtggactgaaaggaaggcccaggtcaagtgctttccttggtacctctgaaaaatcagagagatgggctgcttgacctcatctgcttgtagtaaggatgggaaatggtcactttcaaaaagggctggacaaaatgccttctagcgtgaaggactgtacctcagcaggtttcctttccatagcaagctgcctcgtacccagccagacggcaccagcgtccctggagaaccagcctcacctatctcccagcgcctgccccccaaggtagaatccctggagagtctctacttcactcccatccctgctcggagtcaggcccccctggagagcagcctggactccctgggagacgtcttcctggactcgggtcgtaagacccgctccgctcgtcggcgcaccacgcagatcatcaacatcaccatgaccaagaagctagatgtggaagagccagacagcgccaactcatcgttctacagcacgcggtctgctcctgcttcccaggctagcctgcgagccacctcctctactcagtctctagctcgcctgggttctcccgattatggcaactcagccctgctcagcttgcctggctaccgccccaccactcgcagttctgctcgtcgttcccaggccggggtgtccagtggggcccctccaggaaggaacagcttctacatgggcacttgccaggatgagcctgagcagctggatgactggaaccgcattgcagagctgcagcagcgcaatcgagtgtgccccccacatctgaagacctgctatcccctggagtccaggccttccctgagcctgggcaccatcacagatgaggagatgaaaactggagacccccaagagaccctgcgccgagccagcatgcagccaatccagatagccgagggcactggcatcaccacccggcagcagcgcaaacgggtctccctagagccccaccagggccctggaactcctgagtctaagaaggccaccagctgtttcccacgccccatgactccccgagaccgacatgaagggcgcaaacagagcactactgaggcccagaagaaagcagctccagcttctactaaacaggctgaccggcgccagtcgatggccttcagcatcctcaacacacccaagaagctagggaacagccttctgcggcggggagcctcaaagaaggccctgtccaaggcttcccccaacactcgcagtggaacccgccgttctccgcgcattgccaccaccacagccagcgccgccactgctgccgccattggtgccacccctcgagccaagggcaaggcaaagcactaaagggccagtaccagtgagtggccccacctgtgtccccgatgctgccgtcacctggtcctccgcctactgtccctctcagtgccttctctcagctcccaggccaacagtagccaaacccctagagacagtgatgcctgcccgcaccctggcctggtccctggtccttcactggcgccttctcggagctggcccagggggcctggagcatggacagtgtgggcgctctccctaccttgcctccttttttc

SEQ ID NO: 185844 - DNA, 2506 bp, Homo Sapiens
  misc_feature (2372)..(2384): n is a, c, g, or t
actttgtacaaaaaagttgggacagcacagacagattgacctattggggtgtttcgcgagtgtgagagggaagcgccgcggcctgtatttctagacctgcccttcgcctggttcgtggcgccttgtgaccccgggcccctgccgcctgcaagtcggaaattgcgctgtgctcctgtgctacggcctgtggctggactgcctgctgctgcccaactggctggcaagatgaagctctccctggtggccgcgatgctgctgctgctcagcgcggcgcgggccgaggaggaggacaagaaggaggacgtgggcacggtggtcggcatcgacctggggaccacctactcctgcgtcggcgtgttcaagaacggccgcgtggagatcatcgccaacgatcagggcaaccgcatcacgccgtcctatgtcgccttcactcctgaaggggaacgtctgattggcgatgccgccaagaaccagctcacctccaaccccgagaacacggtctttgacgccaagcggctcatcggccgcacgtggaatgacccgtctgtgcagcaggacatcaagttcttgccgttcaaggtggttgaaaagaaaactaaaccatacattcaagttgatattggaggtgggcaaacaaagacatttgctcctgaagaaatttctgccatggttctcactaaaatgaaagaaaccgctgaggcttatttgggaaagaaggttacccatgcagttgttactgtaccagcctattttaatgatgcccaacgccaagcaaccaaagacgctggaactattgctggcctaaatgttatgaggatcatcaacgagcctacggcagctgctattgcttatggcctggataagagggagggggagaagaacatcctggtgtttgacctgggtggcggaaccttcgatgtgtctcttctcaccattgacaatggtgtcttcgaagttgtggccactaatggagatactcatctgggtggagaagactttgaccagcgtgtcatggaacacttcatcaaactgtacaaaaagaagacgggcaaagatgtcaggaaagacaatagagctgtgcagaaactccggcgcgaggtagaaaaggccaaacgggccctgtcttctcagcatcaagcaagaattgaaattgagtccttctatgaaggagaagacttttctgagaccctgactcgggccaaatttgaagagctcaacatggatctgttccggtctactatgaagcccgtccagaaagtgttggaagattctgatttgaagaagtctgatattgatgaaattgttcttgttggtggctcgactcgaattccaaagattcagcaactggttaaagagttcttcaatggcaaggaaccatcccgtggcataaacccagatgaagctgtagcgtatggtgctgctgtccaggctggtgtgctctctggtgatcaagatacaggtgacctggtactgcttgatgtatgtccccttacacttggtattgaaactgtgggaggtgtcatgaccaaactgattccaaggaacacagtggtgcctaccaagaagtctcagatcttttctacagcttctgataatcaaccaactgttacaatcaaggtctatgaaggtgaaagacccctgacaaaagacaatcatcttctgggtacatttgatctgactggaattcctcctgctcctcgtggggtcccacagattgaagtcacctttgagatagatgtgaatggtattcttcgagtgacagctgaagacaagggtacagggaacaaaaataagatcacaatcaccaatgaccagaatcgcctgacacctgaagaaatcgaaaggatggttaatgatgctgagaagtttgctgaggaagacaaaaagctcaaggagcgcattgatactagaaatgagttggaaagctatgcctattctctaaagaatcagattggagataaagaaaagctgggaggtaaactttcctctgaagataaggagaccatggaaaaagctgtagaagaaaagattgaatggctggaaagccaccaagatgctgacattgaagacttcaaagctaagaagaaggaactggaagaaattgttcaaccaattatcagcaaactctatggaagtgcaggccctcccccaactggtgaagaggatacagcagaaaaagatgagttgtagacactgatctgctagtgctgtaatattgtaaatactggactcaggaacttttgttaggaaaaaattgaaagaacttaagtctcgaatgtaattggaatcttcacctcagagtggagttgaaactgctatagcctaagcggctgtttactgctttttcattagcagttgctcacatgtctttnnnnnnnnnnnnnagaaagaagaattggccatcttaaaaagcgggtaaaaaacctggggttagggtgtgtgttcacctttcaaatgttctattttacaactggggtcatgtgcatctggtgtagggaagtttttt

SEQ ID NO: 185845 - DNA, 1614 bp, Homo Sapiens
ttggtgcagccacatgttcggggaccgagtggggtcaatcttctggtgctgcctctccaggtctcttccaggccggtcatagacgtactccctctgaggccgaccgatggttagaagaggtgtctaagagcgtccgggctcagcagccccaggcctcagctgctcctctgcagccagttctccagcctcctccacccactgccatctcccagccagcatcacctttccaagggaatgcattcctcacctctcagcctgtgccagtgggtgtggtcccagccctgcaaccagcctttgtccctgcccagtcctatcctgtggccaatggaatgccctatccagcccctaatgtgcctgtggtgggcatcactccctcccagatggtggccaacgtatttggcactgcaggccaccctcaggctgcccatccccatcagtcacccagcctggtcaggcagcagacattccctcactacgaggcaagcagtgctaccaccagtcccttctttaagcctcctgctcagcacctcaacggttctgcagctttcaatggtgtagatgatggcaggttggcctcagcagacaggcatacagaggttcctacaggcacctgcccagtggatccttttgaagcccagtgggctgcattagaaaataagtccaagcagcgtactaatccctcccctaccaaccctttctccagtgacttacagaagacgtttgaaattgaactttaagcaatcattatggctatgtatcttgtccataccagacagggagcagggggtagcggtcaaaggagcaaaacagactttgtctcctgattagtactcttttcactaatcccaaaggtcccaaggaacaagtccaggcccagagtactgtgaggggtgattttgaaagacatgggaaaaagcattcctagagaaaagctgccttgcaattaggctaaagaagtcaaggaaatgttgctttctgtactccctcttcccttacccccttacaaatctctggcaacagagaggcaaagtatctgaacaagaatctatattccaagcacatttactgaaatgtaaaacacaacaggaagcaaagcaatctccctttgtttttcaggccattcacctgcctcctgtcagtagtggcctgtattagagatcaagaagagtggtttgtgctcaggctggggaacagagaggcacgctatgctgccagaattcccaggagggcatatcagcaactgcccagcagagctatattttgggggagaagttgagcttccattttgagtaacagaataaatattatatatatcaaaagccaaaatctttatttttatgcatttagaatattttaaatagttctcagatattaagaagttgtatgagttgtaagtaatcttgccaaaggtaaaggggctagttgtaagaaattgtacataagattgatttatcattgatgcctactgaaataaaagaggaaaggctggaagctgcagacaggatccctagcttgttttctgtcagtcattcattgtaagtagcacattgcaacaacatcatgcttatgaccaatacagtcactaggttgtagttttttttaaataaaggaaaa

SEQ ID NO: 185846 - DNA, 1685 bp, Homo Sapiens
ttgggatgttatcaaaaattgggattccttgataccagatgaaatgccagattctcccattcaagaaaaatcagaatgtcaggacatgtctctttcttcaccgaccagcgtacttggtggctcccgccaccagagcctccccgtgacaccccactcaggagccctgagcctgtgcagtgccgacacatccctgggggacagggcggacacctcgctgccacagacccaggggccggggctgctttgttccccaggcgtgtctgcagcagcgctggcactgcagtgggccgagtctccgccggctgacgaccaccatgtgcagaggacggctgtggagaaagatgtcgaagattttatcacaacatcctttgattctcaagaaacattaagttcacctcctcctggattagaaggaaaagctgatagaagtgagaaaagtgacggctcgggttttggagcaagactgagcccggggtcaggaggccctgaggctcaaactgctggtcctgtgacccctgcttccatctctggaaggtttcagccgctgccggaagccatgaaggagaaggaagtgcgtccgaagcacgtgaaggctttactgcagatggtgcgtgacgagagccaccagatcctggcgctgtcagaaggccttgcacccccaagcggcgagccacacccaccccggaaggaagacgagatacaggacatctcgctccatgggggaaagacgcaggaagtgcccaccgcgtgccccgattggagaggggaccttctgcaggttgtgcaagaggcctttgaaaaagagcaggagatgcagggggttgagctgcagccccgactcagtggctcagatctggggggtcacagctccctgctcgaaaggctggagaagatcatccgtgagcagggagacctgcaggaaaagtccctggagcatcttcgcttgccggaccggagcagcctgctgtccgagatccaggcgctgcgtgcccagctgcgcatgacgcacctgcagaaccaggagaagctgcagcacttgcgcacggcgctgacaagcgcagaggcgcgcgggagccagcaggagcaccagctgcgcaggcaggttgaactgctggcttataaagtagagcaggagaagtgcattgctggtgacttgcagaagacgctgagtgaagagcaagagaaggcaaacagcgtgcagaagctcctggcggcggagcagactgtagtgcgagatttgaagtccgacctctgtgagagcaggcagaagagcgaacagctgtcccggtccctctgcgaggtgcagcaggaggtcctccagctgagatccatgctgagcagtaaggagaacgagctgaaggccgcgcttcaggagctggagagtgagcaggggaaggggcgtgccctgcagagccagctggaggaggagcagctgcggcacctgcagagggagagccagagtgccaaggccctggaggagctgcgggcgtctttggagacacagcgtgctcagagcagtcgactctgcgtggcactgaaacacgagcagacggccaaggacaacctgcaaaaggagctgcgtatcgagcactcacgctgcgaggccttgctggctcagagcggagccagctctctgagctccagaaggaccttgcggctgagaagagccgcaccctggagctgtc

SEQ ID NO: 185847 - DNA, 2157 bp, Homo Sapiens
  misc_feature (1773)..(1797): n is a, c, g, or t
gctctgcaaaaaccatccagtcccttaagcatgagctatgttgcagcctcttccagaacagtttccactgcagtgatctttcagttctgcccacattaggttagcaggctgtggagagaagtgcctgtgtctacccttttcccaagacagtcctcatttccaaattctagttttgtcacaaaggctcatgctgttccgtgtcctcttcaaatctggaccgacagcaaagtcctctgactagagccatcgtgcttctcagctccgcttgtgtgtgccgtgtggactccgagtggcgtcgcgcggagggcgagtgggcaggagggctcaggccaactctaaggcacttttctctacatccaatggcaggttgtccccccggcacgctccacagctggtgacccgacagttcctggctccttgttcagacagcttgtcagtgaagaagacaacacgtctgcaccttcattattcaaacttggctggctctctagtatgactaagtaacatggcaacacatctgtctctccctaaataaatactaccacattatttcttctaaaggtgcctctgctcatctgattctcagccacaccaatctttccagtttcactgatggaatgtggccccctagttactgttgggggttactttaagcatcaagttaatccttgtcccaaaatttcacaatacttgttgctttagacatcagttcaggtagcttacattttatcagcgttcaacaacaccttaattgttgacactacaaggtggaattgtcaatgagatcatgtaagctgctgactgaccaagtttgtaggacaaaaagtcattacatattactttacttgcagaactgtgccatgtttcctactaaagtctgaggtgcagactctggtggaatagtgacacagaagttatctgggtatacaagaatctaaaagacattccccctggaaatacaaatatataacaaagagtagagactattattagggagtgtgcttcactgacagtctgaattggatctgattgttctcctgttacacaggagagagtactttcaatagaacatctacatactgagaggtagtatggcagttaatttcagtgcaagactgaatcaagcttcctatattttggaaaaaaacttatgttttttcatggaaactagatactctttactagtttattgaataaaaaaaattgaagatcccgcatttttaaaaggccctttacataaagtagagtttctagttgacagatttggaaatcagtctgaatgggacatactatggattcaacacacagaatgagttttcctcaaaccactaccttgacatagatttgataccctccctcaaaagaatcctataaaaaattgcttcaaagcccctttgaaattgcaatagtgcagcaaaaccacaagtaaacaactgcctgttaacctgttatttcaaatatagactgaaaagccaacaggcatttttcgtgtgcaatttttcttttaaaacaagttgtaagttgaaatatcaaatctgcacagcgctgtcccttcacagaaggcaagaaactgccggcacatcatgtcagaggccgccctcggtgctgtaggctgtggaagtgggcctccctcagggtctggttgatgtggaagtagaggccttggcacagcgcggactgctcgggcacgggctgaggcgtgttagggctggatccggccatggtctggctcaagctgccttccggcccgctggccctgtccgggctgttgannnnnnnnnnnnnnnnnnnnnnnnncccaccactgtcactgcctgaagactggaaggaagaagaaagaaacagggtcacaataaggctgttttgtttaagagctttactgtggtttcatgtacagcgctctattaagagtacctttccagttcagcttgaggatgaagacatatactgggctttggaattgataaagtacgctctcctaaaacgtttcatcctctcctcacagccaccctgtcaggctgagcagggtttattgtccttaatacacagctctaggaggatgggtccagtccaggttcaagcacgggctgcctaactccaaatcctttcaactatatcctaattcttttgcacatattctatacctgcttttcccaa

SEQ ID NO: 185848 - DNA, 2765 bp, Homo Sapiens
  misc_feature (2223)..(2272): n is a, c, g, or t
  misc_feature (2659)..(2668): n is a, c, g, or t
ttggggaagacattggtaaaagaggaaataataggaatgggcagttattggaaaatcctcgctttgggaaaatgccattggaattggtccggaagccaatttctcagagccagatcagtgagttctcttttctagggtccaactgggacagcttccaagggatggtgacttcattcccaagtggggaggccacccctcggcggctgctttcctatggctgttgtagcaagaggccaaacagtaagcagatgcgggccacagggccctgctttgggggccagtgggctcagagagaaggtgtgaagtcacctgtctgttctagtcattccaatggacattgtactggcccaggaggaaagaaccagatgtggttgtccagtcatccaaagcaagtctctagcacaaagcccgttccactgaactgcccttctccagtgcctcctctgtatttggatgatgatggactcccctttcccacggatgtgatccagcataggttacggcaaatcgaagcagggtacaaacaagaggtggagcagctacgtcgacaggtgcgtggcttcagatgaggctggacatccgtcactgctgtgcccctccagcagagccccccatggactatgaggatgattttacatgtttgaaggagtcagatggcagtgatactgaggattttggctctgatcacagtgaagactgcctttcagaagcaagctgggaacctgttgataagaaagagactgaggtgactcgctgggttccagaccatatggcatcacactgctataactgtgactgtgaattctggttggccaaacgaagacaccattgcagaaattgtgggaatgtattttgtgctggatgctgccacctgaagctgcccattcctgatcagcaactctatgacccagttctcgtctgtaactcatgttacgaacacattcaagtctctcgtgccagggaactcatgagccaacagctgaagaaacccattgctacagcttccagttgaatgccggggagaaacctgtccaattttagcaggtttgaagggaggatcttcttcagttgtagtttggaaggttccttggtgtggctcatgaaatcacagagctcagagataccatcttgagaaatcctccttggtatcatgaaactggagcagaggaattgcaatttagcaggaggtcctctactggtgataccctcaccttggggtaatggtcctaacccagacccagggtctggaagcttaatgttgagttggtgactccagcctctttctcctggaggtcacaagatgatgattgcgtagatgttgcctggtgcaaagtgccccaaacagcaatagaaaggcatatgtataaccaaactccaagtgataaccagacccatctctcctccaccttgacaaaagcagattatagtatacaaggtaggaattcctgtcctatttgagatgaactatatcctgtacctctgtgctctgtgtctgcatgaaggctcagcctttagaggcactccttctagttgcattagtactgtctttctgtggagtttggtttgaagactggctcagcaagtggaggtttcaatgtatttttcagttggctcatcagccagcattggtgaatattcagtttaggggaacagttctagggagtgagacatttttgggagcagaggaaaactctgctgatgttcggtcctggcaaacattgagttattttgagctgtgaaggcagtcgtctctgttacacagtggcagctcttgagttatgcactgtgaagaatgagaagggaaaagcaaaaattatccttgtgaaatatctgctgattgtgccctactctttgcacctgacttttcctagttgtcctggtgctaacacaggagctacaccttgatcctctcctggcatgaaaataaaacaaaggttttcgttgttgttgttccattgcccatttcccccatgttgtctttcccttggctgatgcctcctctgggtcacattgcttcttatcctgaacacttgacaccttgagggtagaatttagcgtttggtttttacctcctagcatatgctgtttggtatgtgagggtttcagtacaaatgctgctgtctatttctgtgcacttaacaatggaacccaaacagaagagaataaagccttgataccaaaattgggaaagaacatgtgtccatttggaccaaacgttgttgnnnnnnnnnnnnnnnnnnnnnnnnnnnnnnnnnnnnnnnnnnnnnnnnnncatcttaatatgtaccagtggcacttaaccaaaagatacagtgatatagccatgtactgtgggtgggacagatacagtctccttggcctataatgaaaccactaggactttatacagttttccttaatttgttgacatataaatggtaaattatatttaggcttatcctgttttgaaatgatggtagtcatctttcttactgctactttcatgttgctttctagaaaacagcatttcattccaaaataactaggatctgcatttagaacaagaatcattatttgtcctgaccttttcagtcctacagagacgcatctgtggttcttttgtacttgccatagatgtaacctaaaaagttttggcatatttaatcagcctagcggaacnnnnnnnnnncatttaaatggagctgaataatggagattttgtgtctgcaaattcctgagatcatttgaaaaagtaacaagctgttcttggttctgataataaaatt

SEQ ID NO: 185849 - DNA, 861 bp, Homo Sapiens
ttggcacctctttctgctcctcctccttgaaaagagccagaactgggaactacacccgctcatcgacggagctcggagcaaacccacctccacccccaccatacccagcccatacatgagcccctgggctgagctgcgcggccccggccaggcagacaggccagggcactgctgtgcacaatgcagcggtttagctgaatgtgattgctcaggcagctagccagtcaggccccactgcggagtcccgcgtgggcatctcggccgggcgcccagccaggagccagccggtggcccaccagccagcatgggccctgggcgccgctagttaaatcttgagctctgtttgaccaagcggccaaggtttcggtctaagtaccacccagatgaggtggggaagcgtcggcaggaggcccggggggccctgcaaaaccgactgagggtcttcctgtccctcatggagactggctggtttgataaccttctcctggacatagacaaagctgatgccattgtcaagatgctggatgcagccgtgattaagatggaaggaggcacggagaatgatctccgcatcctggagcaggaggaggaggaggagcaggcaggaaagcctggggagcccagcaagaaagaagaaggacgggctggagcaggcctaggggacggggagcgcaaaaccaacgacaaggatgagaagaaggaagacggcaagcaggctgagaatgacagttctaatgatgacaaaacaaagaagtcggagggtgatggggacaaggaagagaagaaagaagactccgagaaggagcccaaaagagtagcaagaagcggaaccgggaagcacagtggtgacaacagctttga

SEQ ID NO: 185850 - DNA, 1279 bp, Homo Sapiens
ttggaacagatgcaggatttcttcctggcgcacaaagatgaggagtggtttcggtctaagtaccacccagatgaggtggggaagcgtcggcaggaggcccggggggccctgcaaaaccgactgagggtcttcctgtccctcatggagactggctggtttgataaccttctcctggacatagacaaagctgatgccattgtcaagatgctggatgcagccgtgattaagatggaaggaggcacggagaatgatctccgcatcctggagcaggaggaggaggaggagcaggcaggaaagcctggggagcccagcaagaaagaagaaggacgggctggagcaggcctaggggacggggagcgcaaaaccaacgacaaggatgagaagaaggaagacggcaagcaggctgagaatgacagttctaatgatgacaaaacaaagaagtcggagggtgatggggacaaggaagagaagaaagaagactccgagaaggaagccaaaaagagtagcaagaagcggaaccggaagcacagtggtgacgacagctttgacgagggcagcgtgtcagagtctgagtcggagtcagagagcggccaggctgaggaggagaaggaggaggccgaagaagcgctcaaggagaaggagaagcccaaggaagaagaatgggagaagcccaaggacgccgcggggctggagtgcaagccgcggccgctgcataagacctgctccctcttcatgcgcaacatcgcgcccaacatctcccgggccgagatcatctccctttgtaaaaggtacccaggctttatgcgggtggcgctctcagagccccagccagagaggaggtttttccgtcgtggctgggtgaccttcgaccgcagtgttaacattaaagagatctgttggaacctgcagaacatccgtctccgggagtgtgagctgagccctggtgtgaacagggacctgacccggcgcgttcgcaacatcaacggcatcacccagcacaagcagattgtgcgcaacgacatcaagctggcggccaagctgatccacacgctggatgacaggacacagctttgggcctcagaaccagggacgcctcccctgcccacgagcctgccctcgcaaaacccgatcttgaagaatatcaccgactacctgatcgaggaagtaagcgccgaggaggaggagctgctggggagcagcgggggcgctcctcctgaggagcctcctaaggaaggggaccccgcagagatctacgtggagctggatgagaagttgatta

SEQ ID NO: 185851 - DNA, 2042 bp, Homo Sapiens
  misc_feature (695)..(704): n is a, c, g, or t
  misc_feature (867)..(877): n is a, c, g, or t
  misc_feature (1487)..(1497): n is a, c, g, or t
ttggaaataaataaaatgttctcttttgttcctgttcttgtgcggtagtgtggtatagagttttatggtaattactgtgaattagtgattctgagggacatatcagaactctgaggtttgtttccttctcatcttgagggaaacagcaaatgtatgttaaaatgcttttccaagggaacaacacatccttacattatttaaaccaatctgcttcattttcagagctggttgatcagagtgagtcagaaggccccgtgatacaagaatcagctgaaccaagccagttggaagttccagccacagaagaaataaaagagactgatggaagctctcagatcaagcaagaaccagaccccacgtggtagacctcttccctcctagggtaaatcagcttctgtgtcagggatgctgtgtggcgtccatctgaaccccctgcatacgcgtagctaatgtgatctccccactttcacataagatggtggccctgccttcagggaatgtgggagccaggtgggagccttcccggatatttaagctagaagattctacagggagattctccttggatcaatatatgtctctcagtcaaagatgtaaaagcacttttgccttaaaaagaatgttctgtttctaaatagagtcaacgttgtcctcctcattggaattcactatgagtcagaatcattagactgacnnnnnnnnnnccatagtaatagtattttgcagagtctcacagagctgcagatcttttgttcatcttgcagagttaacaagtctgatcctgttagtccagatttcttaaatttggccaagttataataggagcagtagcttgagacccgaagtcaggaaactttgacaatggannnnnnnnnnnaatccagagacttgtactggaatttgccttaccctgtcagctcatggacttaaggtttcatcccgctttatgagtgcttctgaatccaagtcattgttacctgaatttgcaaattaagttgtgatattcgtgactgttaaattcctgtaattagattaacctctttgcttgcttgtttgttttctctcctattttagcttaaagtatcagtggttgagaagagcttttcggacctgttactaccccaagctgtgtaatatacttgtataacagaaataccttctatacaaacctttttttctacttttagatagaaatgtctactttttcagcagttctgtgaattaaagagcagagtgactgtgggtctggaatggctggtgtacttgggaatgtactatcaggattttacagcaatgctgggaaatgacagggaaaatgacaggaatgaatctcaccagattttttatgtacgcagcagagccttgagttacggtgtttattttccaatcaagtgaagatatctcctacttctcctactggaacatctcagcttctgcagtgaagaaaaattcctgtgatagttcagttctttagtttttctatttgnnnnnnnnnnntcatttaaatgatcctttgttcacggctctccttaatgactgagtgaacagttcctatctgtatatttgactaaaccttttcctaagctatctctcatggttcctatgtttttttatcataattaaaagcaaaaccatctggatcacctaacagtcagaggtcagtatctcagcgtgtgaattatagaggaaatacagagagaacctcttccacttttacttttcgtccaaataaaatgcatggtgtaccagaagttgaagatcgggttgaggattggggctagctcgatgacactaaggccccaacatcgcgggacctgctgtggcgcggattcttaggaacgctgttctagccggccccctctccaggggtcgccgtggccggcattatttcctagttcttcttgtaaccctgacgtgccagcgcggggagtgaggagggtcatggggctaaagatgcaacctctgacgttctgcgccttcctaggagagtcttacatgtgttgagatttcacacgcaatgcgagttgtaaaatacccagctc

SEQ ID NO: 185852 - DNA, 2398 bp, Homo Sapiens
  misc_feature (2135)..(2145): n is a, c, g, or t
ctttgtacaaaaaagttggcttctgaattccacacgtgaagatttacagcttgataagccagcttcaggagtaaaggaagaatggtatgccagaatcactaaattaagaaagatggtggatcagcttttctgcaaaaaatttgcggaagccttggggagcactgaagccaaggctgtaccgtaccaaaaatttgaggcacacccgaatgatctgtacgtggaaggactgccagaaaacattcctttccgaagtccctcatggtatggaatcccaaggctggaaaaaatcattcaagtgggcaatcgaattaaatttgttattaaaagaccagaacttctgactcacagtaccactgaagttactcagccaagaacgaatacaccagtcaaagaagattggaatgtcagaattaccaagctacggaagcaagtggaagagatttttaatttgaaatttgctcaagctcttggactcaccgaggcagtaaaagtaccatatcctgtgtttgaatcaaacccggagttcttgtatgtggaaggcttgccagaggggattcccttccgaagccctacctggtttggaattccacgacttgaaaggatcgtccgcgggagtaataaaatcaagttcgttgttaaaaaacctgaactagttatttcctacttgcctcctgggatggctagtaaaataaacactaaagctttgcagtcccccaaaagaccacgaagtcctgggagtaattcaaaggttcctgaaattgaggtcaccgtggaaggccctaataacaacaatcctcaaacctcagctgttcgaaccccgacccagactaacggttctaacgttcccttcaagccacgagggagagagttttcctttgaggcctggaatgccaaaatcacggacctaaaacagaaagttgaaaatctcttcaatgagaaatgtggggaagctcttggccttaaacaagctgtgaaggtgccgttcgcgttatttgagtctttcccggaagacttttatgtggaaggcttacctgagggtgtgccattccgaagaccatcgacttttggcattccgaggctggagaagatactcagaaacaaagccaaaattaagttcatcattaaaaagcccgaaatgtttgagacggcgattaaggagagcacctcctctaagagccctcccagaaaaataaattcatcacccaatgttaatactactgcatcaggtgttgaagaccttaacatcattcaggtgacaattccagatgatgataatgaaagactctcgaaagttgaaaaagctagacagctaagagaacaagtgaatgacctctttagtcggaaatttggtgaagctattggtatgggttttcctgtgaaagttccctacaggaaaatcacaattaaccctggctgtgtggtggttgatggcatgcccccgggggtgtccttcaaagcccccagctacctggaaatcagctccatgagaaggatcttagactctgccgagtttatcaaattcacggtcattagaccatttccaggacttgtgattaataaccagctggttgatcagagtgagtcagaaggccccgtgatacaagaatcagctgaaccaagccagttggaagttccagccacagaagaaataaaagagactgatggaagctctcagatcaagcaagaaccagaccccacgtggtagacctcttccctcctaggcttaaagtatcagtggttgagaagagcttttcggacctgttactaccccaagctgtgtaatatacttgtataacagaaataccttctatacaaacctttttttctacttttagatagaaatgtctactttttcagcagttctgtgaattaaagagcagagtgactgtgggtctggaatggctggtgtacttgggaatgtactatcaggattttacagcaatgctgggaaatgacagggaaaatgacaggaatgaatctcaccagattttttatgtacgcagcagagccttgagttacggtgtttattttccaatcaagtgaagatatctcctacttctcctactggaacatctcagcttctgcagtgaagaaaaattcctgtgatagttcagttctttagtttttctatttgnnnnnnnnnnntcatttaaatgatcctttgttcacggctctccttaatgactgagtgaacagttcctatctgtatatttgactaaaccttttcctaagctatctctcatggttcctatgtttttttatcataattaaaagcaaaaccatctggatcacctaacagtcagaggtcagtatctcagcgtgtgaattatagaggaatacagagagaacctcttccacttttacttttcgtccaaataaaatgcatggtgtaccagaa

SEQ ID NO: 185853 - DNA, 1883 bp, Homo Sapiens
  misc_feature (719)..(728): n is a, c, g, or t
  misc_feature (891)..(901): n is a, c, g, or t
  misc_feature (1511)..(1521): n is a, c, g, or t
ttggagtgaatgacctctttagtcggaaatttggtgaagctattggtatgggttttcctgtgaaagttccctacaggaaaatcacaattaaccctggctgtgtggtagttgatggcatgcccccgggggtgtccttcaaagcccccagctacctggaaatcagctccatgagaaggatcttagactctgccgagtttatcaaattcacggtcattagaccatttccaggacttgtgattaataaccagctggttgatcagagtgagtcagaaggccccgtgatacaagaatcagctgaaccaagccagttggaagttccagccacagaagaaataaaagagactgatggaagctctcagatcaagcaagaaccagaccccacgtggtagacctcttccctcctagggtaaatcagcttctgtgtcagggatgctgtgtggtgtccatctgaaccccctgcatacgcgtagctaatgtgatctccccactttcacataagatggtggccctaccttcagggaatgtgggagccaggtgggagccttcccggatatttaagctagaagattctacagggagattctccttggatcaatatatgtctctcagtcaaagatgtaaaagcacttttgccttaaaaagaatgttctgtttctaaatagagtcaacgttgtcctcctcattggaattcactatgagtcagaatcattagactgacnnnnnnnnnnccatagtaatagtattttgcagagtctcacagagctgcagatcttttgttcatcttgcagagttaacaagtctgatcctgttagtccagatttcttaaatttggccaagttataataggagcagtagcttgagacccgaagtcaggaaactttgacaatggannnnnnnnnnnaatccagagacttgtactggaatttgccttaccctgtcagctcatggacttaaggtttcatcccgctttatgagtgcttctgaatccaagtcattgttacctgaatttgcaaattaagttgtgatattcgtgactgttaaattcctgtaattagattaacctctttgcttgcttgtttgttttctctcctattttagcttaaagtatcagtggttgagaagagcttttcggacctgttactaccccaagctgtgtaatatacttgtataacagaaataccttctatacaaacctttttttctacttttagatagaaatgtctactttttcagcagttctgtgaattaaagagcagagtgactgtgggtctggaatggctggtgtacttgggaatgtactatcaggattttacagcaatgctgggaaatgacagggaaaatgacaggaatgaatctcaccagattttttatgtactcagcagagccttgagttacggtgtttattttccaatcaagtgaagatatctcctacttctcctactggaacatctcagcttctgcagtgaagaaaaattcctgtgatagttcagttctttagtttttctatttgnnnnnnnnnnntcatttaaatgatcctttgttcacggctctccttaatgactgagtgaacagttcctatctgtatatttgactaaaccttttcctaagctatctctcatggttcctatgtttttttatcataattaaaagcaaaaccatctggatcacctaacagtcagaggtcagtatctcagcgtgtgaattatagaggaaatacagagagaacctcttccacttttacttttcgtccaaataaaatgcatggtgtaccagaagttgaagatcgggttgaggattggggctagctcgatgacactaaagccccaacatcgcggggacctgctgtggcgcggattcttaggaacgctgttctagccggcccc

SEQ ID NO: 185854 - DNA, 1336 bp, Homo Sapiens
  misc_feature (58)..(67): n is a, c, g, or t
  misc_feature (230)..(240): n is a, c, g, or t
  misc_feature (850)..(860): n is a, c, g, or t
ttggcaacgttgtcctcctcattggaattcactatgagtcagaatcattagactgacnnnnnnnnnnccatagtaatagtattttgcagagtctcacagagctgcagatcttttgttcatcttgcagagttaacaagtctgatcctgttagtccagatttcttaaatttggccaagttataataggagcagtagcttgagacccgaagtcaggaaactttgacaatggannnnnnnnnnnaatccagagacttgtactggaatttgccttaccctgtcagctcatggacttaaggtttcatcccgctttatgagtgcttctgaatccaagtcattgttacctgaatttgcaaattaagttgtgatattcgtgactgttaaattcctgtaattagattaacctctttgcttgcttgtttgttttctctcctattttagcttaaagtatcagtggttgagaagagcttttcggacctgttactaccccaagctgtgtaatatacttgtataacagaaataccttctatacaaacctttttttctacttttagatagaaatgtctactttttcagcagttctgtgaattaaagagcagagtgactgtgggtctggaatggctggtgtacttgggaatgtactatcaggattttacagcaatgctgggaaatgacagggaaaatgacaggaatgaatctcaccagattttttatgtacgcagcagagccttgagttacggtgtttattttccaatcaagtgaagatatctcctacttctcctactggaacatctcagcttctgcagtgaagaaaaattcctgtgatagttcagttctttagtttttctatttgnnnnnnnnnnntcatttaaatgatcctttgttcacggctctccttaatgactgagtgaacagttcctatctgtatatttgactaaaccttttcctaagctatctctcatggttcctatgtttttttatcataattaaaagcaaaaccatctggatcacctaacagtcagaggtcagtatctcagcgtgtgaattatagaggaaatacagagagaacctcttccacttttacttttcgtccaaataaaatgcatggtgtaccagaagttgaagatcgggttgaggattggggctagctcgatgacactaaggcccccaacatcgcgggacctgctgtggcgcggattcttaggaacgctgttctagccggcctcctctccagggggtcgccgtggccgggcattattttcctagttcttcttgtaaccctgaggtgccagcgccggggagtgaggaggggtcagggggctaaggatgcaacctctgac

SEQ ID NO: 185855 - DNA, 1334 bp, Homo Sapiens
tttgcatgcatcaggtattcgagatcttctgtagaagctgcatcaatcattactctttgcatgagtactggttccaatccaaagtcgaaaactatggtttggcgaaaagttccaaatatttctgtgttaaatgctatcccgactttatacacgtaatgatctaatccattttgggccatctttcctcctatccattcttgacagttttctgggacttcttgtgatacctgggtagtactatctccggcagatattgcaatgatactaaaatgaggacgatgagcatcataaagcaatgctacacgatacagcattcttgcaggcttacaagtgagagcaaaggtccatgtctggtgggattttttggtgctgacagtaactgacaggtcaggattgtgctctacctttactccttctatacattcactaagcactttctcaggagacaatgaattcatccacttttctatcaaggtttccatgtaactgcctgagagctgtttattctcattttgctgtttcaattttatcagccgtgaagcatatcttttctgccattctgctagttcttcctgggaatgtgctgaagtacactgggcaccatacctacagattccttgttctaaaaatcttttacacaaagtattcctcgctgcttgtgattcccctaggtggtgggcggaaatgccaaccattacaagacccctcatctaagtcttccacgtgatatccagagagggcgttactagttgctgtctctgtttctgagagaagtgtttttagtcttgtcaaatcctttgttaccatcccattcagggactctcctgtgagtgacttggcaagaatggtggatacaggttggagcttccctttcagctgcatgcagcaaagcactgcccgaaaggcatcttctcccttggccagtccttctcccagcacatgtctacaatcttcatcagcttgcacataatttttcagttgcaaaaatgaggcaattctgtagagaagactctcgattttgatgcgttctatttccaatggacaaggccctgtgaagtctgccatggagtactggccaagagaaagaagggcctctgtgcagtgcttgagggccatttcatagtcctgcctcttaagtgattcacatgcttgttcacatgacttttcagctcttctgtcttccatgactcagggacaaaaatcctgcagttcactgcactgggtatcacccaaatagcccatcagagctctttataatttcttacacatctcaccagcactgtagttcattagtgatccattacttcatccaaatcctgtcattactttcccaa

SEQ ID NO: 185856 - DNA, 1315 bp, Homo Sapiens
tcccaggcgaagtcccactcctcctccccgccctgggcgatagcgttgcagtagacggtggaccgcaggttggggtggatcgggtttattattggggttctccatccactgcttgaaaaggccagagaccatctcgctcacactctggaactccgttggagcaggcggtgctgatggcattaacctcgctgtactggtccatcaggttttctgggatctccctccagttgttggtattatttctgaagtgaatgaagaggggtgtgacctgcttcttcaggtagttcttcatggggccatagacctcggagcggtcaaacatgagcttgaagtagctcaggctgctcagggcggcctcccagggcatgtactgtctctcttcaatcaggaagagggtgttgttcagcgccagagtgacagggaccttatgggcactggccaggttgaaggcgtcattaatgatctgtgcccgattgatgacagggatggccgagtggtctctctgcagctgagtctgaatcttcctccagttctcttcgtcgtagttcacccggtaatagcccgtcacattgaggttcagcaggacccactcattgcctgatgtgctgaagagatcgttctgggctcttacatccatcagccagtagtcctgctgctgtctgccatctctgatggatgtgatgggcacaatccacacgtagttgaattctgaggggcgggtaacattggaatcggggtcaaggaggaagtgctcctgggaaagggtccccgtgctggtatccaccgtgatgaccgggaagcccatctgcagggtccagcggttcatgatgtcccgcacggtggtggggagttggatggaccggttgttcacagcctcctgcaggtggtcccacaggttcaggtagatggtgttctggtaggcaaaggtgtggaggtaggacgccaggccctgcttgaatacgtcctcggacaggaagctggagagcatcctgaggactgaggcgcccttgctgtaggagatggcgtcaaacagctcactgatctgggccggcgtgttgatctccgaggcgggtgtggacagcgggtgggaggaggccagtgcatccactgccatcacgcggtacacatcattcagcaccatgaggtctttcaagttccaggtgggctccgcatagtcagcacccaggtactccacgtaggaggcgaagccctcgttcagccacaggtcattccaccactctatggtcaccaggttcccgaaccactggtgggccagctcaagagcaatcacagccaacttttttgtacaaagttg

SEQ ID NO: 185857 - DNA, 1556 bp, Homo Sapiens
ttggatcgttaccgcctccccaacacgctgaaacccgattcctaccaggtgacgctgagaccgtacctcacccccaatgacaggggcctgtacgtttttaagggctccagcaccgtccgtttcacctgcaaggaggccactgacgtcatcatcatccacagcaagaagctcaactacaccctcagccaggggcacagggtggtcctgcgtggtgtgggaggctcccagccccccgacattgacaagactgagctggtggagcccaccgagtacctggtggtgcacctcaagggctccctggtgaaggacagccagtatgagatggacagcgagttcgagggggagttggcagatgacctggcgggcttctaccgcagcgagtacatggagggcaatgtcagaaaggtggtggccactacacagatgcaggctgcagatgcccggaagtccttcccatgcttcgatgagccggccatgaaggccgagttcaacatcacgcttatccaccccaaggacctgacagccctgtccaacatgcttcccaaaggtcccagcaccccacttccagaagaccccaactggaatgtcactgagttccacaccacgcccaagatgtccacgtacttgctggccttcattgtcagtgagttcgactacgtggagaagcaggcatccaatggtgtcttgatccggatctgggcccggcccagtgccattgcggcgggccacggcgattatgccctgaacgtgacgggccccatccttaacttctttgctggtcattatgacacaccctacccactcccaaaatcagaccagattggcctgccagacttcaacgccggcgccatggagaactggggactggtgacctaccgggagaactccctgctgttcgaccccctgtcctcctccagcagcaacaaggagcgggtggtcactgtgattgctcatgagctggcccaccagtggttcgggaacctggtgaccatagagtggtggaatgacctgtggctgaacgagggcttcgcctcctacgtggagtacctgggtgctgactatgcggagcccacctggaacttgaaagacctcatggtgctgaatgatgtgtaccgcgtgatggcagtggatgcactggcctcctcccacccgctgtccacacccgcctcggagatcaatacgccggcccagatcagtgagctgtttgacgccatctcctacagcaagggcgcctcagtcctcaggatgctctccagcttcctgtccgaggacgtattcaagcagggcctggcgtcctacctccacacctttgcctaccagaacaccatctacctgaacctgtgggaccacctgcaggaggtcagtagcagccagcccctccacagccatcctgttggggtcttgagatgctgaaggtacctgggggcagcacatgcgtaagagaatgggtccagctccgcggctgaccagccctgcagggtggatggagcctctgttgctcctccctatagtggaagccaggatggctccttgcaagaggtgtctgattgaggctg

SEQ ID NO: 185858 - DNA, 1278 bp, Homo Sapiens
ttgtacaaaaaagttggcgacgaagagacctggaaagaagattcagactcagctgcagagagaccactcggccatccctgtcatcaatcgggcacagatcattaatgacgccttcaacctggccagtgcccataaggtccctgtcactctggcgctgaacaacaccctcttcctgattgaagagagacagtacatgccctgggaggccgccctgagcagcctgagctacttcaagctcatgtttgaccgctccgaggtctatggccccatgaagaactacctgaagaagcaggtcacacccctcttcattcacttcagaaataataccttttatctggagggagatcccagaaaacctgatggaccagtacagcgaggttaatgccatcagcaccgcctgctccaacggagttccagagtgtgaggggatggtctctggccttttcaagcagtggatggagaaccccaataataacccgatccaccccaacctgcggtccaccgtctactgcaacgctatcgcccagggcggggaggaggagtgggacttcgcctgggagcagttccgaaatgccacactggtcaatgaggctgacaagctccgggcagccctggcctgcagcaaagagttgtggatcctgaacaggtacctgagctacaccctgaacccggacttaatccggaagcaggacgccacctctaccatcatcagcattaccaacaacgtcattgggcaaggtctggtctgggactttgtccagagcaactggaagaagctttttaacgattatggtggtggctcgttctccttctccaacctcatccaggcagtgacacgacgattctccaccgagtatgagctgcagcagctggagcagttcaagaaggacaacgaggaaacaggcttcggctcaggcacccgggccctggagcaagccctggagaagacgaaagccaacatcaagtgggtgaaggagaacaaggaggtggtgctccagtggttcacagaaaacagcaaatagtccccagcccttgaagtcacccggcccccatgcaaggtgcccacatgtgtccatcccagcggctggtgcagggcctccattcctggagcccgaggcaccagtgtcctcccctcaaggacaaagtctccagcccacgttctctctgcctgtgagccagtctagtttcctgatgacccaggctgcctgagcacctcccagcccctgcccctcatgcccaaccccgccctaacctggcatgggcacctgtcgcccagtg

SEQ ID NO: 185859 - DNA, 2201 bp, Homo Sapiens
  misc_feature (248)..(265): n is a, c, g, or t
  misc_feature (727)..(815): n is a, c, g, or t
ttggcgataaattatttgggatggggctggggaggtcaggtatattgaggtgtaagttacatatggtaaaagtcacccttttaaagtgaacaatttgatgaattttgaacaacttcagttatgcaaccaccacaacatgatggattgttttagtaaatgttcttcttaccaggagttcatccttgtttaagtctggagtttgccgtgttaaggttgcaggtgcttgaaagtgtaataaaattgtaggnnnnnnnnnnnnnnnnnnaatctcttactggaaggatgaattatagtttaaatagtaataatgcattgtcgttgttacacttactctttaagtaagttaggtcattattttccgaaatgaatgtagtagaatttcagaatggcttctggaacatgtttcctgttaaaaggcctagaatatcctgcagtggtagagtttgctccattccagaagatagccaaaaagaagctgagaaaaaaagatgccaagactggaagcatcgaagatgatccagaatataagaagtttttagaaacctactgtgtggaggaagagaagaccagtgccaaccctgagactctgctgggggagatggaggcgaagacaagagagctcattgctagaagaaccacacctcttttggaatatattaaaaatagaaaattagaaaagcagagaattcgagaagagaagcgagaagaacggaggaggagagagttnnnnnnnnnnnnnnnnnnnnnnnnnnnnnnnnnnnnnnnnnnnnnnnnnnnnnnnnnnnnnnnnnnnnnnnnnnnnnnnnnnnnnnnnnttgcagagaaagaagtaaggattaagcttcttaagaaaccagaaaagggagaggaaccaaccacagagaaaccaaaagaaagaggagaggagattgatactggaggtggcaagcaggaatcctgtgcccccggtgcagtcgtaaaagccaggcccatggaaggctcgctggaggagccccaggagacgtcacacagcggcagtgataaagagcacagggatgtggagagatctcaagaacaagaatctgaagcacaaagataccatgtggatgacggcaggaggcacagagctcaccacgagcctgaacggctttccagaaggagtgaggatgagcagagatgggggaaaggacctggccaagacagagggaagaaggggagccaggacagcggggctccgggggaggccatggagagactgggaagagcgcagaggtgtgacgacagtccagcacccagaaaagagcgactggcaaacaaggaccggccagccttgcagctgtatgatccaggagctcgcttccgagcgcgagagtgtggcggaaacgggaggaactgcaaggcaaaaggttcggggactggtcctgagaacagggaagaggcagaatgagtcactgcgcgcaccagccctccgtggacgagcgagggtatcccagaaacgtgtaaatgaccccgagtgtgactgggaaggagaacttactccttaccaggaaactggaagctaaaaatacagagggtgacatagaaacacacagaaaccattctaagaaagtagtgatcatgtcttaaattaagcagaattctcacggattttaaccattcctgttatacactagtatttgttgtttagccaaaacagaaaatgacttccattggacagtagaaaaatgtgtgtaaaatagggaagaaagttagtattggatcagtgcaagtcctgaagcactttcagtgctgtgagaacgacacccactttgggtttcattcttttgtaagcagaggagctgtcagtcgcttgtgcttctcggtggcctctgagctgtggtgtcgagtaaagagcagttcttgtttgttacaacctttgtgagtcagccatgcctgcaaagtgtgctgtgttttagtcctggtaggaatatatatcaacagttcacactgtataaaacccaatagcttcaactattgccctttcaacagttttgccactgaccggatgaaaatggtttcacagtctttggatggatgcatttgtggtttgtaaccattacggtttaaaccatggtttaaggatttgcccaaataacagaaattttgttcgggaagggataaatttggtaaagcatatagagcctgcctttgcgttttagacactttatttgtaaataacccaa

SEQ ID NO: 185860 - DNA, 947 bp, Homo Sapiens
ctttgtacaaaaaagttggcatgaaacaaatggaagaaaggttgcagcactcggagcgggcgaggcagggggctgaggagcggagccacaagctgcagcaggagctgggcgggaggatcggcgccctgcagctgcagctctcccagctgcacgagcaatgctcaagcctggagaaagaattgaaatcagaaaaagagcaaagacaggctcttcagcgcgaattacagcacgagaaagacacttcctctctactcaggatggagctgcaacaagtggaaggactgaaaaaggagttgcgggagcttcaggacgagaaggcagagctgcagaagatctgcgaggagcaggaacaagccctccaggaaatgggcctgcacctcagccagtccaagctgaagatggaagatataaaagaagtgaaccaggcactgaagggccacgcctggctgaaagatgacgaagcgacacactgtaggcagtgtgagaaggagttctccatttcccggagaaagcaccactgccggaactgtggccacatcttctgcaacacctgctccagcaacgagctagccctgccctcctaccccaagccggtgagagtgtgcgacagctgccacaccctgctcctgcagcgctgctcctccacggcctcctgaacgtccgtcctcaggagcacagcctcacggacagtgccaaaccctgtgggtctccaggggcttgggaaatgtgttctttcccaagagaatcaaaggaaagaatcaaatttcttgcccggtcactggcactccagaagacagcgtgccggaaccggcagctctcacctttctgtgacttgttcggaataactcctctggatgggaaacttccatcttacttggttacatcacggctctggttcagatacaacttcatgattttgctactatcatttttcacttttcaaagaa

SEQ ID NO: 185861 - DNA, 1981 bp, Homo Sapiens
  misc_feature (475)..(771): n is a, c, g, or t
ttgggttatttatacccatcaacactggtaagaactgaaccacgtgaacatctccttgatcagctgaaaaggaaacagcctgagctgttaatgatgctaaactgttcagaaaacaacaaagaagagacaattccggatgtggatgtagaagaggcagttctggggcagtatactgaagaacctctaagtcaagagccatctgtagatgctggtgtggattgttcatcaattggcggggttccatttttccagcataaaaaatcacatggaaaagacaaagaaaacagaggcattaacacactggagaggtctaaagtggaagaaactacagagcacttggttacaaagagcagattacctctgcgagcccagatcaacctttaattcacttgggggttggcaattttatttttaaagaaaacttaaaaataaaacctgaaaccccagaacttgagccttgtgtatagattttaannnnnnnnnnnnnnnnnnnnnnnnnnnnnnnnnnnnnnnnnnnnnnnnnnnnnnnnnnnnnnnnnnnnnnnnnnnnnnnnnnnnnnnnnnnnnnnnnnnnnnnnnnnnnnnnnnnnnnnnnnnnnnnnnnnnnnnnnnnnnnnnnnnnnnnnnnnnnnnnnnnnnnnnnnnnnnnnnnnnnnnnnnnnnnnnnnnnnnnnnnnnnnnnnnnnnnnnnnnnnnnnnnnnnnnnnnnnnnnnnnnnnnnnnnnnnnnnnnnnnnnnnnnnnnnnnnnnnnnnnnnnnnnnnnnnnnnnnaatttaaaaaagatataaggcagtactgtaaattcagttgaattttgatatctacccatttttctgtcatccctatagttcactttgtattaaattgggtttcatttgggatttgcaatgtaaatacgtatttctagttttcatataaagtagttcttttataacaaatgaaaagtatttttcttgtatattattaagtaatgaatatataagaactgtactcttctcagcttgagcttacataggtaaatatcaccaacatctgtccttagaaaggaccatctcatgttttttttcttgctatgacttgtgtattttcttgcatcctccctagacttccctatttcgctttctcctcggctcactttctccctttttatttttcaccaaaccatttgtagagctacaaaaggtatcctttcttattttcagtagtcagaattttatctagaaatcttttaacacctttttagtggttatttctaaaatcactgtcaacaataaatctaaccctagttgtatccctcctttcagtatttttcacttgttgccccaaatgtgaaagcatttcattcctttaagaggcctaactcattcaccctgacagagttcacaaaaagcccacttaagagtatacattgctattatgggagaccacccagacatctgactaatggctctgtgcccacactccaagacctgtgccttttagagaagctcacaatgatttaaggactgtttgaaacttccaattatgtctataatttatattcttttgtttacatgatgaaactttttgttgttgcttgtttgtatataatacaatgtgtacatgtatctttttctcgattcaaatcttaacccttaggactctggtatttttgatctggcaaccatatttctggaagttgagatgtttcagcttgaagaaccaaaacagaaggaatatgtacaaagaataaattttctgctcacgatgagtttagtgtgtaaagtttagagacatctgactttgatagctaaattaaaccaaaccctattgaagaattgaatatatgctacttcagaaactaaattgatctcgtagaattatcttaataaaataatggctataatttctctgcaaaatcagatgtcagcataagcgatggataatacctaataaactgccctcagtaaatccatggttaataaatgtggtttctacatt

SEQ ID NO: 185862 - DNA, 1449 bp, Homo Sapiens
  misc_feature (1212)..(1221): n is a, c, g, or t
  misc_feature (1281)..(1305): n is a, c, g, or t
tcccaccccccatggggaggaaagacttcaagctccagccactggccccggtgggtcccaaagccccacccctcatgctctcctctggtcacctctatttacgctcacatgccccttcctgtccttcacctgcacgtcaccagcaggtcccgccaaccccaaatctatctggtgaaaacctggagaacaagagcggagtctaagagagatgtaaatgaaaacacagatcaacagacacaccagaagggaagcgttgtttccgcggggaaaggagatggaaaggggaagagaaggtgaagaattctgcgcccgaagctcgggttggtgtttgctcaactgctttactcattttaaccctttcacctatcctgggagaaacccaggcttgtcaccttttcatgttgggttgtttattggcctcttaagtgagaattgatccgtgaagggaaacagacaggaggaggtcagattgcgaatacctggggcttcctagggtccagtgcggcagttaccgcacctgccttcaccggtgaacctttagccagctgaacaaccaccaaagcgccctgcagagacaagtcatcgagccctctggcatgtccctggtagcccgggcaccagccgctgcggcttgtgaggggcaccatgctccaccccacggggaccttcacagttggaaaaaagaagaggaaaaactaattccttcggtaacagtttattttcatttttgggaaaggcaaaaccactacctggaactcggtgcctccgtggttaactttcctattttgcttgtgatttaaaggctgttctgggtcaggggggaaaaggtgtctccttcggtagggaatatataacgtggtgataacctgtcactaggcagaagcatccactctgcagggacagtggcccctcgggaaagcccgccgctcctggccaaggcctctctgcagactccacgggggctcaccctctgccgtcaggcgactctgaaattccgacatttctcccttaaagtctcaacagacacaagagaagtttccatcaagcaagcactgacatatttatattaaaaaatagtgcaaaatctcaacatttatataaataactctaaacccctgctttgtaatttttttctttacaaggtaatacacactttctgacttggcactcaaaaattgccatttttttcctcttctagttcagaaaacaacnnnnnnnnnnaataggcctcttctaatacaaaaatactcctgccctcgcacatacagtttctcttatctnnnnnnnnnnnnnnnnnnnnnnnnngcagatctttaaacaaaggttttgtgcaaatatgtctttaaagttaagtgaaattatcataaacaaaagaaaataagcattcacgcacgcagctcaactagaaacaagaaagactactgtagaaatttgggttcttttgcccaa

SEQ ID NO: 185863 - DNA, 906 bp, Homo Sapiens
ttggcctctctgcaatggtgccaccagcgtcctttttgagagcaccccagtttatcccaatgctggtcggtactgggagacagtagagaggttgaagatcaatcagttctatggcgccccaacggctgtccggctgttgctgaaatacggtgatgcctgggtgaagaagtatgatcgctcctccctgcggaccctggggtcagtgggagagcccatcaactgtgaggcctgggagtggcttcacagggtggtgggggacagcaggtgcacgctggtggacacctggtggcagacagaaacaggtggcatctgcatcgcaccacggccctcggaagaaggggcggaaatcctccctgccatggcgatgaggcccttctttggcatcgtccccgtcctcatggatgagaagggcagcgtcgtggagggcagcaacgtctccggggccctgtgcatctcccaggcctggccgggcatggccaggaccatctatggcgaccaccagcgatttgtggacgcctacttcaaggcctacccaggctattacttcactggagacggggcttaccgaactgagggcggctattaccagatcacagggcggatggatgatgtcatcaacatcagtggccaccggctggggaccgcagagattgaggacgccatcgccgaccaccctgcagtaccagaaagtgctgtcattggctacccccacgacatcaaaggagaagctgcctttgccttcattgtggtgaaagatagtgcgggtgactcagatgtggtggtgcaggagctcaagtccatggtggccaccaagatcgccaaatatgctgtgcctgatgagatcctggtggtgaaacgtcttccaaaaaccaggtctgggaaggtcatgcggcggctcctgaggaa

SEQ ID NO: 185864 - DNA, 886 bp, Homo Sapiens
tttggcgggggtcccccaattccagaagaactggaaaagcacatggggacccctcatctcccagggtggggaatgggggatctgaggcagcatcagggcagagacgaacattgatgggctggtgggcaaggctccttggcgtggagggctgagattggctccctggtggcttgggcggggctaaggcacaaggcgggctgcgctgagtaggcaggcaggcaactcatcggcctgggtgcggtgcaaggagggttccgaggcactccgctcaatcttggggagtgaccgttgcagcagctcaattgtggccaggatctgggggaagaggggccgctcctcccgctggaacttgaggcagtcagacagcaggcgccgcatggccttggggcagttgctggagattttgctgaggtccggggacagatagccacggcccaccataaagataatctggtcacggcagccaatgtggctgtaaggcagtgagccagtcataagctcgtagagcacaaccccgtaggcatagacgtctgactggaagctgtaggggttcgggtcctgcatacggatcacctcagctgccatccacagcacagatcctgagggctgctccaagggctgggccccgctccatcgagtcttcactgtggccaagccaaagtcaccgatcttcaccgtgagcccctcatgtaggaagatgttgttagacttgagatctcggtggatgatgttcttggcatggaggtagtccatgccctgggcagtctgccgggccacgtcgatgagctggaccatgtcgaagcgtgtgtcggccacatgcaggtgatggtagaggctggagccctcacaccactgtgtgatgatggcccaacttttttgtacaaag

SEQ ID NO: 185865 - DNA, 1188 bp, Homo Sapiens
  misc_feature (248)..(258): n is a, c, g, or t
  misc_feature (899)..(919): n is a, c, g, or t
ttggttttatactgtccacctatctatatattcttctactgaaatgattttgatatctttggctttccggtatctatttttgccatacattttgctgttttgcaaagtttgtataagaacacataacactactgaattataaaaattcaatcataaaagtcaaaatatattacataatatagtttaatgaatcattacatttataataacaaaggccacaatttaattaattggtaagatataatgcnnnnnnnnnnngagaaatgtttgccttatgtatattccctttatttcctttaccttttgtttttccttggacctaaacagagaaaataatgcttatgtatctgaagaaaaggtcagatctattggaaatgacagcccgatacttgagcctcctctttaaaaggtatccagccctgatattttgtgtaaataaaacgtttttaaaacctgttagttaaaacacttaggtgatgggcactgctgcttataaattcatcttttggttgaatcctcactatgctatttggtacctaaaaatattctccaaacccttggtgccagttcctctttgataaatatatagttaattcaaaataaaatccattgcaattcatttatgagttatcttacatatcacaaagaccaattagaattagtcattattcttgatgaagagtctgtttttaatcataaaaatcatgacagttactcagacccaggcatttcaacagagctaacaccaccttcagataggcacaccatgcataactcttgggaagttgagctttgctaaataaaagatatttctgctgatcaaagatgatcaagctttctgtgtattggaacagaaagtaacaaagaggaatgagccaggagaacaaactaattccttnnnnnnnnnnnnnnnnnnnnntgcaaatgtccttcaccagtaaagcaagcaaatttttaaaatctctgtttttgaaatctactcgtcaaagagttttcagaggcaatgaaaggggaacagatttttcattgtaatagtggaagttgtgtgatagttaggagatatcaacatgcatttttaatcttttccttagatgaaagagatggcttttggcagtgtgttctaaccagaaagaaaggatttgtattactctccaaatctactgtactgtcagcttcactccacctgag

SEQ ID NO: 185866 - DNA, 2255 bp, Homo Sapiens
ttggctggactggaactggaagatgagtgtgcaggctgtacggatggaaccttcagaggcactcggtatttcacctgtgccctgaagaaggcgctgtttgtgaaactgaagagctgcaggcctgactctaggtttgcatcattgcagccggtttccaatcagattgagcgctgtaactctttagcatttggaggctacttaagtgaagtagtagaagaaaatactccaccaaaaatggaaaaagaaggcttggagataatgattgggaagaagaaaggcatccagggtcattacaattcttgttacttagactcaaccttattctgcttatttgcttttagttctgttctggacactgtgttacttagacccaaagaaaagaacgatgtagaatattatagtgaaacccaagagctactgaggacagaaattgttaatcctctgagaatatatggatatgtgtgtgccacaaaaattatgaaactgaggaaaatacttgaaaaggtggaggctgcatcaggatttacctctgaagaaaaagatcctgaggaattcttgaatattctgtttcatcatattttaagggtagaacctttgctaaaaataagatcagcaggtcaaaaggtacaagattgttacttctatcaaatttttatggaaaaaattggagaaagttggcgttcccacaattcagcagttgttagaatggtcttttatcaacagtaacctgaaatttgcagaggcaccatcatgtctgattattcagatgcctcgatttggaaaagactttaaactatttaaaaaaatttttccttctctggaattaaatataacagatttacttgaagacactcccagacagtgccggatatgtggagggcttgcaatgtatgagtgtagagaatgctacgacgatccggacatctcagctggaaaaatcaagcagttttgtaaaacctgcaacactcaagtccaccttcatccgaagaggctgaatcataaatataacccagtgtcacttcccaaagacttacccgactgggactggagacacggctgcatcccttgccagaatatggagttatttgctgttctctgcatagaaacaagccactatgttgcttttgtgaagtatgggaaggacgattctgcctggctcttctttgacagcatggccgatcgggatggtggtcagaatggcttcaacattcctcaagtcaccccatgcccagaagtaggagagtacttgaagatgtctctggaagacctgcattccttggactccaggagaatccaaggctgtgcacgaagactgctttgtgatgcatatatgtgcatgtaccagagtccaacaatgagtttgtacaaataactggggtcatcgggaaaggcaaagaaactgaaggcagagtcctaacgttgcatcttattcgagctggcagttctgttcacgtccattgccggcaatggatgtctttgtggtgatgatccttcagaaaaggatgcctctgtttaaaaacaaattgcttttgtgtccctgaagtatttaataagaagcattttgcactctagaaagtatgtttgtgttggttttttaagaagtctaaatgaagttattaatacctgaagctttaagttaagtgcattgatcatatgatatttttggaagcatacaattttaattgtggaagtttaaagcctcttttagtccattgagaatgtaaataaatgtgtcttctttatggaccaaggatatgaaatcatttttcttttgtagctaacggttgccttgaggaagaaataatttggttttattaagagtctactctcaatccagttattagagatgtactgagtttgatttgttaatcctttctatatactgctgatcttgcatgtctacaatctgctcagtttttctgtgtttctgcaatagtggtcagaaaaatacttaaattcccttaatggtgttgttttctatttgttctggttttgagataaatgagtgattctgtccccaaatgtccatttttgaagtgattttcctggaggattaaggtattttagcagttgaagctcttcatttcatagtagttactgtcagctaacaggttttttaggcttttaactattaatattttatggaatgggggcaaaagtaaattgatgaaagaattggagtgatatagtcctttacaaacatacagtccataagaaaatgaatttggcatataaaattattacatttcctggga

SEQ ID NO: 185867 - DNA, 1529 bp, Homo Sapiens
ttggctgaaggtaaaattttccagatacggcagacggctttcagagtacaataaacagggaatgagaactatttacatggaagtttctttctcatgatgcggtggagaagcctcggccacttggttctgccagatgttcctggggttactgtaaatgggaaggacaggcagagctaaacaaggtttatcatttaaaagtgcctgtgtgaagtcacttttgctggaaaactgcagcttgggagctttctttgtattcacatcccactcttctgtcaagtacactttaccctgaccttatgagtggatgaagatacctcagttgtctgactttgccaattgcttaatttcagaatttaaaaaggggaaagaaaaacatcctgctaaaatatgaacatctgagtgtcttattttccaacatcgtcaatagctgtgagcgtcagcattaaatattctcccaaggagtgccatgatattgaagtcactttattaataacagctgtatctgcaaaacagtcaagagactcggacgttgaaagccagagatgacactgagcatgcttttattgcggcctaccatctttaagtgggacatattgattgatgagtgattgcctgtccatacactctctcatcatcctgttccttggattggacttcactaagcaatttatcactcaccttcagacttacatgtgggagttttcacaacagtagttttggaatcattagaacttggattgatttcatcatttaacagaaacaaacagcccaaattactttatcaccatggctttgaacgttgccccagtcagagatacaaaatggctgacattagaagtctgcagacagtttcaaagaggaacatgctcacgctctgatgaagaatgcaaatttgctcatccccccaaaagttgtcaggttgaaaatggaagagtaattgcctgctttgattccctaaagggccgttgttcgagagagaactgcaagtatcttcaccctccgacacacttaaaaactcaactagaaattaatggaaggaacaatttgattcagcaaaaaactgcagcagcaatgcttgcccagcagatgcaatttatgtttccaggaacaccacttcatccagtgcccactttccctgtaggtcccgcgatagggacaaatacggctattagctttgctccttacctagcacctgtaacccctggagttgggttggtcccaacggaaattctgcccaccacgcctgttattgttcccggaagtccaccggtcactgtcccgggctcaactgcaactcagaaacttctcaggactgacaaactggaggtatgcagggagttccagcgaggaaactgtgcccggggagagaccgactgccgctttgcacaccccgcagacagcaccatgatcgacacaagtgacaacaccgtaaccgtttgtatggattacataaaggggcgttgcatgagggagaaatgcaaatattttcaccctcctgcacacttgcaggccaaaatcaaagctgcgca

SEQ ID NO: 185868 - DNA, 2584 bp, Homo Sapiens
  misc_feature (1955)..(1997): n is a, c, g, or t
ttgggtaaaatactggttgcaaacaatcattattattaatttatggaaaaaatccaataaggtgtttagccatctcattctcatatgtaatctgtgaaataaattaatcctaacaaattttaataccttttccaaaagagtgaagcaaatttaaattatttgactcagaaaatgttcattataattcgtattaacctttaaattcaagaaattgccatttagttaaagaaaagaataggtattaataataacaccaatgcttcgtccccccttagaatagtttaactcattttaaaagctgaagccattttttttgttgttgttgcttgatagtttttcttttccttagttgagatgctaccgttttgggttacagaaatcatgctttcgctctcaataacaaattctcactcattcgacattgccgctgtttaaattaaggtgcatggcagaggcatctccttagctgtcatttttaaaaagaatgttgcaattgatgatctctgtgaacatggaaggtgtgtttgctttaagttagacatatcttatcgaattcttcatttctaggcctttccccctggtgctcttcatcctttaccaaagagacaagcacttgaaaaaagcaatggtaccagcgcggtctttaaccccagcgtcttgcactaccagcaggctctcaccagcgcacagttgcagcaacacgccgcgttcattccaacagataattctgaaataatcagcagaaacggaatgggaatgccaagaatctgcattgagaataactaaacattgttactgtacatactatcctgtttcctcctcaatagaattgccacaaactgcatgctaaataaagatgtagttcttctggacagaccacaactctaagaagctagtgctgctatctcatatatgagtattaaatatggtatgcttagtatattccaacctaagatagttaactacctgagaccagctgtgatgtttaaagacataaaggataaagtttacttttaaagggtttctaaacatagtttctgtcctaggaatattgtcttatctccataactatagctgatgcagaaagtccagccagtttactcatttcgattcagaatatttcaaatttagcaataaacaattagcattagttaaaaaagaaacatattccaagggcaggttcgattctagctctaattactgtcatgtcatttacccactggatcaaagggtatgtttcacttcttgacaatataaatgctgcagcaaagatgagaggtgaagtaaaaccgatacctgtcctgcaggtctaaaatttgaatggaaattcaagcacaagtactggggacacatcaaagtgtggtgtttggtttgcctggagatgccacgttgaatcatgtgattctagattaacattaaatagattgaaaaagaaactttgcacggtatgagcttcataccccaccaaacaaagtcttgaaggtattattttacaagtatatttttaaagttgttttataagagagactttgtagaagtgcctagattttgccagacttcatccagcttgacaagattgagaggcccatgccaacagtctaatctaagagattagtctttcaaactcaccatccagttgcctgttacagaataactcttcttaactaaaaacctagtcaaacaaggaagctgtaggtgaggagatctgtataatattctaatttaagtaagtttgagtttagtcactgcaaatttgactgtgactttaatctaaattactatgtaaacaaaaagtagatagtttcactttttaaaaaatccattactgttttgcatttcaaaagttggattaaagggttgtaactgactacagcatggaaaaaaatagttcttttaattctttcaccttaaagcatattttatgtctcaaaagtataaaaaactttaatacaagnnnnnnnnnnnnnnnnnnnnnnnnnnnnnnnnnnnnnnnnnnnggatgaaacatattttaatgttgtttacttttttaaatacttggttgatcttcaaggtaatagcgatacaattaaattttgttcagaaagtttgttttaaagtttattttaagcactatcgtaccaaatatttcatatttcacattttatatgttgcacatagcctatacagtacctacatagtttttaaattattgtttaaaaaacaaaacagctgttataaatgaatattatgtgtaattgtttcaaacatccattttctttgtgaacatattagtgattgaagtattttgacttttgagattgaatgtaaaatattttaaatttgggatcatcgcctgttctgaaaactagatgcaccaaccgtatcattatttgtttgaggaaaaaaagaaatctgcattttaattcatgttggtcaaagtcgaattactatctatttatcttatatcgtagatctgataaccctatctaaaagaaagtcacacgctaaatgtattcttacatagtgcttgtatcgttgcatttgttttaatttgtggaaaagtattgtatctaacttgtattactttgggtagtttcatctt

SEQ ID NO: 185869 - DNA, 1729 bp, Homo Sapiens
  misc_feature (189)..(231): n is a, c, g, or t
  misc_feature (897)..(921): n is a, c, g, or t
  misc_feature (993)..(1060): n is a, c, g, or t
ttggctaaattactatgtaaacaaaaagtagatagtttcactttttaaaaaatccattactgttttgcatttcaaaagttggattaaagggttgtaactgactacagcatggaaaaaaatagttcttttaattctttcaccttaaagcatattttatgtctcaaaagtataaaaaactttaatacaagnnnnnnnnnnnnnnnnnnnnnnnnnnnnnnnnnnnnnnnnnnnggatgaaacatattttaatgttgtttacttttttaaatacttggttgatcttcaaggtaatagcgatacaattaaattttgttcagaaagtttgttttaaagtttattttaagcactatcgtaccaaatatttcatatttcacattttatatgttgcacatagcctatacagtacctacatagtttttaaattattgtttaaaaaacaaaacagctgttataaatgaatattatgtgtaattgtttcaaacatccattttctttgtgaacatattagtgattgaagtattttgacttttgagattgaatgtaaaatattttaaatttgggatcatcgcctgttctgaaaactagatgcaccaaccgtatcattatttgtttgaggaaaaaaagaaatctgcattttaattcatgttggtcaaagtcgaattactatctatttatcttatatcgtagatctgataaccctatctaaaagaaagtcacacgctaaatgtattcttacatagtgcttgtatcgttgcatttgttttaatttgtggaaaagtattgtatctaacttgtattactttggtagtttcatctttatgtattattgatatttgtaattttctcaactataacaatgtagttacgctacaacttgcctaaaacattcaaacttgnnnnnnnnnnnnnnnnnnnnnnnnngttaattcatttaaactcattgaaaacatagtatacattactaaaaggtaaattatgggaatcactgaaatnnnnnnnnnnnnnnnnnnnnnnnnnnnnnnnnnnnnnnnnnnnnnnnnnnnnnnnnnnnnnnnnnnnnaaaattattagcacacaactattttcagccctttaataatggagcatcaaaaacatcacctgtaaccccaagcaaatatagaagactgtattttttactatgatatccattttccagaattgtgattacaatatgcaaagagtcataaatatgccatttacaataaggaggaggcaaggcaaatgcatagatgtacaaatatatgtacaacagattttgctttttatttatttataatgtaattttatagaataattctgggatttgagaggatctaaaactatttttctgtataaatattatttgccaaaagtttgtttatattcagaagtctgactatgatgaataaatcttaaatgctttgtttaattaaaaaacaaaaatcaccaatatccaagacatgaagatatcagttcaacaaatactgtagttaagagactaactctccacttgtatgggaactacatttcactcttggttttcaggatataacagcacttcaccgaaatattctttcagccataccactggtaacatttctactaaatctttctgtaacacttaaagaattccctcattcattaccttacagtgtaaacaggagtctaatttgtatcaatactatgttttggttgtaatattcagttcactcacccaatgtacaaccaa

SEQ ID NO: 185870 - DNA, 1871 bp, Homo Sapiens
  misc_feature (260)..(280): n is a, c, g, or t
  misc_feature (336)..(352): n is a, c, g, or t
  misc_feature (1526)..(1572): n is a, c, g, or t
ttggaattcactgctgagggctttggattttcctttatgaactactgaaatgaggtcaacttgactattactaagggacattttgctacaaagaatgttagttttgccaattccctttccaaatctaaaatttattttaaccaggattttagatgtaaacatcaagtagttttggttgtttcaatgaagtaacatgtttaagctcacattatttgaagtacttcagttcctattgccatgaaaattgtatccagcagctnnnnnnnnnnnnnnnnnnnnngactacagttagtcattatccaatttgatgatttatggtccaacactaatgctcannnnnnnnnnnnnnnnnacaaacatttggtggataccacaatgaaaactgcacttaaaaaacaaaaatgctgaaagaggaaggaaatatcaaaaaggtctgaatagacaacaggcaaatatgcttccacctaccgaaagagttttaggttggcagacagatgggtgccttattttctgtgaaactgaagttttaaacactggccagaaaatgtttgattgccatttcaacacatggaaatagttacattgatgcctaaattgccattttctgcaaaaagctgtgcaatgctggtgtcaaagactagacagtcgctattcataatggctgttgcaattccttcatgaatagatcgaggagtcgcttcccaagtcaatcgtcgcctatgaccatttagctcaagtcggtaagcaaaattttcagcttgcttgcgtgttcctatcagctgtacgattgcgaagaactgctggtgaccatcgtatttttcctgtttctctaagactaacatgaagtgaaagccaaaacaggactgcatcatcacccagtcaacagcaccaggaagattaatgtctgtagcaagaaaaactatatcctctccctgtagggttgtaatggacttatgctgatgcatcagatggggcattacagcatccagagagccttgccatttacaggaagcaccagggcacggacaggaataaggcctaaactcacagagctcttcatggtctgctttttctgtgtgtggcagagttatttcacatccagaagacgcatatttacaggggaaaagtactgaattagccactttctccatagccaagttgcgaatggatcccaaagggccccggcaagttggacaacatgtgagctttgggcgacagttgctacaaacaagatggccactctgacattgaagaatgggcggtaacacatagtcaaagcagactggacactcaaaaagactcgccaagtcattgttggatgcagttgtgccagtcagggcaggcaccctctgggatggtggacacttcgaggtaccggtaggtaatgctgtagcagtctgacggctcatttctgaaataaatacataaggaggcaggagaaaaataattataaccatgacttactttataaataatgtttacatgccataagtccttttaaagtttcatacaaaatttactgagcnnnnnnnnnnnnnnnnnnnnnnnnnnnnnnnnnnnnnnnnnnnnnnnttacactgaatgtgcactttattaggatctgtacacttggataagctctcttttcaaaatgttccggaaaacatgtggaactcccttaatcgtctttggatagaaaaacaaagaataataaatgctaaaatagaaaatggaccataaacaactaaagaaactatacaaggaactgaagtttaatcgaatccgttttgctaggactctccctgaggctcccttactctatttctttctaatttggagtcagctgttgataggtacagggagttacaggtgaactcctgtataaaatcggc

SEQ ID NO: 185871 - DNA, 1672 bp, Homo Sapiens
  misc_feature (110)..(129): n is a, c, g, or t
  misc_feature (185)..(201): n is a, c, g, or t
ttgggtaaacatcaactaattttggttgtttcaatgaagtaacatgtttaagctcacattatttgaagtacttcagttcctattgccatgaaaattgtatccagcagctnnnnnnnnnnnnnnnnnnnngactacagttagtcattatccaatttgatgatttatggtccaacactaatgctcannnnnnnnnnnnnnnnnacaaacatttggtggataccacaatgaaaactgcacttaaaaaacaaaaatgctgaaagaggaaggaaatatcaaaaaggtctgaatagacaacaggcaaatatgcttccacctaccgaaagagttttaggttggcagacagatgggtgccttattttctgtgaaactgaagttttaaacactggccagaaaatgtttgattgccatttcaacacatggaaatagttacattgatgcctaaattgccattttctgcaaaaagctgtgcaatgctggtgtcaaagactagacagtcgctattcataatggctgttgcaattccttcatgaatagatcgaggagtcgcttcccaagtcaatcgtcgcctatgaccatttagctcaagtcgactaacatgaagtgaaagccaaaacaggactgcatcatcacccagtcaacagcaccaggaagattaatgtctgtagcaagaaaaactatatcctctccctgtagggttgtaatggacttatgctgatgcatcagatggggcattacagcatccagagagccttgccatttacaggaagcaccagggcacggacaggaataaggcctaaactcacagagctcttcatggtctgctttttctgtgtgtggcagagttatttcacatccagaagacgcatatttacaggggaaaagtactgaattagccactttctccatagccaagttgcgaatggatcccaaagggccccggcaagttggacaacatgtgagctttgggcgacagttgctacaaacaagatggccactctgacattgaagaatgggcggtaacacatagtcaaagcagactggacactcaaaaagactcgccaagtcattgttggatgcagttgtgccagtcagggcaggcaccctctgggatggtggacacttcgaggtaccggtaggtaatgctgtagcagtctgacggctcatttcttttctcttccttgtcctggccgctggtaaacatgtgaacaagactcccctccaggagtacagagaaggtggagtagcctttcccgtcatgagaagtcaggccacgcattgcgtttcccccaagaagtaaaggaacaggcccctcctgggctctttctgctcctaagcacagaagacccaaattcgcgtctgaggtcaggatccaaataccatttacttctcagaagcaccagttacagaggtggagaaaggaagcctttccatccccaggaggcaaccacacctccctgtgagctcaaattcgactgcatctccaaaaatgggagccacagctgcgctgtcctccaatgtgccctaagctttcgtctgtctcccaagtttgttttctccagattcactgggtagggtcctgcccagctccagtggaggccacggatgcagggggcgacgcgctggctgagaaggaagtgcgctccctgagccagctcaagccaacttttttgta

SEQ ID NO: 185872 - DNA, 1355 bp, Homo Sapiens
  misc_feature (390)..(418): n is a, c, g, or t
  misc_feature (551)..(610): n is a, c, g, or t
ctttgtacaaaaaagttggccataatcttccttcaaaaaaccaacaagcaggacctgcccgatgccatgaaaccccacgagatccaggagaaactgggcctgacccggattcgggacaggaactggtatgtgcagccctcctgtgccacctcaggggacggactctatgaggggctcacatggttaacctctaactacaaatcttaatgagcattctccacccatcccctggaaggagagaaatcaaaaacccattcataggattatcgccaccatcacctctttcaattgccactttctcttcttttgaatttgaactctggagttactgttctacagtttggcggggacggggcttgggggttttctcttttgtttgtttccctttcnnnnnnnnnnnnnnnnnnnnnnnnnnnnngttggctttgcgttaggatgctctgatctgacatttgacatgaacacaaagttgctagatgctcttgttgacttccagcagatgggatgggggaaacacagcagttcttggtaaagtcctttgtaataatagnnnnnnnnnnnnnnnnnnnnnnnnnnnnnnnnnnnnnnnnnnnnnnnnnnnnnnnnnnnngcccagtttccttatcacttgctgtagatggcttattttgcattcatgcagactatgttgcaagtctgtttcatctagtaaactgaaaattattgcttaatcaaactgccgtttgtcttttatatttaaggccttccccccccttccttatgagttctaacttagtaatttcaaatgtgaccttttatatctaagaccagtatagtaaacttagcccacagtggcaaataatgagtaatattgtaatatgttccagttgcacctcagtatgttaaacaggtaatgtaagaagttctctgaaatgtcagcaagtaagttctgaaacacatcatgcatgagtaggaataaaacccaagttccccataacgtagataacttaatgctgcataaaaatatgaaagtgtaacccatgaaggacactttttctttccactgcaaagttagccactttgctgtttttcctcttttttaaactttgaaaatagactctttccagaaattggagcaataatggtgttaccacacacagattaaataatttgtagatattttaagtgacttttgggcaaaactggaatgtatacttttaccttgtttcaaacacctaagaccagtaatttaaaaattactaaaaggtttactttgttcattaataaaacatttaacaattcaattatatgcaccttttacctagttgaaaaaaatacacattcctgtttcacattatagcaactgattaagctga

SEQ ID NO: 185873 - DNA, 2163 bp, Homo Sapiens
  misc_feature (1447)..(1506): n is a, c, g, or t
  misc_feature (1803)..(1824): n is a, c, g, or t
ttggagtgcatcaaactcgatttattgccaaaaccctagattggagcttggtgtcagaactcgcctagtgggcatctctgtggctggtgagatcggccacctccacttttggttgcagtgcagagacgccatgtctcccgaagagcattgccatcactggccctcctaggctcacacgtcaattccagggcagctacacgtggtctgaatcgagaaccgagcttggagttctccaagtggagttccacccgccggactcctgacacccctgggctagggaaaatgtcgactttgttttgttctgttcctaaagtgattagcactaatctctgggatttttaaggattgcactacagaagaatgtaccctgatgtaaatctctgcggttctgggagccaaactcctctgagaacagtcagtgcaagagactccaataatccatattgaaagagtcagcaccagcagaggctactcgacttaggacgcaacagaggttttagtatttccttccctcctccaagcacttgtagcagtttcaggtttttaatttttttctgcaaataaatctaaactacgttattaaatagaaatagtttactcgcaacaacttaatttctaagggtccaagtcccagagaatccatagtcgtcaaagctttgagagtatctttcttcccagccagtcagtggctttgagccctatcttccactacaaatgacctctcgaggggggacggcgacagcgcggctctgtgagtggctgtgaggatgctgcacgtcctcagcagagtttgcaagttgctttatctcccacgggctccccaagaacctccaaccccgaggcttatcgctagcggattcacacctgagacagacatttcaacaatgatacagtcctgtcatttatcagcaaaagattgggaattttctcctgtcaacttcttttgtattaggctgtgtattgatagttaattccgttaaaaattacttggaaaacagtgggaagtggtaggactctggaagaggccacacacccgagagctgcgagatctgtgcaagtctggttttggttaggtagtaataaaagtcctcactgtagatctctaaatttcaacccacggaaatgaaagccttttgtctgaaatttacggacttaaatcttcaaggttaaagggaattttctgctcaaataatactcttatcgaaaatgctaaagtcttcaatgttaaaatactgattggtaaaatcttgcagttgggattttgcagttggatatttattttaaaaaaaattataatattcagactattcttaaaatgggacaatcagcctcatgaaaaattgatgtaaatcagaagaataccctagaatgaggccttgtgatgtgagcgttcaatttgaagagcagttcctaacttcatagaaactaaagcagaaagttgttacannnnnnnnnnnnnnnnnnnnnnnnnnnnnnnnnnnnnnnnnnnnnnnnnnnnnnnnnnnnctatgcaatgcagaattaacagacctcttctcctcatggtacacagtattacagtgttgaagtaatggtgatgcttattacaacagctatttaggggaatgttacgttgatctcttaaattgtaaacactacaaaatgtcaaaataatgagaactgacacaactttgccttaaagagtactagactggaccttctcatattacgtttaaggaagacttagagtgttcattgatgtttacgattttaatatttctgaaggccattacagtggcctggatatgtgctgaaagccaaacnnnnnnnnnnnnnnnnnnnnnnaagcaaagaaatattttaaataaatcctatttcaacactgaaattgttgaaaaccgtctcataacaaaaggaaaaaacattggaatttttgttttagtggtcagtataggggaatgaaagcgtctgttgttacccacgtaactattttgataagtattagaggttaaccttaaatccagcaaaacattaaaacagaaacttttcaacttggagcctgccattcagcgttgaggtagatgagttccgacactgtcacggctgtgttcccagcagcgaaagcctctgcggagctgccagtcgtcttgaacgtgcatgggcggcgtgtgacatctccaggga

SEQ ID NO: 185874 - DNA, 1842 bp, Homo Sapiens
  misc_feature (53)..(71): n is a, c, g, or t
  misc_feature (422)..(716): n is a, c, g, or t
  misc_feature (832)..(845): n is a, c, g, or t
ttgggtttttattacaaattttcactgctgctcctctttcccctcctttgtcnnnnnnnnnnnnnnnnnnnctcttctgtccatcagtgcatgacgtttaaggccacgtatagtcctagctgacgccaataataaaaaacaagaaaccaagtgggctggtattctctctatgcaaaatgtctgttttagttggaatgactgaaagaagaacagctgttcctgtgttcttcgtatatacacacaaaaaggagcgggcagggccgctcgatgcctttgctgtttagcttcctccagaggaggggacttgtaggaatctgccttccagcccagacccccagtgtattttgtccaagttcacagtagagtagggtagaaggaaagcatgtctctgcttccatggcttcctgagaaagcccacctgnnnnnnnnnnnnnnnnnnnnnnnnnnnnnnnnnnnnnnnnnnnnnnnnnnnnnnnnnnnnnnnnnnnnnnnnnnnnnnnnnnnnnnnnnnnnnnnnnnnnnnnnnnnnnnnnnnnnnnnnnnnnnnnnnnnnnnnnnnnnnnnnnnnnnnnnnnnnnnnnnnnnnnnnnnnnnnnnnnnnnnnnnnnnnnnnnnnnnnnnnnnnnnnnnnnnnnnnnnnnnnnnnnnnnnnnnnnnnnnnnnnnnnnnnnnnnnnnnnnnnnnnnnnnnnnnnnnnnnnnnnnnnnnnnnnnnnngcccacctgaaagcctgtctctttccactttgttggcccttccagtgggattatcgagcatgttgttttttcatagtgcctttttccttatttcaagggttgcttctgagtggtgnnnnnnnnnnnnnnaatttgttttgttttaaaataagttaaagacagtccagagcttttcagccaatttgtctcctactctgtgtaaatatttttccctccgggcaggggagccagggtagagcaaaggagacaagcaggagtggggtgaggcgttctcctgcttgtactaagccaggaggctttaagctccagctttaagggttgtgagccccttgggggttcagggaactgcttgcccagggtgcagtgtgagtgtgatgggccaccggggcaagagggaaggtgaccgcccagctctcccacatcccactggatctggcttacaggggggtcggaagcctgtcctcaccgtctcgggggttgtggcccccgccccctccctatatgcacccctggaaccagcaagtcccagacaaggagagcggaggaggaagtcatgggaacgcagcctccagttgtagcaggtttcactattcctatgctggggtacacagtgagagtactcacttttcacttgtcttgctcttagattgggccatggctttcatcctgtgtcccctgacctgtccaggtgagtgtgagggcagcactgggaagctggagtgctgcttgtgcctcccttcccagtgggctgtgttgactgctgctccccacccctaccgatggtcccaggaagcagggagagttggggaaggcaagattggaaagacaggaagaccaaggcctcggcagaactctctgtcttctctccacttctggtcccctgtggtgatgtgcctgtaatctttttctccacccaaaccccttcccacgacaaaaacaaaactgcctccctctcttccgggagctggtgacagccttgggcctttcagtcccaaagcggccgatgggagtctccctccgactccagatatgaacagggcccaggcctggagcgtttgcttgtgaccggaggcggcagctccttctggggagagcctgtccccgccttccttcactcttcctcatc

SEQ ID NO: 185875 - DNA, 1420 bp, Homo Sapiens
tacaaaaaagttggcccccagtcccctcggtagcagggtggccccacctgctcggccaccaacctgagccgcgtggcgggcctggagaagcagttggccattgagctgaaggtgaagcagggggcggagaacatgatccagacctacagcaatggcagcaccaaggaccggaagctgctgctgacagcccagcagatgttgcaggacagtaagaccaagattgacatcatccgcatgcaactccgccgggcgctgcaggccggccagctggagaaccaggcagccccggatgacacccaagggagtcctgacctgggggctgtggagctgcgcatcgaagagctgcggcaccacttccgagtggagcacgcggtggccgagggtgccaagaacgtactgcgcctgctcagcgctgccaaggccccggaccgcaaggcagtcagcgaggcccaggagaaattgacagaatccaaccagaagctggggctgctgcgggaggctctggagcggagacttggggagctgcccgccgaccaccccaaggggcggctgctgcgagaagagctcgctgcggcctcctccgctgccttcagcacccgcctggccgggccctttcccgccacgcactacagcaccctgtgcaagcccgcgccgctcacagggaccctggaggtacgagtggtgggctgcagagacctcccagagaccatcccgtggaaccctaccccctcaatggggggacctgggaccccagacagccgcccccccttcctgagccgcccagcccggggcctttacagccgaagcggaagcctcagtggccggagcagcctcaaagcagaagccgagaacaccagtgaagtcagcactgtgcttaagctggataacacagtggtggggcagacgtcttggaagccatgtggccccaatgcctgggaccagagcttcactctggagctggaaagggcacgggaactggagttggctgtgttctggcgggaccagcggggcctgtgtgccctcaaattcctgaagttggaggatttcttggacaatgagaggcatgaggtgcagctggacatggaaccccagggctgcctggtggctgaggtcaccttccgcaaccctgtcattgagaggattcctcggctccgacggcagaagaaaattttctccaagcagcaagggaaggcgttccagcgtgctaggcagatgaacatcgatgtcgccacgtgggtgcggctgctccggaggctcatccccaatgccacgggcacaggcacctttagccctggggcttctccaggatccgaggcccggaccacgggtgacatatcggtggagaagctgaacctcggcactgactcggacagctcacctcagaagagctcgcgggatcatccttccagcccatcgagcc

SEQ ID NO: 185876 - DNA, 1638 bp, Homo Sapiens
cctataaaagccaactttgtacaaaaaagttggcaatatgtcactctacatgacatgatcctgaaaaatatcgagaagatcaaacggccccggagcagcaatgcagagactctgtactgaggccagggccagggccaggggactctgtgagtctggctcaagaccgacattgccttggtttgttacatgactatcgtgatggggaaactggctggaaatagtaatcacacctctctgtttttagttagagtctaatgaaactctcatctagttctgtgatgtgtttacctcttttttcaggcctcaggaactcttctatttccttccctaataccccacacccaacctgtcgtaatttctggagaactccaggtttgtgtgtgcaggatgttggcacaaaaatacctgtgttttcattctccccctctctccctcctgtgtcttgcgctttatgttttcttccgtttgataattagttggttaaaagctgagggaaccggaaggaaagtgctaggtgttttttaggaactagggtggcggggggacgaacttctcttcctcacatgaggttactgtttctttcctctgtggggcattggatcctcccacagttgccctggtgatgacttagggcttcccatctgtgtacatcccactttgaatcttgatcgtgacaagaaataccttaggccttcagtcaattccgaagctccttcagttgtttttataatgggcgttttcacatgcacatatgtgtatgcatgtatacgcccatacagacatgcacacacagactcctactccattagctaacataccctccctctccacaacccctgtcacatacctttcaggaggtgacagttgtcttagttgtcatctacccagacaaacgtcctgggcccgtcctccctcctgatactgtagcctcttggtacccagggtgagttggtggagaacagagagatgagaagcagagggcttggggaaagcctgttcctctctgactcagccctttttggcattattgcaagagcttgactcctggttgccttttcccagccagttttcagttggggtgaaggtttctgcaagtgtgaggtccagatgctgctgctcatgttgggctttccttttgggaactatttctctttatttatagtgtcgggcttccggggaaagcaatcattggtgtgtatgtgtatgtgcatgcacacacgtgcatatacacatttgtgtatgtggaaatgtgctgggcaagtcaaaactatagaagagttgcctcctgtctctcgaatcttccagagatatcacttaattgttaacagcttttgtgttaatccccttcagcccctagctcttttattctaccacggctggagagttgatacctgcagtcagcctgccagtgactcttagtgtctgtttctgacttatttttcctgtctctgtcttccaacccccaataatatttccaccggggatgcatcatttttactcccaatattctgtagagagggagtcaggatgctgtcttcccacgaatagtactcagtaacaaaccaattgcattttattgggcagtgctcccacccaccctccagatcccttccagctaaaacccttcccccttccctc

SEQ ID NO: 185877 - DNA, 1680 bp, Homo Sapiens
gagggagggtatgttagctaatggagtaggagtctgtgtgtgcatgtctgtatgggcgtatacatgcatacacatatgtgcatgtgaaaacgcccattataaaaacaactgaaggagcttcggaattgactgaaggttaaggtatttcttgtcacgatcaagattcaaagtgggatgtacacagatgggaagccctaagtcatcaccagggcaactgtgggaggatccaatgccccacagaggaaagaaacagtaacctcatgtgaggaagagaagttcgtccccccgccaccctagttcctaaaaaacacctagcactttccttccggttccctcagcttttaaccaactaattatcaaacggaagaaaacataaagcgcaagacacaggagggagagagggggagaatgaaaacacaggtatttttgtgccaacatcctgcacacacaaacctggagttctccagaaattacgacaggttgggtgtggggtattagggaaggaaatagaagagttcctgaggcctgaaaaaagaggtaaacacatcacagaactagatgagagtttcattagactctaactaaaaacagagaggtgtgattactatttccagccagtttccccatcacgatagtcatgtaacaaaccaaggcaatgtcggtcttgagccagactcacagagtcccctggccctggccctggcctcagtacagagtctctgcattgctgctccggggccgtttgatcttctcgatatttttcaggatcatgtcatgtagagtgacatattgattcctcagctctgatatgatgagccgaaggctgatatattctttctcatcaatctctgtcacggtgcggcgatagtcctccacatggggatatttagctattttagaaaccaatttggctcttgtaatataatatctagaaatctggtccagataagatgcagcttcactctcaacagttcttagctctgcaactgtttcctcctgaatggacaccccaaagttgtttccatcttctatcctgggaatcaggagctgtacccacattttgaccgtgttacatttctcaatcaacagccggatctcaggtttcactttctcaataatgtccaccagctgctggttgcttttcagcatcccattgggcatcacaaacaccttggttccttggaaggcttcttcacactcatccaaccttcgcttcttataagtgggaccatccagtccatcatggctattggtgagaagaatggggtcagggactgggagattcatgtcagagtggatctgagttaggtcatggatgtttaagattggttccttcagaaaactatcaagttctaataacttctttgggaaaaaatttgccaccaagtcttctgcctcacttgtgatccgctccctgaaagaatcaaccttgagcttcacttcctgatccaccttcagcaacgaggccatggccgggccgggccgtgtccgatcctctggacaccggaggcgctgtggactccagggagggggccggagggacctgagaaatctcggctgacctcgggacccgaccgcccttgctggcttactcactgctcgctcgctccctccctctgtgccgtccgcccgcccgccggcagcctgctgcctgcttgctctctcgctcgccctccccaa

SEQ ID NO: 185878 - DNA, 890 bp, Homo Sapiens
ttggcgccctctagccccctcccgcgggagtcgcggcgctgcgggtaggagccgggttgcgggagaccccaggttcggttgggattcccagccagaacggagcttaagccgggcaggcgagcgaatgacggagtagcgagctgcacggcggcgtgctgcgctgttgaggacgctgtcccgcgcgctcccaggccgccccgaggcttggggtcttcgaaggataatcggcgcccggggccgaacagcgggggcacacggggcgctgccgaagtgcaaggccacggccagagctcgagcccgacgcgctgtctggagtcgtaggttggcgccgtttggggtcggggtctgaggcttgggcgctgcctgggccgagcggagatcggggtttgcctcccgtccccgctcaggaccctgacgtggctgaagcggccccgggagcatgagcgggcagcgcgtggacgtcaaggtggtgatgctgggcaaggagtacgtgggcaagactagcctggtggagcgctacgtgcacgaccgctttctggtggggccttatcagaacaccatcggggccgccttcgtggccaaggtgatgtcggtcggagaccggactgtgacattaggtatttgggacacagcaggctctgagcgctatgaggccatgagtagaatctactatcggggtgccaaggctgccatcgtctgctatgacctcacagacagcagcagctttgagcgagcaaagttctgggtgaaggaactgcgcagcctagaggagggctgccaaatctacttatgtggcaccaagagtgacctgctggaagagaccggaggcgtcgacgtgtgacttccacgacgtccaggactatgcagacagtagctgctcctcagccctt

SEQ ID NO: 185879 - DNA, 1337 bp, Homo Sapiens
ttgggtgactccgtgggcctggcgtggaggcgggggcgctaggctgcagctggctcggaatcggggctggtttcctgtctggaagggaaggggcctgcagaagggagcggggacagcagcagacaggcacacccctgccttcctctctccctctcctcccttctctggaaaagcgaggacacggagttgcagaggaagctagaccatgagatccggatgagggaaggggcctgtaagctgctggcagcctgctcccagcgagagcaggctctggaggccaccaagagcctgctagtgtgcaacagccgcatcctcagctacatgggcgagctgcagcggcgcaaggaggcgcaggtgctggggaagacaagccggcggccttctgacagtggcccgcccgctgagcgctccccctgccgcggccgggtctgcatctctgacctccggattccactcatgtggaaggacacagaatatttcaagaacaaaggtgacttgcaccgctgggctgtgttcctgctgctgcagctgggggaacacatccaggacacagagatgatcctagtggacaggaccctcacagacatctcctttcagagcaatgtgctcttcgctgaggcggggccagactttgaactgcggttagagctgtatggggcctgtgtggaagaagagggggccctgactggcggccccaagaggcttgccaccaaactcagcagctccctgggccgctcctcagggaggcgtgtccgggcatcgctggacagtgctgggggttcagggagcagtcccatcttgctccccaccccagttgttggtggtcctcgttaccacctcttggctcacaccacactcaccctggcagcagtgcaagatggattccgcacacatgacctcacccttgccagtcatgaggagaaccctgcctggctgcccctttatggtagcgtgtgttgccgtctggcagctcagcctctctgcatgactcagcccactgcaagtggtaccctcagggtgcaggtgagggggccctgaggagtggaagggagcagggagaaggcagaggagagctggataactaggaatagaagagctaatgaaaaatcaagatttgggtggaagaaatggggtatggccagacgaggggaggaatggacagcaggtggacaaaacgaacaggttctcatggggggctgagaagagggatactgggggccgtgacttccccagaaaatgttgagtcatttgtgcagcaagctggggagatgcagaactgggcacaagtgcatggagttctgaaaaggcacaaacctcttctgttaccggcaacctga

SEQ ID NO: 185880 - DNA, 2070 bp, Homo Sapiens
  misc_feature (240)..(256): n is a, c, g, or t
  misc_feature (988)..(1003): n is a, c, g, or t
gagcaatgcttttctataaaaagccaactttgtacaaaaaagttggcaaggatgatatgcatgatgttgaagatgagcttgctaagcgagtgagtaggttaagcacaagtacaaccatagaaaacatcgagattactattaagtctccagagaaaatcgaagaagtcctgtcacctgaaggctccccttcaaaatcgccatccaagaaaaagaagaaattccgcactccttcttttctgnnnnnnnnnnnnnnnnnggagaaagttgaggcctaaataaagtctttttataattattattataacaatgtgacattgcacatctaaataccacatttaagttgatcattaatatgcaatggtagatcagattgggggatgtagcaaactggactttaagaactggaaagaggttttacaaaagaaaaactttcagattcatctctcattttatatgtccagaaatggctttgaattttaagcaattactagttttaattagctctgccctcatgaagtattattataattcaccataaacagctatctgtctgaattacttcaggccttctccataatatctgttagaaagaaattgccagtgagcaagtgagaatttttatttctcaatacctgcttcacttgataatcatattataattttttatcatgattattgactatatttttggagtcccattgtttcagtgggcattaacagaatgctttaaaaacttctaagacaagaatctatagcattagtatacactggcacataattttttaaaaagttttaagaaaagattcatttggaattttattcacagtataaaatttcctcacctgaagtaactttgtttgccaaaaaagttgttttaataaactataatttttgaaaacttccttttttattagtttagaaagccccttatttttcaacaaaggggattttgtacacataacatgggttatttagtttaactctggcnnnnnnnnnnnnnnnnttttgtatgttgatgtttgtataccgttcagtataaaagtgtcctaagcatattagccaatcttttcacagtagagcatacttaaggctgcttggtactgagtatacttaaatataactccagaatccagggacttggtgttaaaacaggattagagcatgtaaaggtacatctagattcatatttgaatcttaaactgtatttttctcttagtattgctaatgagtaaagaaaagtctcataaggtagccaaatgaaaaagaatgaaagggaaagtgaaaaattaaggggacaaaagatgggatgtgaaaagaagaattctagtttgatggtgactcatattcacgataggatacaaagtgtgatttgttggaaacatgtcccaaatttctaaaattctgcttctctgccaaaagcaatgtctttcttggttgatatttgagttttaaaagggtcaaatctttctaattttttgtatctttagagggcagcactagaagaaatcagcaggtctaatcccaccagtaagaaaactaccacttcttgatttttacagatttaaaaaaatcttttcagtgacctttctttttaatgtaaatacaaatttaaacctaggcttaatataggcgtttcccctttcacccaagtgatgtcacagttcgatgcaaaatcaatgatccagaatgatcgtgggtaaaaataactcaaagtgtttcttaagggtgagttggcatgcaaaaaattacattgattacagtgtgttttggagctggctctgtttgtgtgcatatgataatgcagagttgagccagagcctggaaatgtcattctagatctcactaactactggaatcagtgttttaatctcttggtggaaactttcagttgcttaactctctattggaagatttttttaatgttctacatcatttatgttgtattacaatgtatgtagaaatagtaacctgtgaactatgcttttccataactttttaaaaatatatatatctaaatgaatgccatgtgcataaatatttttttaaacctaacattgaactattgccacc

SEQ ID NO: 185881 - DNA, 2290 bp, Homo Sapiens
ttggcgccagagcgcgagccgccagcccgtaacggtcgccagtgtgaggggcgggagggaaagaagaggggtttaaattagattttttaaaacacagagcaagcgccagaggcgtcggcatcccaggtgtcgccgcttcctgctgcacagggctcggcgtacaggtccctccctcctcaagccccctccccttctcccgccctaccctctggggctctgcggcgcttaagaggcggccgcagcggcggatccggcggctgctgcagcccgggcggctgccgagaaggagggaggggaaacacaaagccggctacgcgctgcgagataacaagagtaatccacagacttaaaacatgagctcagatgccagccaaggcgtgattaccactcctcctcctcccagcatgcctcacaaagagagatattttgaccgcatcaatgaaaatgacccagaatacattagggagaggaacatgtctcctgatctacgacaagacttcaacatgatggagcagaggaaacgagttactcagatcctgcaaagtcctgcctttcgggaagacttggaatgccttattcaagaacagatgaagaaaggccacaacccaactggattactagcattacagcagattgcagattacatcatggccaattctttctcgggtttttcttcacctcctctcagtcttggcatggtcacacctatcaatgaccttcctggtgcagatacatcctcatatgtgaagggagaaaaacttactcgctgtaaacttgccagcctgtacagacttgtagacttgtttggatgggcacacctggcaaatacctatatctcagtaagaataagtaaggagcaagaccacattataataattcccagaggcctatctttttctgaagctacagcctccaatttggtgaaagtcaatataataggagaagtggttgaccagggaagtaccaatttgaaaattgaccatacaggattcagtccccatgctgcaatctattcaacacgtcctgatgttaagtgtgtgatacacatccatacccttgcaacagcagctgtatcctccatgaaatgtgggatccttccaatttctcaagagtctcttcttctgggagatgttgcctattatgactaccaagggtcacttgaagaacaggaggagagaattcaactgcagaaggttctgggaccaagttgtaaggtgctggtactcaggaatcatggtgtggttgcacttggagaaacattagaggaggcttttcattatatttttaatgtgcaactagcctgtgagattcaggtgcaggccctagcaggtgcaggtggagtagacaatctccatgtactggactttcagaagtataaagctttcacttacactgtagcagcgtctggtggaggaggtgtgaatatgggttcccatcaaaaatggaaggttggcgaaattgagtttgaagggcttatgaggactctggacaacttggggtatagaacaggctatgcttacaggcatcctctcattcgagagaagcctaggcacaagagtgatgtggaaatcccagcaactgtgactgctttttcctttgaagacgatacagtgccactctctcctctcaaatacatggcacagaggcaacagcgtgaaaaaacaagatggctgaactcaccaaatacttacatgaaagtgaatgtgcctgaggagtctcggaacggagaaaccagtccccgaaccaaaatcacgtggatgaaagcagaagactcatctaaagttagtggtggaacacctatcaaaattgaagatccaaatcagtttgttcctttaaacacaaacccgaatgaggtactagaaaagagaaataagattcgggaacaaaatcgatatgacttgaaaacagcaggaccacaatctcagttgcttgctggaattgttgtggataagccaccttctactatgcaatttgaagatgatgatcatggcccaccagctcctcctaacccatttagtcatctcacagaaggagaacttgaagagtataagaggacaatcgaacgtaaacaacaaggcctagaagaaaaccatgagctgttttccaagagcttcatctccatggaagtgcctgtcatggtagtaaatggcaaggatgatatgcatgatgttgaagatgagcttgctaagcgagtgagtagtttaagcacaaggtacaaccatagaaaacatcgagattactattaagtctcaagagaaaatcgagaagtcctgtcacctgaagctccctt

SEQ ID NO: 185882 - DNA, 1728 bp, Homo Sapiens
  misc_feature (168)..(228): n is a, c, g, or t
ttggctgacatcagttctggaacgtctagaagatactaagaacaacaatttgcttcgtcagcaattgaagtggttgatatgtgaactctgcagtttatataaccttcctaagcacctggatgttgagatgctagatcaaccactacccacgggtcagaatgggacaannnnnnnnnnnnnnnnnnnnnnnnnnnnnnnnnnnnnnnnnnnnnnnnnnnnnnnnnnnnncttagatcactatgagatgaaggaagaagagcctattagtgggaaaaagtcagaggatgaaggaattgaaaaagaaaatttggcaatattagagaaaattaggaagactcaaaggcaagaccatttaaatggtgcagtgtctgggtcagtgcaagcttcagatagacttatgaaagagctcagggacatatacagatcacagagttataaaacagggatttattcagtggaactcataaatgacagtttatatgactggcatgttaaactgcagaaggttgaccctgatagtcctttgcacagtgatcttcagatcttaaaagaaaaagaaggcatagaatatattttgcttaacttctcttttaaggataactttccatttgatcctccatttgttcgagtggtgttacctgttctctcaggagggtatgtattgggtggaggagcattatgtatggaacttctcacaaaacagggctggagcagtgcctactcaatagaatcggtcatcatgcaaataaatgccaccttagtcaaaggcaaagccagagtgcagtttggagcaaataagaatcaatataatctagcaagagcccaacaatcctataattccattgtacagatacatgagaaaaatggctggtacacccctccaaaggaagatggctaaatatgttgactgttgtatgtttggactaatgttgctttaaagaaaatctttccaacatgcagacaaaagctttgagtgcccctattacagcagtaccgaagatgttagttaatagatattttagtggataatctgtcatctgacatccagtataagttacagccttcgcattttgctcattttagatatcttggactgagcagtggggcctttactgtatttttcctgataaatacacatactggccactccttatctctttttcttgaaaagtgaactttttaaagcagccaagtcaacatcaggctactgaagttgaggctttagggtaactttcctatattgagcccatgggttacaaggatttgcaatatattgttccatttacagccaatacaggtttaatcgatgttcaatattggtttaggaaatttaaggccttctaaatcataatagctctttcatgtctaaaaccattttatgatattgccaaaatgtgataggaaacctactcattaaattgttaaactttttaatgactatgtgaagatatgaattgtttcctgaagataatactcttaattgagttgtattgtacttcttagcaaagcagtgtaaaactgtatcaattaaggcttgtgagtagtgatttccactggggcatcagagtcttggctgggctgaatctgctgcttgttggttcagtgtttcttatgaacaagagccacagtacagagcttcaagttatttaaaatactaagtcatcttacgtttccattttattaacgggatgttgcaatcgtttgtaaactaataaacttataaagtga

SEQ ID NO: 185883 - DNA, 1182 bp, Homo Sapiens
  misc_feature (665)..(725): n is a, c, g, or t
tggcgctgttgccccctttaaaagccgcggggccgccgcctcctgccgctggagtcggttacaaaggaagcgccacccaggccgccacacgccgaggcttccgcgcccctcgccattttccagcagcgctcgacgaggcggagccgcgagagcgcggcccaggccggccccgcggggcggtcgcggccgtgacggcggctccgggcccggctccccttccgcgcccggctccccttccgcgcccctcccgccggagatgaggggaagatgtccgtgtcagggctcaaggccgagctgaagttcctggcgtccatcttcgacaagaaccacgagcgattccgcatcgtcagttggaagctggacgagctgcactgccagttcctggtgccgcagcagggcagcccgcactcgctgccgccgccactcacgctccactgcaacatcacggaatcctatccatcttcttcaccgatatggtttgtggattctgaagacccaaatctgacatcagttctggaacgtctagaagatactaagaacaacaatttgcttcgtcagcaattgaagtggttgatatgtgaactctgcagtttatataaccttcctaagcacctggatgttgagatgctagatcaaccactacccacgggtcagaatgggacaannnnnnnnnnnnnnnnnnnnnnnnnnnnnnnnnnnnnnnnnnnnnnnnnnnnnnnnnnnnncttagatcactatgagatgaaggaagaagagcctattagtgggaaaaagtcagaggatgaaggaattgaaaaagaaaatttggcaatattagagaaaattaggaagactcaaaggcaagaccatttaaatggtgcagtgtctgggtcagtgcaagcttcagatagacttatgaaagagctcagggacatatacagatcacagagttataaaacagggatttattcagtggaactcataaatgacagtttatatgactggcatgttaaactgcagaaggttgaccctgatagtcctttgcacagtgatcttcagatcttaaaagaaaaagaaggcatagaatatattttgcttaacttctcttttaacgataactttccatttgatcctccatttgttcgagtggtgttacctgttctctcagagggtatgtattggggtggaggagcattatgtatg

SEQ ID NO: 185884 - DNA, 1106 bp, Homo Sapiens
actttgtacaaaaaagttgggttaatagatattttagtggataatctgtcatctgacatccagtataagttacagccttcgcattttgctcattttagatatcttggactgagcagtggggcctttactgtatttttcctgataaatacacatactggccactccttatctctttttcttgaaaagtgaactttttaaagcagccaagtcaacatcaggctactgaagttgaggctttagggtaactttcctatattgagcccatgggttacaaggatttgcaatatattgttccatttacagccaatacaggtttaatcgatgttcaatattggtttaggaaatttaaggccttctaaatcataatagctctttcatgtctaaaaccattttatgatattgccaaaatgtgataggaaacctactcattaaattgttaaactttttaatgactatgtgaagatatgaattgtttcctgaagataatactcttaattgagttgtattgtacttcttaggcaaagcagtgtaaaactgtatcaattaaggcttgtgagtagtgatttccactggggcatcagagtcttggctgggctgaatctgctgcttgttggttcagtgtttcttatgaacaagagccacagtacagagcttcaagttatttaaaatactaagtcatcttacgtttccattttattaacgggatgttgcaatcgtttgtaaactaataaacttataaagtgattggcacaaagactccttgagcaaaagctgtgcagttaagtacaaaaagatacttaatttggagactcttacagtaatttttgccatgtcaaaacaatggcttttacattgaaagattaatagaaactctacatatgttaatttttttatagaacctgactcaaatcaaggtactctccattttattgccttacctgaatcagtcctttttggttgggaatagatttttttatacacccacgtttgatttaaaagtaaattctagttcttaagcacttttaacaagaaatccagaagcacatttttctgcacaaacaagttacaaagttcaaagtgtttcttgtgcattagctttgagattc

SEQ ID NO: 185885 - DNA, 2114 bp, Homo Sapiens
ttggcttaacagcacccactgccaggacatcaacgagtgcgcaatgccacaagtgtccccagctgcagtacacaggagtgcagaagccagggcctgtacgtggggaagtgggcgctgactgtccccagggctacaagaggcttaacagcacccactgccaggacatcaacgagtgcgcaatgccgggcgtgtgtcgccatggtgactgcctcaacaaccctggctcctatcgctgtgtctgcccacctggccatagtttaggcccctcccgtacacagtgcattgcagacaaaccggaggagaagagcctgtgtttccgcctggtgagccctgagcaccagtgccagcacccactgaccacccgcctgacccgccagctctgctgctgcagtgtcggcaaggcctggggcgcgcggtgtcagcgctgcccaacagatggcaccgctgcgttcaaggagatctgcccagctgggaagggataccacattctcacctcccaccagacgctcaccattcagggcgagagtgacttttcccttttcctgcaccctgacgggccacccaagccccagcagcttccggagagccctagccaggctccaccacctgaggacacagaggaagagagaggggtgaccacggactcaccggtgagtgaggagaggtcagtgcagcagagccacccaactgccaccacgactcctgcccggccctaccccgagctgatctcccgtccctcgcccccgaccatgcgctggttcctgccggacttgcctccttcccgcagcgccgtagagatcgctcccactcagtcacagagactgatgagtgccgactgaaccagaacatctgtggccacggagagtgcgtgccgggcccccctgactactcctgccactgcaaccccggctaccggtcacatccccagcaccgctactgcgtggatgtgaacgagtgcgaggcagagccctgtggcccggggaggggcatctgcatgaacaccggcggctcctacaattgccactgcaaccgcggctaccgcctgcacgtgggcgccggggggcgctcgtgcgtggacctgaacgaatgcgccaagccccacctgtgcggcgacggcggcttctgcatcaactttcccggtcactacaagtgcaactgctaccccggctaccggctcaaagcctcccggcctcctgtgtgcgaagacatcgacgagtgccgggacccaagctcttgcccggatggcaaatgcgagaacaagcccgggagcttcaagtgcatcgcctgtcagcctggctaccgcagccaggggggcggggcctgtcgcgacgtgaacgagtgcgccgagggcagcccctgctcgcctggctggtgcgagaacctcccgggctccttccgctgcacctgtgcccagggctacgcgcccgcgcccgacggccgcagttgcttggatgtggacgagtgtgaggctggggacgtgtgtgacaatggcatctgcagcaacacgccaggatctttccagtgtcagtgcctctctggctaccatctgtccagggaccggagccactgcgaggacattgatgagtgtgacttccctgcagcctgcattgggggtgactgcatcaataccaatggctcctacagatgtctttgcccccaggggcatcggctggtgggtggcaggaaatgccaagacatagatgagtgcagccaggacccgagcctgtgccttccccatggggcctgcaagaaccttcagggctcctatgtgtgtgtctgcgatgagggcttcactcccacccaggaccagcacggttgtgaggaggtggagcagccccaccacaagaaggagtgctacctgaacttcgatgacacagtgttctgcgacagcgtattggccaccaacgtgacccagcaggagtgctgctgctctctgggggccggctggggcgaccactgcgaaatctacccctgcccagtctacagctcagccgagttccacagcctctgcccagacggaaagggctacacccaggacaacaacatcgtcaactacggcatcccagcccaccgtgacatcgacgagtgcatgttgttcgggtcggagatttgca

SEQ ID NO: 185886 - DNA, 352 bp, Homo Sapiens
cccctcccgcgtaccccactccccggcccgggccacactccatctcttccgggctcaggcactggcgctgcgcgggactgtactcggcagggggcgtgcaggcacagcggtagccgccgcgcgtgttctcacacactccgttccggcagttggactcgtccaggcactcgtccacgtccacgcattccagcaggttcccgtcgtagtagaagccctgcttgcagtagcactcgtagccaggctgcgtgttcacgcacttgccctccttgcaaatctccgacccgaacaacatgcactcgtcgatgtctgcggggtgacaaggcactggccgcccaacttttttgtacaaagt

SEQ ID NO: 185887 - DNA, 760 bp, Homo Sapiens
actttgtacaaaaaagttggtgaaggtgttatgaaggacagcagctaatgtccacatgcacattcagacacatgcacagacacagcagacttcctgctgtacatactttgaaaccaaagtggaaattcaggttctgaacttgtgtgaggcccttgaggtgcagccccagggaaagaggggctgggtttccagctgcgctactcttgccccgcagacatagatgagtgcagccaggacccgagcctgtgccttccccatggggcctgcaagaaccttcagggctcctatgtgtgtgtctgcgatgagggcttcactcccacccaggaccagcacggttgtgaggaggtggagcagccccaccacaagaaggagtgctacctgaacttcgatgacacagtgttctgcgacagcgtattggccaccaacgtgacccagcaggagtgctgctgctctctgggggccggctggggcgaccactgcgaaatctacccctgcccagtctacagctcagccgagttccacagcctctgcccagacggaaagggctacacccaggacaacaacatcgtcaactacggcatcccaagcccaccgtgacatcgacgagtgcatgttgttcgggtcggagatttgcaaggagggcaagtgcgtgaacacgcagcctggctacgagtgctactgcaagcagggcttctactactacaggaacctgctggatgcgtggacgtggacgaatgcctggacgagtccaactgccgga

SEQ ID NO: 185888 - DNA, 908 bp, Homo Sapiens
ctttgtacaaaaaagttggccatctccaaaacagccttgtactcccgcatcgggaccgctgaggtggagaaacctgcaggccttctgttccagcagcccgacctggactctgccctccagatcgccagagcagagatcataaccaaggagagagaggtctcagaatggaaagataaatatgaagaaagcaggcgggaagtgatggaaatgaggaaaatagtggccgagtatgagaagaccatcgctcagatgatagaggacgaacagagagagaagtcagtctcccaccagacggtgcagcagctggttctggagaaggagcaagccctggccgacctgaactccgtggagaagtctctggccgacctcttcagaagatatgagaagatgaaggaggtcctagaaggcttccgcaagaatgaagaggtgttgaagagatgtgcgcaggagtacctgtcccgggtgaagaaggaggagcagaggtaccaggccctgaaggtgcacgcggaggagaaactggacagggccaatgctgagattgctcaggttcgaggcaaggcccagcaggagcaagccgcccaccaggccagcctgcggaaggagcagctgcgagtggacgccctggaaaggacgctggagcagaagaataaagaaatagaagaactcaccaagatttgtgacgaactgattgccaaaatggggaaaagctaactctgaaccgaatgttttggacttaactgttgcgtgcaatatgaccgtcggcacactgctgttcctccagttccatggacaggttctgttttcactttttcgtatgcactactgtatttcctttctaaataaaattgatttgattgtatgcagtactaaggagactatcagaatttcttgctattggtttgcatttt

SEQ ID NO: 185889 - DNA, 1973 bp, Homo Sapiens
tgtacaaaaaagttggctacaagtgtcgagtacctacaacagcagcgacagtgactcctccacgactgaggagatggaagtggcggtcagcaaggcacgggctaaagtgaccatgaatgacttcgactatctcaaactccttggcaagggaacctttggcaaagtcatcctggtgcgggagaaggccactggccgctactacgccatgaagatcctgcggaaggaagtcatcattgccaaggatgaagtcgctcacacagtcaccgagagccgggtcctccagaacaccaggcacccgttcctcactgcgctgaagtatgccttccagacccacgaccgcctgtgctttgtgatggagtatgccaacgggggtgagctgttcttccacctgtcccgggagcgtgtcttcacagaggagcgggcccggttttatggtgcagagattgtctcggctcttgagtacttgcactcgcgggacgtggtataccgcgacatcaagctggaaaacctcatgctggacaaagatggccacatcaagatcactgactttggcctctgcaaagagggcatcagtgacggggccaccatgaaaaccttctgtgggaccccggagtacctggcgcctgaggtgctggaggacaatgactatggccgggccgtggactggtgggggctgggtgtggtcatgtacgagatgatgtgcggccgcctgcccttctacaaccaggaccacgagcgcctcttcgagctcatcctcatggaagagatccgcttcccgcgcacgctcagccccgaggccaagtccctgcttgctgggctgcttaagaaggaccccaagcagaggcttggtggggggcccagcgatgccaaggaggtcatggagcacaggttcttcctcagcatcaactggcaggacgtggtccagaagaagctcctgccacccttcaaacctcaggtcacgtccgaggtcgacacaaggtacttcgatgatgaatttaccgcccagtccatcacaatcacaccccctgaccgctatgacagcctgggcttactggagctggaccagcggacccacttcccccagttctcctactcggccagcatccgcgagtgagcagtctgcccacgcagaggacgcacgctcgctgccatcaccgctgggtggttttttacccctaactttttacttagcctttttggtttgtgtccccacccccacctcctcaccccctttccagttcttcttcaggcccctcccagacgcaccccagcggcccctgcagcccctgcctccagcctccagcctcacctttgtgcccagactcgcatttggaagactccacctcccgcccaggcctgggctgttgggcggttggagactcaggttttaatccacacaagccccagtgaggggtgaagcatggcgcctggggcctgcctgagtttctggcctgggtgtcgtgctggtgtctgcctccgcgctgctgcatctggacgaaggctgccttctggtgggacgcgacacccggcagacagtggtgctgccttccaggccccgtggcctaggctcggagtggccaggcacggggcggtccaatcccccacccgctgtccccctatgggggcagaaaagcaataatgtccaggggcaggcaggggcccttgggagctgcagggctgggggttagggctgctccctggtgaatggagtcagatcctaggatctgtaccatggggaaccaggagtggccgggctgggtgccgcctcctggtccggcctcctccccaccaaactgtcctcaccctatggatgaggcaggaggaacatttggggccaaacctgcctgcctcccagccccgtgccttactagggcttccttccagctggccttacctcccgctggaccctgggcctggcctgccccactgggggctatgggctgggctcaccctctctctgcgggtggagggcc

SEQ ID NO: 185890 - DNA, 1911 bp, Homo Sapiens
  misc_feature (1363)..(1372): n is a, c, g, or t
ttgggctagagcgatgccgggccggagttgcgtcgccttagtcctcctggctgccgccgtcagctgtgccgtcgcgcagcacgcgccgccgtggacagaggactgcagaaaatcaacctatcctccttcaggaccaacgtacagaggtgcagttccatggtacaccataaatcttgacttaccaccctacaaaagatggcatgaattgatgcttgacaaggcaccaatgctaaaggttatagtgaattctctgaagaatatgataaatacattcgtgccaagtggaaaagttatgcaggtggtggatgaaaaattgcctggcctacttggcaactttcctggcccttttgaagaggaaatgaagggtattgccgctgttactgatatacctttaggagagattatttcattcaatattttttatgaattatttaccatttgtacttcaatagtagcagaagacaaaaaaggtcatctaatacatgggagaaacatggattttggagtatttcttgggtggaacataaataatgatacctgggtcataactgagcaactaaaacctttaacagtgaatttggatttccaaagaaacaacaaaactgtcttcaaggcttcaagctttgctggctatgtgggcatgttaacaggattcaaaccaggactgttcagtcttacactgaatgaacgtttcagtataaatggtggttatctgggtattctagaatggattctgggaaagaaagatgccatgtggatagggttcctcactagaacagttctggaaaatagcacaagttatgaagaagccaagaatttattgaccaagaccaagatattggccccagcctactttatcctgggaggcaaccagtctggggaaggttgtgtgattacacgagacagaaaggaatcattggatgtatatgaactcgatgctaagcagggtagatggtatgtggtacaaacaaattatgaccgttggaaacatcccttcttccttgatgatcgcagaacgcctgcaaagatgtgtctgaaccgcaccagccaagagaatatctcatttgaaaccatgtatgatgtcctgtcaacaaaacctgtcctcaacaagctgaccgtatacacaaccttgatagatgttaccaaaggtcaattcgaaacttacctgcgggactgccctgacccttgtataggttggtgagcacacgtctggcctacagaatgcggcctctgagacatgaagacaccatctccatgtgaccgaacactgcagctgtctgaccttccaaagactaagactcgcggcaggttctctttgagtcaatagcttgtcttcgtccatctgttgacaaatgacagatcnnnnnnnnnnccccctatcagttgatttttcttatttacagataacttctttaggggaagtaaaacagtcatctagaattcactgagttttgtttcactttgacatttggggatctggtgggcagtcgaaccatggtgaactccacctccgtggaataaatggagattcagcgtgggtgttgaatccagcacgtctgtgtgagtaacgggacagtaaacactccacattcttcagtttttcacttctacctacatatttgtatgtttttctgtataacagccttttccttctggttctaactgctgttaaaattaatatatcattatctttgctgttattgacagcgatataattttattacatatgattagagggatgagacagacattcacctgtatatttcttttaatgggcacaaaatggggcccttgcctctaaatagcactttttggggttcaagaagtaatcagtatgcaaagcatcttttatacaataattgaagtgttccctttttcataattactctacttcccagtaaacctaaggaa

SEQ ID NO: 185891 - DNA, 2202 bp, Homo Sapiens
  misc_feature (186)..(194): n is a, c, g, or t
  misc_feature (2030)..(2045): n is a, c, g, or t
atgagcaatgctttccttttaatggccaactttgtacaaaaaagttgggatgtctccgacgccgccgctcttcagtttgcccgaagcgcggacgcggtttacgaagtctaccagagaggccttgaacaacaaaaacatcaagccattgttaagtaccttcagccaggtacctggcagtgaaaatgnnnnnnnnntgtacccttgaccaagctttcagaggtattctagaagaagaaattataaatcattcatcatgtgaaaacgttttagctattatttctcttgctattgggggagtaactgaaggtatttgtaccgcatctacaccttttgtattgttgggagatgttttggattgtcttcctttggatcagtgtgacacaatattcacttttgtggaaaaaaatgttgctacttggaaatcaaatacattctattctgctgggaaaaattacttactacgtatgtgcaatgatctcctaagaagattgtctaaatcccagaatacagtcttctgtggacggattcagctctttttggccaggcttttccctctgtctgagaaatcaggtcttaacttgcagagtcagtttaatctggaaaatgtcactgttttcaatacaaatgagcaggaaagcaccctgggtcagaagcacactgaagatagagaagaaggaatggatgtagaagaaggcgaaatgggagatgaggaagctccaacaacgtgctctattccaattgattacaacctgtatcgaaaattctggtcacttcaggattacttcaggaaccctgtgcaatgctatgagaagatttcatggaaaacttttctcaagtattctgaagaagttttagctgtttttaagagttataaattagatgatactcaggcctcaagaaaaaagatggaagaattgaaaacaggaggagaacatgtatattttgcaaaatttttaacaagtgaaaagctgatggatttacaactgagtgacagtaactttcgtcgacacatcctgttgcagtatctcattttattccaatatctcaaggggcaggtcaaattcaaaagttcaaactatgttttaactgatgagcaatcactttggattgaagatactacaaaatcagtttatcaactactatctgaaaacccccccgatggagaaagattttcaaagatggtagagcatatattaaacactgaagaaaactggaactcgtggaaaaatgaaggttgcccaagttttgtgaaagaaagaacatcagataccaaacctacgagaataattcggaagagaacagcacccgaggacttcctagggaaaggacccaccaaaaaaaattctgatgggaaatgaggagttaacaaggctttggaatctttgccctgataatatggaagcctgtaaatcagagacaagggaacacatgcccactttggaggaattctttgaagaagccattgaacaggcagaccctgaaaatatggtggaaaatgaatataaggctgtgaacaattcaaattatggttggagagccctgagactattagcacggagaagccctcacttcttccagccaaccaaccagcagtttaaaagtttaccagaatatcttgaaaatatggtaataaagctagccaaggaattaccgcctccttctgaagaaataaaaacaggtgaggatgaagatgaggaagataatgatgctctactgaaggaaaatgaaattcctgatgttcggcgagacaaacctgtaacaggagaacaaatagaggtatttgccaacaagctgggtgaacaatggaagattctggctccctacttggaaatgaaagactcagaaattaggcagattgagtgtgacagtgaagacatgaagatgagagctaagcagctcctggttgcctggcaagatcaagagggagttcatgcaacacctgagaatctgattaatgcactgaataagtctggattaagtgaccttgcagaaagtctaactaatgacaatgagacaaatagttagcttcnnnnnnnnnnnnnnnnattaaaactgtgatagattttgttaccaagcagcatttgataagaggtccactggttttggtaaacaataaacatttttataacaattgttgtacagtcggctgggtgctctgaggaacaatagaacacatattggctcaaaccagagtttggggga

SEQ ID NO: 185892 - DNA, 905 bp, Homo Sapiens
ttggcgcgcaggttctgaatgatgactgacgcgggtttgggtgatacccctcacagcccctgtcattccggagtcataaggcacccgcgcgtctagccccagcgccagggcacgcgagcggcgctggagggaggaaagcttccgcctgcgggccggacaaaagtcccgcctgcccacggctttttgcccgccgctcgtgaccgagacgcctcgccgcggccagctcgctgctctcgctggcggatggtgtgtggccgccgcaggacgcccgccgtgcccgggccatgaagtagcggctgctggcggcgccgctgcccaaccgccagccccagccccgcgctgcgctgcccggtcctctcccggcggggtcgtatcggcgtggacatggctggccgcgtccctagcctgctagttctccttgtttttccaagcagctgtttggctttccgaagcccactttctgtctttaagaggtttaaagaaactaccagaccattttccaatgaatgtcttggtaccaccagacccgtagttcctattgattcatcagattttgcattggatattcgcatgcctggggttacacctaaacagtccgatacatacttctgcatgtctatgcgaataccagtggatgaggaagccttcgtgattgacttcaagcctcgagccagcatggatactgtccatcacatgttactttttggatgcaatatgccttcatccactggaagttactggttttgtgatgaagaacctgtacagataaagccaatattctgtatgcctgggcgagaatgctccccctacccggctctccaaaggtgttggattcagagttggaggagagactggaagtaaatactttgtactacagggtacactatggggatattagtgctttt

SEQ ID NO: 185893 - DNA, 3273 bp, Homo Sapiens
aaatttgtacaaaaaagttggctcgtgaccgagaccccccgccgcggccagctcgctgctctcgctggcggatggtgtgtggccgccgcaagacgcccgccgtgcccgggccatgaagtagcggctgctggcggcgccgctgcccaaccgccagccccagccccgcgctgcgctgcccggtcctctcccggcggggtcgtatcagcgtggacatggctggccgcgtccctagcctgctagttctccttgtttttccaagcagctgtttggctttccgaagcccactttctgtctttaagaggtttaaagaaactaccagaccattttccaatgaatgtcttggtaccaccagacccgtagttcctattgattcatcagattttgcattggatattcgcatgcctggggttacacctaaacagtccgatacatacttctgcatgtctatgcgaataccagtggatgaggaagccttcgtgattgacttcaagcctcgagccagcatggatactgtccatcacatgttactttttggatgcaatatgccttcatccactggaagttactggttttgtgatgaaggaacctgtacagataaagccaatattctgtatgcctgggcgagaaatgctccccctacccggctccccaaaggtgttggattcagagttggaggagagactggaagtaaatactttgtactacaggtacactatggggatattagtgcttttagagataataacaaggactgttctggtgtgtccttacacctcacacgtctgccacagcctttaattgctggcatgtaccttatgatgtctgttgacactgttatcccagcaggagaaaaagtggtgaattctgacatttcatgccattataaaaattatccaatgcatgtctttgcctatagagttcacactcaccatttaggtaaggtagtaagtggatacagagtaagaaatggacagtggacactgattggacggcagagccctcagctgccacaggctttctaccctgtggggcatccagttgatgtaagttttggtgacctactggctgcaagatgtgtattcactggtgaaggaaggacagaagccacacacattggtggcacgtctagtgatgaaatgtgcaacttatacattatgtattacatggaagccaagcatgcagtttctttcatgacctgtacccagaatgtagctccagatatgttcagaaccataccaccagaggccaacattccaattcccgtgaagtctgatatggttatgatgcatgaacatcataaagaaacagaatataaagataagattcctttactacagcagccaaaacgagaagaagaagaagtgttagaccagggtgatttctattcactactttccaagctgctaggagaaagggaagatgttgttcatgtgcacaaatataatcctacagaaaaggcagaatcagagtcagacctggtagctgagattgcaaatgtagtccaaaaaaaggatcttggtcgatctgatgccagagagggtgcagaacatgagaggggtaatgctattcttgtcagagacagaattcacaaattccacagactagtatctaccttgaggccaccagagagcagagttttctcattacagcagcccccacctggtgaaggcacctgggaaccagaacacacaggagatttccacatggaagaggcactggattggcctggagtatacttgttaccaggccaggtttctggggtggctctagaccctaagaataacctggtgattttccacagaggtgaccatgtctgggatggaaactcgtttgacagcaagtttgtttaccagcaaataggactcggaccaattgaagaagacactattcttgtcatagatccaaataatgctgcagtactccagtccagtggaaaaaatctgttttacttgccacatggcttgagtatagataaagatgggaattattgggtcacagacgtggctctccatcaggtgttcaaactggatccaaacaataaagaaggccctgtattaatcctgggaaggagcatgcaaccaggcagtgaccagaatcacttctgtcaacccactgatgtggctgtggatccaggcactggagccatttatgtatcagatggttactgcaacagcaggattgtgcagttttcaccaagtggaaagttcatcacacagtggggagaagagtcttcagggagcagtcctctgccaggccagttcactgttcctcacagcttggctcttgtgcctcttttgggccaattatgtgtggcagaccgggaaaatggtcggatccagtgttttaaaactgacaccaaagaatttgtgagagagattaagcattcatcatttggaagaaatgtatttgcaatttcatatataccaggcttgctctttgcagtgaatgggaagcctcattttggggaccaagaacctgtacaaggatttgtgatgaacttttccaatggggaaattatagacatcttcaagccagtgcgcaagcactttgatatgcctcatgatattgttgcatctgaagatgggactgtgtacattggagatgctcataccaacaccgtgtggaagttcaccttgactgagaaattggaacatcgatcagttaaaaaggctggcattgaggtccaggaaatcaaagaagccgaggcagttgttgaaaccaaaatggagaacaaacccacctcctcagaattgcagaagatgcaagagaaacagaaactgatcaaagagccaggctcgggagtgcctgttgttctcattacaacccttctggttattccggtggttgtcctgctggccattgccatatttattcggtggaaaaaatcaagggcctttggagattctgaacacaaactcgagacgagttcaggaagagtactgggaagatttagaggaaagggaagtggaggcttaaaccttggtaatttctttgcaagccgtaagggctacagtcgaaaagggtttgaccggcttagcactgagggcagtgaccaagagaaagaggatgatggaagtgaatcagaagaggagtattcagcacctctgcctgcgctcgcaccttcctcctcctgaaaaccaagctttgattttagattgagtaagatttacccagaatgtcagattcctttcgctttagcacgtttaaagttctgtgtatttaagttgtaaactgtactagtctgtgtgggactgtacacactttatttacttc

SEQ ID NO: 185894 - DNA, 1194 bp, Homo Sapiens
ttggctccacgagcagcacctacaacttcacaaaccctcaggatggcgccttcagcctctccggcaaagcaaagcagaagctgctgaagcacggggtgaacttgctctgaactgcacccaggaggtgactgggaaggagaaaaccagcaaaggaagctctgccttttataattgaaaaggcccctctattttatttttcttgaaaacattcccttttttaggaaccaaatgatatttgagtttttgttattccttttgcagattgggatgtgttttgggggcaggggttagttcttcaggtcggcagacccagagcacttgataaagaactgtatttaatcggtagtgttggggccgggacgggcttggctccctctctgccatactgagcctgaggtatttcatatctcctgctgttccatcccagcttgaattggtgccacaagcttccaagttggcattttttctagaacctgatcgtccactagcccagagtgtgtgtgttcaacccccacaccaggtggtggtaggcggtgtgactgcacagcgaggtgccggatctgtgagcaggccgactccactcccacgccgcaggtaggtttctccagtgcgctcttgctgggaggtccggatcgttcctgcagggaagcggcagcacacggagaccacttggttgaattctgttggaactctactcaaatctaggggcgtcttctttggacccacaatgggggcaagccttaataatatggaagggagtttgggctttagagatccctttataaaagctctgggggctgagccctgagaattcagtgacaacaggaccaacctgcgctgcctttgactacaagtgggccgtgcagctggttcctctcgagcgagtgtccctaaataggagtttacaagatgtctgggggtaaaagcactgtgcttttcagtggtggctgcgtgaaagggagcgacactcagctgtgtgttcctgggcttgtgtggtacttagaacctcagttctattacgttatagtcagacatttttttgacagtatgagacagactgcaggatgaaaatatttgtcaaaatcttaactgaatgtttactggaagtacttgagattccatttgagagttgtattgttaataatttcatgtcagtgaactgatatctgatgtttatgatatggtgtctttttc

SEQ ID NO: 185895 - DNA, 1334 bp, Homo Sapiens
ttggggacaccatcttagcccaaaccctgggcctggcctactctgaagtcattgaaactttgccagatggcacagagagactgagcagctctgctgagttcacaggtatgacccggcaggatgcttttctagccctgactcagaaagcccgggggaagagagtgggtggagacgtgacaagtgataaactgaaagactggctgatttcacggcagcggtactggggcacaccaatccccattgtccactgcccagtctgtggccccacacctgtgcccctggaggacttgcctgtgaccctgcccaacatcgcgtctttcactggcaagggaggccccccactggccatggcttcagagtgggtgaactgctcctgcccaaggtgcaagggagcagccaagagagagacagacacgatggatacctttgttgattctgcttggtactacttcagatacactgaccctcataatccacacagcccttttaacacagcagtggccgattactggatgcctgtggatttgtacattggagggaaagaacatgccgtcatgcacttgttctatgcaagattctttagtcatttttgccatgatcaaaaaatggttaaacatagggagccttttcataagctgctggcccaaggccttatcaaggggcagacattccgcctaccatctggacagtatctacagagagaggaagtggatctcacaggttccgttcctgttcatgcaaaaacgaaagagaagttagaggtgacgtgggagaagatgagtaagtccaaacacaacggggtggacccagaggaagttgtggagcagtatgggatcgacacgattcggctctacatcctttttgctgcccctcctgagaaggatatcttgtgggatgtgaaaactgatgctctccctggggtgctgagatggcaacaacgactgtggaccttgacaactcggtttattgaggccagggcttctgggaagtctccccagcctcagctgctgagtaacaaggagaaagccgaggccaggaagctctgggagtacaagaactccgtcatctctcaggtgaccacccatttcacagaggacttctcactgaattctgcaatttctcagctgatgggactcagcaatgccctctcgcaagcctctcagagcgtcattctccacagccccgagtttgaggatgctttgtgtgccctgatggtgatggctgctccactggcccctcatgtaacctcagagatctgggcaggcctggcgctggtgccgaggaagctctgtgcccactacacttgggatgccagtgtgctgctccaggcatgg

SEQ ID NO: 185896 - DNA, 963 bp, Homo Sapiens
aggagcagaaagcaaaccctgactgtccacactccctgggactggtccccttctttgccgctattcaccccccagcccatggtggcttcaccccatggcaccagccagtgactgcttgcccctccctcccatagtgacacttttgtggggtctgcaggtctcgggtccagttcatgcagacaggccctgtcccccacaggggcccaaggcccaggctaaactacagcccagccatcccaccccaggccgtgaatgccttctccaggagggcaaccaaggatggtgccacatgtgagcacaagcaaaacccggagccaaggcgagtcctgctgggtgcacgtttatcccagccaccgcctccagggcggccgcacaggccctgggcatcaatccagcagggctcccgactcactccctggagaccagctccccaaccacccggccctgatggcatcccgctgcggccaggtgtcctctcagccgaggtccttgtcactgcctagctgcgtccgcctgccacaccagctcacccgagatgtaggtggcctggacgtgaagggagtcgtcgagcaccacgaagtctgcgtcagcaccaaagtccagggtccccttactcttctccagccccagcaactgggcggggtgcagggatgcagcctccagggccgactccatgctgcagcctgtggcctgcaggaagtgccggacacagacgtccattggggctatgctgccactcagcgtcttggtgccttgagagcagagagggcaggctgccacgtaggccgtcagaccgtccacttccacttcctgctgtcccagcgtgtgccggccgttgcccaggcccaaggcagggatggcatcggtgaccagcaccagcccctggggatgggcacggtgggcgatccgcagggcggcggggttggtgtgcgtgccatctgcaatccaacttttttgtacaaa

SEQ ID NO: 185897 - DNA, 1107 bp, Homo Sapiens
  misc_feature (200)..(208): n is a, c, g, or t
  misc_feature (327)..(348): n is a, c, g, or t
tcactttgtgctcaacaggaagcaatcagaaacacataccagaagccaaatctacgccaacaattctcagacaacgaaaaagcaaagagcaaaatcaacatgatttggaaaaggaatttttaaaccttaaattaaaaaaagaaaacattttcacacagaagaattatctgctttgagaaataaagaaattagaaggtgtnnnnnnnnntttttcaaaccccaaataatgataaaaatagatgtatcctctgtaaaaatctggactaaactattcagtcattcatggttattcagtattcagagcatgaagtgaaacaccaaagtatnnnnnnnnnnnnnnnnnnnnnnggaatccgagatactgtcgtttgttgccggcctcggcgtggacgccccgaccatgggccacgcagggcgtctgcctcctcccaccttccgcagacctcaggccttcaaagctcttccttggtcctgctcagttttgtggcatgttcttctataaacttgctcaaatgctccagatctctgtctccaccctcaaatttaactgggttctttttgtccccactgggggcgaagtagatggtggggaagccctccaccttatagcggtcgctggggacgtcgttggcagtggcgtccatcttggcgatgaccaggcccttttggcccttgtacttcttggccaggctgttgtacacgggctctagctgcttgcagtgcccgcaccatggcgcgtagaactcgatgaggacgtccttcttggggtccatcacaatggagtcaaaggtctttcccaccacgaccttgacgggtcccttgttgttcttgggcattggctgggatttgatgactggcttcagttttccttttttgaaagcagtgacaaactcgcggagggtgtcagagtcaaactcctctggctccatggcgaacttcttcccactctcgtccaggatggcggcattgacatcctccccactctcgctgagccccaggtccttcacctccccagcatagtcctcttcgtccgcaatggcaaaggtgtactcagggaagtccttggccacctataggactttgctccccaacttttttgtacaaagt

SEQ ID NO: 185898 - DNA, 1123 bp, Homo Sapiens
ctttgtacaaaaaagttggctgtcggccagaccccgagttctcggtgcgctcagcggccgccgacgctaggaggccgcgctccgcccccgctaccatgaggccccggaaagccttcctgctcctgctgctcttggggctggtgcagctgctggccgtggcgggtgccgagggcccggacgaggattcttctaacagagaaaatgccattgaggatgaagaggaggaggaggaggaagatgatgatgaggaagaagacgacttggaagttaaggaagaaaatggagtcttggtcctaaatgatgcaaactttgataattttgtggctgacaaagacacagtgctgctggagttttatgctccatggtgtggacattgcaagcagtttgctccggaatatgaaaaaattgccaacatattaaaggataaagatcctcccattcctgttgccaagatcgatgcaacctcagcgtctgtgctggccagcaggtttgatgtgagtggctaccccaccatcaagatccttaagaaggggcaggctgtagactacgagggctccagaacccaggaagaaattgttgccaaggtcagagaagtctcccagcccgactggacgcctccaccagaagtcacgcttgtgttgaccaaagagaactttgatgaagttgtgaatgatgcagatatcattctggtggagttttatgccccatggtgtggacactgcaagaaacttgcccccgagtatgagaaggccgccaaggagctcagcaagcgttctcctccaattcccctggcaaaggtcgacgccaccgcagaaacagacctggccaagaggtttgatgtctctggctatcccaccctgaaaattttccgcaaaggaaggccttatgactacaacggcccacgagaaaaatatggaatcgttgattacatgatcgagcagtccgggcctccctccaaggagattctgaccctgaagcaatccaggagttcctgaagatggagacgatgtcatcatcatcggggtctttaaggggagagtgacccagcctaccagcaataccaggatgccgctacaacctgagagaagattacaaatttcaccacactttcagcacagaaata

SEQ ID NO: 185899 - DNA, 1936 bp, Homo Sapiens
  misc_feature (1794)..(1818): n is a, c, g, or t
actttgtacaaaaaagttgggtgtggacattgcaagcagtttgctccggaatatgaaaaaattgccaacatattaaaggataaagatcctcccattcctgttgccaagatcgatgcaacctcagcgtctgtgctggccagcaggtttgatgtgagtggctaccccaccatcaagatccttaagaaggggcaggctgtagactacgagggctccagaacccaggaagaaattgttgccaaggtcagagaagtctcccagcccgactggacgcctccaccagaagtcacgcttgtgttgaccaaagagaactttgatgaagttgtgaatgatgcagatatcattctggtggagttttatgccccatggtgtggacactgcaagaaacttgcccccgagtatgagaaggccgccaaggagctcagcaagcgttctcctccaattcccctggcaaaggtcgacgccaccgcagaaacagacctggccaagaggtttgatgtctctggctatcccaccctgaaaattttccgcaaaggaaggccttatgactacaacggcccacgagaaaaatatggaatcgttgattacatgatcgagcagtccgggcctccctccaaggagattctgaccctgaagcaggtccaggagttcctgaaggatggagacgatgtcatcatcatcggggtctttaagggggagagtgacccagcctaccagcaataccaggatgccgctaacaacctgagagaagattacaaatttcaccacactttcagcacagaaatagcaaagttcttgaaagtctcccaggggcagttggttgtaatgcagcctgagaaattccagtccaagtatgagccccggagccacatgatggacgtccagggctccacccaggactcggccatcaaggacttcgtgctgaagtacgccctgcccctggttggccaccgcaaggtgtcaaacgatgctaagcgctacaccaggcgccccctggtggtcgtctactacagtgtggacttcagctttgattacagagctgcaactcagttttggcggagcaaagtcctagaggtggccaaggacttccctgagtacacctttgccattgcggacgaagaggactatgctggggaggtgaaggacctggggctcagcgagagtggggaggatgtcaatgccgccatcctggacgagagtgggaagaagttcgccatggagccagaggagtttgactctgacaccctccgcgagtttgtcactgctttcaaaaaaggaaaactgaagccagtcatcaaatcccagccagtgcccaagaacaacaagggacccgtcaaggtcgtggtgggaaagacctttgactccattgtgatggaccccaagaaggacgtcctcatcgagttctacgcgccatggtgcgggcactgcaagcagctagagcccgtgtacaacagcctggccaagaagtacaagggccaaaagggcctggtcatcgccaagatggacgccactgccaacgacgtccccagcgaccgctataaggtggagggcttccccaccatctacttcgcccccagtggggacaaaaagaacccagttaaatttgagggtggagacagagatctggagcatttgagcaagtttatagaagaacatgccacaaaactgagcaggaccaaggaagagctttgaaggcctgaggtctgcggaaggtgggaggaggcagacgccctgcgtggcccatggtcggggcgtccacgccgaggccggcaacaaacgacagtatctcggattccnnnnnnnnnnnnnnnnnnnnnnnnnataatttggtgtttcacttcatgctctgaatactgataacccatgaatgactgaatagttaatccaaatttttacgaaggatacatcctattttaatcattatttgggggtttgaaaa

SEQ ID NO: 185900 - DNA, 2282 bp, Homo Sapiens
  misc_feature (430)..(439): n is a, c, g, or t
  misc_feature (442)..(484): n is a, c, g, or t
ttggcgaaaagccgtccaagggctccggctaccgctgcattcgcatcaaccacaagatggaccccatcatcagcagggtggccagccagatcggactcagccagccccagctgcaccagctgctgcccagcgagctgaccctgtgggtggacccctatgaggtgtcctaccgcattggggaggacggctccatctgcgtcttgtacgaggaggccccactggccgcctcctgtgggctcctcacctgcaagaaccaagtgctgctgggccggagcagcccctccaagaactacgtgatggcagtctccagctaggcccttccgcccccgccctgggcgccgccgtgctcatgctgccgtgacaacaggccaccacatacctcaacctggggaactgtatttttaaatgaagagctatttatatatattannnnnnnnnnaannnnnnnnnnnnnnnnnnnnnnnnnnnnnnnnnnnnnnnnnnntccttcaagggagctgcttggaagtggcctccccaggtgcctttggagagaactgttgcgtgcttgagtctgtgagccagtgtctgcctataggagggggagctgttagggggtagacctagccaaggagaagtgggagacgtttggctagcaccccaggaagatgtgagagggagcaagcaaggttagcaactgtgaacagagaggtcgggatttgccctgggggaggaagagaggccaagttcagagctctctgtctcccccagccagacacctgcatccctggctcctctattactcaggggcattcatgcctggacttaaacaatactatgttatcttttcttttatttttctaatgaggtcctgggcagagagtgaaaaggcctctcctgattcctactgtcctaagctgcttttcttgaaatcatgacttgtttctaattctaccctcaggggcctgtagatgttgctttccagccaggaatctaaagctttgggttttctgagggggggaggagggaactggaggttattggggttaggatggaagggaactctgcacaaaacctttgctttgctagtgctgctttgtgtgtatgtgtggcaaataatttgggggtgatttgcaatgaaattttgggacccaaagagtatccactggggatgttttttggccaaaactcttccttttggaaccacatgaaagtcttgatgctgctgccatgatccctttgagaggtggctcaaaagctacagggaactccaggtcctttattactgccttcttttcaaaagcacaactctcctctaaccctcccctcccccttcccttctggtcgggtcatagagctaccgtattttctaggacaagagttctcagtcactgtgcaatatgccccctgggtcccaggagggtctggaggaaaactggctatcagaacctcctgatgccctggtgggcttagggaaccatctctcctgctctccttgggatgatggctggctagtcagccttgcatgtattccttggctgaatgggagagtgccccatgttctgcaagactacttggtattcttgtagggccgacactaaataaaagccaaaccttgggcactgttttttctccctggtgctcagagcacctgtgggaaaggttgctgtctgtctcagtacaatccaaatttgtcgtagacttgtgcaatatatactgttgtgggttggagaaaagtggaaagctacactgggaagaaactcccttccttcaatttctcagtgacattgatgaggggtcctcaaaagacctcgagtttcccaaaccgaatcaccttaagaaggacagggctagggcatttggccaggatggccaccctcctgctgttgccccttagtgaggaatcttcaccccacttcctctacccccaggttctcctccccacagccagtcccctttcctggatttctaaactgctcaattttgactcaaaggtgctatttaccaaacactctccctacccattcctgccagctctgcctccttttcaactctccacattttgtattgccttcccagacctgcttccagtctttattgctttaaagttcactttgggcccacagacccaagagctaattttctggtttgtgggttgaaacaaagctgtgaatcactgcaggctgtgttcttgcatcttgtctgcaaacagggtccctgcctttttagaagcagcctcatggtctcatgcttaatcttgtctctcttctcttctttatgatgttcactttaaaaacaacaaa

SEQ ID NO: 185901 - DNA, 870 bp, Homo Sapiens
  misc_feature (665)..(718): n is a, c, g, or t
ttggggtaacgctgtcttgtggacccgcacttcccacccgagacctctcactgagcccgagccgcgcgcgacatgagccacgggaagggaaccgacatgctcccggagatcgccgccgccgtgggcttcctctccagcctcctgaggacccggggctgcgtgagcgagcagaggcttaaggtcttcagcggggcgctccaggaggcactcacagagcactacaaacaccactggtttcccgaaaagccgtccaagggctccggctaccgctgcattcgcatcaaccacaagatggaccccatcatcagcagggtggccagccagatcggactcagccagccccagctgcaccagctgctgcccagcgagctgaccctgtgggtggacccctatgaggtgtcctaccgcattggggaggacggctccatctgcgtcttgtacgaggaggccccactggccgcctcctgtgggctcctcacctgcaagaaccaagtgctgctgggccggagcagcccctccaagaactacgtgatggcagtctccagctaggcccttccgcccccgccctgggcgccgccgtgctcatgctgccgtgacaacaggccaccacatacctcaacctggggaactgtatttttaaatgaagagctatttatatatattannnnnnnnnnnnnnnnnnnnnnnnnnnnnnnnnnnnnnnnnnnnnnnnnnnnnntccttcaagggagctgcttggaagtggcctccccaggtgcctttggagagaactgttgcgtgcttgagtctgtgagccagtgtctgcctataggagggggagctgttatggggtagacctagccaacgagaagtgggagacgtttggctagc

SEQ ID NO: 185902 - DNA, 964 bp, Homo Sapiens
ttgggcctcttctgcggcgattgaacagccgagctttgcggccgggatcgcggaaagtgatggctgtcgtcccggcgtctctctcaggacaggacgtgggatcatttgcatatcttacaattaaagacagaataccacagatcttaactaaggttattgatacattgcatcgacataaaagtgaattttttgagaaacacggagaggaaggcgtggaagctgaaaagaaagctatctctctcctttctaaattacggaatgaattgcaaacagataaaccatttatccccttggttgagaaatttgttgatactgatatatggaatcagtacctagaatatcaacagagtcttttaaatgaaagtgatggaaaatcaagatggttctactcaccgtggttgttggtagaatgttacatgtatcgaagaattcatgaagcaattatccagagtccaccaatcgattactttgatgtatttaaagaatcaaaagagcaaaatttctatgggtcacaggaatccatcattgctttatgtactcacctgcaacaattgataagaactattgaagacctagatgaaaatcagctgaaagatgagttttttaaacttctgcagatttcactgtggggaaataagtgtgatctgtctctctcaggtggagaaagtagttctcagaataccaatgtactaaattcattggaagacctaaaacctttcattttattgaatgatatggaacatctttggtcattgcttagcaattgcaagaaaacaagagaaaaagcttctgctactagagtgtatattgttctcgataattctggatttgagcttgttacagatttaatattagccgacttcttgttgtcctctgaactggctactgaggttcatttttatggaaaaacaattccatggtttgtttctgatactactatacatgattttaattggttaattga

SEQ ID NO: 185903 - DNA, 2085 bp, Homo Sapiens
ctttgtacaaaaaagttggttgagaaatttgttgatactgatatatggaatcagtacctagaatatcaacagagtcttttaaatgaaagtgatggaaaatcaagatggttctactcaccgtggttgttggtagaatgttacatgtatcgaagaattcatgaagcaattatccagagtccaccaatcgattactttgatgtatttaaagaatcaaaagagcaaaatttctatgggtcacaggaatccatcattgctttatgtactcacctgcaacaattgataagaactattgaagacctagatgaaaatcagctgaaagatgagttttttaaacttctgcagatttcactgtggggaaataagtgtgatctgtctctctcaggtggagaaagtagttctcagaataccaatgtactaaattcattggaagacctaaaacctttcattttattgaatgatatggaacatctttggtcattgcttagcaattgcaagaaaacaagagaaaaagcttctgctactagagtgtatattgttctcgataattctggatttgagcttgttacagatttaatattagccgacttcttgttgtcctctgaactggctactgaggttcatttttatggaaaaacaattccatggtttgtttctgatactactatacatgattttaattggttaattgaacaggtaaaacacagtaatcataagtggatgtccaagtgtggggctgactgggaagagtatattaaaatgggtaaatgggtttaccataatcatatattttggactctgcctcatgagtactgtgcaatgcctcaggttgcacctgacttatatgctgaactacagaaggcacatttaattttattcaagggtgatttgaattacaggaagttgacaggtgacagaaaatgggagttttctgttccatttcatcaggctctgaatggcttccatcctgcaccactctgtaccataagaacattaaaagctgaaattcaggttggtctgcagcctgggcaaggggaacagctcctggcctctgagcccagctggtggaccactggaaaatatggaatatttcagtacgatggtcccctttgacttgatttaggagctctcagttgcatagaaagatctggtgagcaccttttcatccccagaaaaggagcacgtgaattgagtcgcctggcggctctgtacgcgctcagggaagcttagcttcttggtgcccatctacgtgcactggatgatttttcttttgaacattttgccccactacactgttttggggatagctgggttaagcaagttaaagatatttacatttatattggaattttagcaactttttttcaggttaaatatataatttcaagtgcttttaatgaacttatttttaattggctagggagcaaaaaataagtgagttctgcttttagttagttaaccttgttcttttcttaaatagtacactgcatggtatttaatattccaggaagcatgggattttattttgcttgattttgggcacatgaaataatagctctaggaaaatgcgcatcttaatgactctttgtaaagagaggcatttcttacaactgtgatgtttgcttacataaaagttacctcataagttaattctaacttttattcttgaattttatttcatttcaatagcttgtttcatttgcacgcctttgtattttgattgacctgtagaatggatgttaggaaactcaaaattgaacacagtgaaacaaatggtatttgaagaaatgtaatatcttttatattctatttatgatatccataatcaaatgagattattttaccacataaatgttttaaatatcagatttttagtttgcagttttaggaaaatgctttagatagaaaaggttcttatgcattgaatttggagtactaccaacaatgaatgaatttattttttatattcttacacattttattggtcattgtcacagatagtaaatactaaaaatttcaggtcagtttgttttgaaactgaaattggaaataaatctggaaatgttttgttgcactaaaataataaaa

SEQ ID NO: 185904 - DNA, 1581 bp, Homo Sapiens
  misc_feature (1467)..(1485): n is a, c, g, or t
gagcaatgcttttttataatgccaactttgtacaaaaaagttggcgctctgtatattggcatcagggggcagctgaatatcttttgaattactcgaaggtaaagccagatgccagaatgaaggtgtagccagtgtttcccatatgcccctggagccccacttattgaggccagcagaataggtgcagagatgaagtgagcttagagatgttgcaaatgctctttatcccttcagctctctgatctgctctttcttcatgatacttagtctgcagggcatattaagatcatcccagaggttcaggcagttcctgtcatctctgaaaagactgggggatatgaaatcttccccctaccccacttaatgcgttggatatgatttttcaaagaatgcttcatgcccaaaataccagcctgtttagcagtgttacactgtttgatctgcgggcacttgttgcattgcctggcacccaatattcagggtccatgactaagactggtcttctcagatgccctgcttaaatcaggggcacttcaggctccacaggcgtcatgttggactgagacctaactcactggactcagaggaggaatcgtggaaaacaagagcaaaactaccccacacccctatttcatgtctgaaataaccctgtttcataccagttgcaaagcttgtggggagcggtcccacaaagcactttcttaaaccttgagaatctccaagagaaaaatatttggggaaggagggaggaaatatgtcccttgcacaccacccctgaagcacatggcagtaggaaacagcataggattgtatgtgggaggtggataggtcggtgatgtgtggagcggaaaagcaggttggtaaagttcccttcttgggacttattcctggagtcagtggatacaagtagtgcagaaggttcacactgcaaatagtgttctcatctcaaagcaaactatcattccagaaggaaaagtgtgtcagggcaagcagacaacacaatttcctatcagaatatgtccctcaacccccgaaacaaggcttctcgcagcctccccaccagtgatggataacagctcctattctcagctgacctgactgagccaacccatgaactcttcactccttggggaagccacctcccatcacacccctgagcagagttagggaggaattctacttcccataaaaggacctctcctgagaggcaaaacctgttgcctccaccacggcttccctcttggctcattccaagcttggccaaattggggaagtgggatggaggttgccctgcatcccccctcctctgcctgagtgtgtctttgtaatgtcagctggcatcatacaaagagcaggagaagcaaacacccagaactcttttgctggtcagagattccctgagtgtctgttctcacccaagcctgctctgtgtctgtgttgtgaagcttgagactctggaaagaaatnnnnnnnnnnnnnnnnnnnaaatgttgccctaagaatgcttctcattcctctgttcttattgggtcctgtttttcgggagggtgggggttgggggaagcttgaccttgtgtcttc

SEQ ID NO: 185905 - DNA, 1241 bp, Homo Sapiens
actttgtacaaaaaagttgggtgctcgcctttacatgtgctcctttcttgggaacccacggctgggggaagtttctcaggcagcctgggtgggcggtggatggggagtcgtgggccgagaggaaccgggcccgggaagcgccgtcgtcgtcgtcgccggtcgcgttcccccggagaggcctgagaagctcgggccgcgggcctcgctgcccgccagcccgcggacaggcccgggcgcgcctggcctgcctttgtataggcccgtctgaacgtgggagcgcagcccgcctgacggctgagcccgaggcccgcaaccctgcggcgtctaccctcctccggcgcggcccctcatcccggcgagcacggcggcggtgtgggccatggattaagaaggaggcggcgtgggaggaggaagatggcggccggcaagagcggcggtagcgcaggggagattacttttctggaagctttggctagatcagagtctaagagagatggaggttttaaaaataattggagctttgatcatgaagaagaaagtgaaggagatacagataaagatgggacaaatctgctcagtgtggatgaagatgaggattctgaaacctcaaaaggaaaaaagttaaatcgtcgatctgaaattgttgctaatagctctggtgaattcatcttgaagacatatgtaagacgaaacaagtctgaaagttttaaaactttgaaaggcaacccaattggacttaacatgttgagcaacaataagaaattgagtgaaaatacgcaaaatacgtcattatgttctggaactgtagttcatggtagacgttttcatcatgctcatgcacagataccagtagtaaaaacagcagcccaaaggaaagaatacccacctcatgtccaaaaagttgaaattaatcctgtaaggttaagtcggctccaaggtgttgaacgtataatgaagaaaacagaagagtccgaatcacaagtggagcctgaaattaagaggaaagtacaacagaaacggcactgtagtacctatcagcctactcctcctctatctcctgcttcaaaaaaatgtttaacccatttagaggatttgcaaagaaattgcagacaagctattactttgaatgagtctactggaccattattaagaacgtcaattcatcagaattctggaggacagaagtcacaaacacaggattaacaaccagaagttttatggcaacatgtggaaaaggttcc

SEQ ID NO: 185906 - DNA, 3379 bp, Homo Sapiens
  misc_feature (1528)..(1566): n is a, c, g, or t
ttgggtgtatttgaagtttaagagaggaatttaatactttacaacaaacatactttatagcccctgacataatgtaatcatactacaagactaaatacttgttccacgattgctgatcttgtacgtaacgttttttgttctgattttggaattgtcctcaagacaatctcattcaacatttattcctttatttattaatttgtttttaaacaactaaaaaatacagtaaaattttacaaattgagtttcatttattggtatagttttgttattttatagtatcactttttatatggcaaagaagctatgatttgcttttaataggcttattgtaagtatgccattaactttttcattttgaaaactgtatttcctgttagaataaaactacataaatttcttttttaggaaagaatacccacctcatgtccaaaaagttgaaattaatcctgtaaggttaagtcggctccaaggtgttgaacgtataatgaagaaaacagaagagtccgaatcacaagtggagcctgaaattaagaggaaagtacaacagaaacggcactgtagtacctatcagcctactcctcctctatctcctgcttcaaaaaaatgtttaacccatttagaggatttgcaaagaaattgcagacaagctattactttgaatgagtctactggaccattattaagaacgtcaattcatcagaattctggaggacagaagtcacaaaacacaggattaacaaccaagaagttttatggcaacaatgtggaaaaggttccaattgatattattgtgaattgtgatgacagtaaacacacttatttacagactaatggaaaagtcattttacctggggcaaaaatacccaaaatcacaaacttgaaagaaaggaaaacaagtttgtcagacctaaatgatccaatcattttgtccagtgatgatgatgatgacaacgacagaactaacagaagagaaagcatatctcctcagcctgctgattcagcatgttcttcccctgcaccatccactggaaaagtagaagcagcgctaaatgaaaatacttgcagagcagagcgtgaactacgaagcattccagaagactcagagttaaatacagttacattgccaagaaaagcaagaatgaaagaccagtttggcaattctattatcaacacacctctgaaacgtcgtaaagtgttttctcaagaacctccagatgctttagctttaagctgccaaagttcctttgacagtgtcattttaaactgtcgaagtatacgagtaggaacactcttccggctgttaatagagcctgtaattttttgtttagattttatcaagatacagctagacgaaccagaccatgatcctgtagagattatattaaatacctctgatctaactaaatgtgaatggtgtaatgtccgaaaattacctgtagtgtttcttcaagcaattccagcagtttatcaaaagctgagcatccaactgcaaatgaataaggaggataaagtttggaatgattgnnnnnnnnnnnnnnnnnnnnnnnnnnnnnnnnnnnnnnntataattttaatttttcaaaatggccttgatcctccggcaaatatggtatttgaaagtatcattaatgaaattggtataaagaataacatctccaatttttttgcgaaaattccctttgaagaagctaatggcagacttgttgcctgtacaagaacctatgaagagagcatcaaaggaagttgtgggcaaaaggaaaacaaaattaaaactgtatcatttgaatctaaaatacaacttagaagcaaacaagaatttcagttttttgatgaagaagaagaaactggagaaaaccacaccatcttcattggcccagtagaaaagttgatagtatatccaccacctccagctaagggaggcatctctgttaccaatgaggacctgcactgtctaaatgaaggagaatttttaaatgatgttattatagacttttatttgaaatacttggtgcttgaaaaactgaagaaggaagacgctgaccgaattcatatattcagttcttttttctataaacgccttaatcagagagagaggagaaatcatgaaacaactaatctgtcaatacagcaaaaacggcatgggagagtaaaaacatggacccggcacgtagatatttttgagaaggattttatttttgtaccccttaatgaagctgcacactggtttttggctgttgtttgtttccccggtttggaaaaaccaaagtatgaacctaatcctcattaccatgaaaatgctgtcatacagaaatgttcaactgtagaggacagttgtatttcttcttcagccagtgaaatggagagttgttcacaaaactcttctgccaagcctgtaattaagaagatgctaaacaaaaaacattgcatagctgtaattgattccaatcctgggcaggaagaaagtgaccctcgttataagagaaacatatgcagtgtaaaatacagtgtgaaaaaaataaatcatactgcgagtgaaaatgaagaattcaataaaggagaatctacatcccagaaagttgctgataggactaaaagtgagaatggcctacagaatgaaagtttaagttccacacatcatacagatggcttaagcaaaatcagactaaactatagcgatgaatcacctgaagctggtaaaatgcttgaagatgaactcgtcgacttctcagaagatcaggataaccaggatgatagcagtgacgatggattcctcgctgatgacaactgcagttcagaaataggacagtggcatttaaagcctactatctgtaaacaaccttgtatcctacttatggactcactccgaggcccttctcggtcaaatgttgtcaaaattttaagagagtatttagaagtggaatgggaagttaaaaaaggaagcaaaagaagtttttccaaagatgttatgaagggctctaatccaaaagtaccacagcaaaacaacttcagtgactgtggtgtatatgtattgcagtatgtagagagcttttttgagaatccaattctcagttttgaactacctatgaatttggcaaactggtttcctccaccaagaatgagaacaaaaagagaagaaatccgaaacataattctgaagctacaggaagatcagagcaaagagaaaagaaagcataaggacacttactcaacagaagcacctttaggcgaaggaacagaacaatatgtcaatagtatctcagattgaccattttctgttacttgtcatttctactttcagaaactaaaatgactttcaaatttggggtatagacaataaggacctgacgtgctcactactcagtgatttggaaatttt

SEQ ID NO: 185907 - DNA, 1004 bp, Homo Sapiens
gcaggaaccccagcacacgctggcagcgcgcacagcacttctctttgtgctcccagtcggaattattcgttcctttccaccggagatgctgcaggtgtgttttcagtttccgtgtcctatcctcctctgtgttttgaaccgcatggtctcggtacaggactcggagaatggcctcgcgttctaactccttgagagcactcagatttatttcttgggccatttcttctccgttttcgttgacccaggttggaagagcttcactgcatggaccaagcgctcacgccctgcagatgagcggcggaggccagctgcagccagccttgtttaaagagctccctttcttatttcactggcaactgttttgcttgtggttcttttttcctttttaactgtgtcatactccttagaagaagaaagcctcaagaagttctgcgtttgtcggagttacggctcgcagagcctcgtgctacccggggggtgttttcaccgggttctgcagcagctgctgacatccatctaagacaaaagcatatctcttttctgaggtttcaccagagattgttataaattatccacagctgcaagcagataatttctgcaaagcagaagtaattttcaagccaaggaaatttagaaatagcaataaaaagagtatcagtgactcatagaagctaaccttccatttaagatgtttccaggtcagcaggaaccatcatgaaaagctcagcccgttcaatacctggctgggctggtacctgactatgccagcaggggcaacgcctcttccctccttagatccaggttccagatgaacaggcagaactggcatccctcagtgccccaaggctctgagtctctgagagaggacaaagttgaacaggcgctttctctgaaagatcactgcaattcaccgctgattccgagtattctttctcattcggggagcctggaaaacttaactccccaaagggaagtttcgttcagatagctaaagcatgccccaa

SEQ ID NO: 185908 - DNA, 358 bp, Homo Sapiens
ctttgtacaaaaaagttggaaaattatggcctataaaaaaagcaggcttctatgaaagactcaaaaagctgcctgggaggcagatggaacttgagcctgtcaagaggcaaaggaatccatgtagtagatatcctctgcttaaaaactcactacggaggagaattaagtcctacttttaaagaatttctttataaaatttactgtctaagattaatagcattcgaagatccccagacttcatagaatactcagggaaagcatttaaagggtgatgtacacatgtatcctttcacacatttgccttgacaaacttcgttcactcacatctttttcagtgacgttttttgtggggggcggg

SEQ ID NO: 185909 - DNA, 1401 bp, Homo Sapiens
ttggctcaaaaccaccatcaccaatagcgctactaaagacagtgctttggagcttccaagctgatagattatcctttctccccaccctcagatttctccagtgtctctggcacttatagtccatgtttgcaagaaatattttattatagtgctctgaaacaaatttataaagtttgcaagagaagttttaaaaaagcaagctcagcaatatttgggggcttttaaagctgatgatgcagctgacctactggagacaaaggcagtgggagggcccttactggtataaataaataggagtctctggtactgcaaacccacagcctggctcagagctcaagtctgaactctacctccagacagaatgaagttcatctcgacatctctgcttctcatgctgctggtcagcagcctctctccagtccaaggtgttctggaggtctattacacaagcttgaggtgtagatgtgtccaagagagctcagtctttatccctagacgcttcattgatcgaattcaaatcttgccccgtgggaatggttgtccaagaaaagaaatcatagtctggaagaagaacaagtcaattgtgtgtgtggaccctcaagctgaatggatacaaagaatgatggaagtattgagaaaaagaagttcttcaactctaccagttccagtgtttaagagaaagattccctgatgctgatatttccactaagaacacctgcattcttcccttatccctgctctggattttagttttgtgcttagttaaatcttttccaggaaaaagaacttccccatacaaataagcatgagactatgtaaaaataaccttgcagaagctgatggggcaaactcaagcttcttcactcacagcaccctatatacacttggagtttgcattcttattcatcagggaggaaagtttctttgaaaatagttattcagttataagtaatacaggattattttgattatatacttgttgtttaatgtttaaaatttcttagaaaacaatggaatgagaatttaagcctcaaatttgaacatgtggcttgaattaagaagaaaattatggcatatattaaaagcaggcttctatgaaagactcaaaaagctgcctgggaggcagatggaacttgagcctgtcaagaggcaaaggaatccatgtagtagatatcctctgcttaaaaactcactacggaggagaattaagtcctacttttaaagaatttctttataaaatttactgtctaagattaatagccattcgaaaatccccagacttcatagaataactcagggaaagcatttaaaggggtgatgtacacatggtaatccttttcaaacatttgcacttgacaaaacttctttccctcacatctttttttcatgggacttttattt

SEQ ID NO: 185910 - DNA, 1263 bp, Homo Sapiens
  misc_feature (111)..(194): n is a, c, g, or t
tgagaaggctcctttcaattgaatacaccagccaggctcaagagctgccaaacctcccctctcccttgcccaagatgaatctggttgagcctccctggcatatgcctcccnnnnnnnnnnnnnnnnnnnnnnnnnnnnnnnnnnnnnnnnnnnnnnnnnnnnnnnnnnnnnnnnnnnnnnnnnnnnnnnnnnnnctgctccctgtgaatggatcccaagaagaagccaagcctcaggtccgtgacttttctctcaccagcagcagccagaccccaggggccaccaaaagcaggcatgaagactccggggactaggtctcatcaggtgtggaggtggagagcagcatggggcccagcttgctgctgccttcagtcaccccaactacagtgactccgggggaccaggactccaccagccaagaggcagaggccacagtgctgccagctgcagggcttggggtagagttcgaggctcctcaggaagcaagcgaggaagccactgcaggagcagctggtttgtctggccagcacgaggaggtgccggccttgccttcattccctcaaaccacagctcccagtggggccgagcacccagatgaagatccccttggctctagaacctcagcctcttccccactggcccctggagacatggaactgacaccttcctctgctaccttgggacaagaagatctcaaccagcagctcctagaagggcaggcagctgaagctcaatccaggataccctgggattctacgcaggtgatctgcaaggactggagcaatctggctgggaaaaactacatcattctgaacatgacagagaacatagactgaggtgttccggcagcaccgggggccacagctcctggccctggtggaagaggtgctgccccgccatggcagtggccaccatggggcctggcacatctctctgagcaagcccagcgagaaggagcagcaccttctcatgacactggtgggcgagcagggggtggtgcccactcaagatgtcctttccatgctgggtgacatccgcaggagcctggaggagattggcatccagaactattccacaaccagcagctgccaggcgcgggccagccaggtgcgcagcgactacggcacgctcttcgtggtgctggtggtcattgggggccatctgcatcatcatcattgcgcttggcctgctctacaactgctggcagcgccggctgcccaagctcaagcacgtggtgagtgtggggacaggtggggctggggg

SEQ ID NO: 185911 - DNA, 1404 bp, Homo Sapiens
ttgggtgagagagaagctgggagagcagagaaaaggggccaccggtcgcccccccgcttccccgcacgcgctctccagccgcggccgcccgcctgccgcggtcaccccggcctctgcctctgtcccccagtgatcggatcaaggcgctgagcgaggccctgcctgcggggcggccatgcggcggtgacaggagcgcgaccgacacgcacgggcccctcgccccctctcgcctcccgtccgctcgccagctcccctcagccgaggctgctccgcggcggccgcagcccgcgcgcggcccacactcgcctcccctcggcacccccggccccggagctgcctggaggcggccgcactcggggatcatggcccaagttgcaatgtccaccctccccgttgaagatgaggagtcctcggagagcaggatggtggtgacattcctcatgtcagctctcgagtccatgtgtaaagaactggccaagtccaaagccgaagtggcctgcattgcagtgtatgaaacagacgtgtttgtcgtcggaactgaaagaggacgtgcttttgtcaataccagaaaggattttcaaaaagattttgtaaaatattgtgttgaagaagaagaaaaagctgcagagatgcataaaatgaaatctacaacccaggcaaatcggatgagtgtagatgctgtagaaattgaaacactcagaaaaacagttgaggactatttctgcttttgctatgggaaagctttaggcaaatccacagtggtacctgtaccatatgagaagatgctgcgagaccagtcggctgtggtagtgcaggggcttccggaaggtgttgcctttaaacaccccgagaactatgatcttgcaaccctgaaatggattttggagaacaaagcagggatttcattcatcattaagagaccttttttagagccaaagaagcatgtaggtggtcgtgtgatggtaacagatgctgacaggtcaatactatctccaggtggaagttgtggccccatcaaagtgaaaactgaacccacagaagattctggcatttccctggaaatggcagctgtgacagtaaaggaagaatcagaagatcctgattattatcaatataacattcaaggaagccaccattcttcagagggcaatgaaggcacagaaatggaagtaccagcagaagatgatgattattctccaccgtctaagagaccaaagccaatgagctaccgcagccaccagtcccggaacccgccaatgctgggaagcggaaagtgagggagtccaacttcgagaaatggaatgctcgcatcactgatctacgtaacaagttgagaattgtttgaaaggaaatatgctcaagccataaaagccaaaggtccgtgacgatcccgtaccctctttt

SEQ ID NO: 185912 - DNA, 2435 bp, Homo Sapiens
  misc_feature (2259)..(2271): n is a, c, g, or t
ttggcccaaataatagtatgttcaatgaggtatatgggaaaaacctgacatccagctccaaagcagaactcagtccctcaatggccccccaggaaacatctctgtattccctttttgaagggactccgtggtctccatcacttcctgccagttcagatcattcaacaccagccagccagtctcctcattcctctaacccaagcagcctacccagctctcctccaacacacaaccataattctgttccattctccaattttggacccattgggactccagataacagggatagaaggactgcagatcggtggaaaactgataagccagccatgggtgggtttggcattgattatctctcagcaacgtcatcctctgagagcagttggcatcaggccagcactccgagtggcacctggacaggccatggcccttccatggaggattcctctgctgtcctcatggaaagcctaaagtctatctggtccagttccatgatgcatcctggaccttctgctctggagcagctgttaatgcagcagaagcagaaacagcaacggggacaaggcaccatgaaccctccacactgaggccaaagtggcaacctgggaatgaaggctccataaaccatggcatgttgggtttgcaggactggcccacacagtcccctgcaggtggcagccctcttttctgtttctcgctgtcaagagggtgtaagtattccaccagcccgctgagtgtgcacgaaatgttcgcagtgcaacaaaaagaaaaatccatcaggaactctccgtccccccggggccttccggagggagagagagaggaactgctgtttatctcactcagttacttggtatcaccgcctctcaccttctccatcgtgcatgtccccagccacatgggaagtgaaagctgagaagggaaggcagatgggagaagccaatgggaacttctcagtccttttttcctctttggggaataaaataggaatccattaatgattgctttgctgactgagaatgtagttgaaattaaacatcttttattattattactctcagtagtaaaatatcacactgaattcttccatacacaggtgtgcttctagtcagtgtgtagcaaggaaagccccgttcactgctcctgtgagaggttggtggtgacaggatggggaaccgacctcttcagccagtggaaatgttccataagggagagttcaaggcctgtcagaaggctctggtaggccttcctctggccaggagactccagcagggaatgcccttcactctgtaggtgctcgagccccaatcgaggatacagtgtgggtggtggtgctgggctggactagcaggtagactgctgtaggatttcaaattacgtttttgattcctgtacattttacagtcgcacagcaagcagtctcacagaaggcaggctagtccattcacagcctgacacgttctaataggtagaagctttcagtgtggttattttttctttggttggtttttgtgcccccattctacttcccaccctcctgccccatctccatcccttcttttacccaatgctgtatgctagtaattgtttttattcctaatgtgtgcaacatcacatctccccaagaagcaacagcatggggtccagcagttggggcccaaaagacagtctgaagaggaaggaagcagcagtatctgcgtagcccacagagggcccaggcccctgcccagctgcagtctcccagcctccactttcagagtgaaattcaaggcagcacggacatgtgcccatcaggcacagaagaaaacacgacgtcgtccattttggaagagacgaaagaaaggaaaataaactctttgtatgatatttattaggaggaaagaggactgaaaatgttcttgtgtagaaacagaaggacagcatttctgttagtcatttcctggaaaagtaatattttaaggggaaattatggaaacaatctaattgttcaattgctgtgctagtggtagggtttattttctgggaggtctctcctttgtgtgtctgtatgtttgtgtacacacacgtgcccatctgctgtcccagaggggaggggttgtgtgtgcgagtgtatggagttagtgtggaacttaagagctggaagacagctgtagagcaaagcacatccaggagccccagttgtcactgcagtctgggcaaccccagcaatgaaaaggggtgagataacgctcattgctcttcagagagagtggttggagnnnnnnnnnnnnngtatgcttacattattgctctttaaatttgacatggtgttttgggttttgtttttttgaaaggtctgaaaaggtgaagccccctacccaatgggcaatatgaacccttttgtgcttctcttcagccccttccctgtgttcacctttctcttcccttcccaagcc

SEQ ID NO: 185913 - DNA, 1149 bp, Homo Sapiens
  misc_feature (166)..(175): n is a, c, g, or t
ttgggttgacctttattttcttaaataccagggcagttgtggctcattgtgcattttactgttggcccattcatttcgtttttggaaattatggttttgtattttcatgtttatttacattcatttttgtttattcagggaaagctgatctttttttcaaaccagnnnnnnnnnntgaactagatatgaagtagagttcattaaatatcttgctattgtcagagtttttaaaatatagacttaattttgtttttttaaattggaatacaataaagtactacctacatttgagtcagtcaccactcttattgtgcaggttaagtacaagttaactaaaaataaactgtcctctctggtgcaactcacaaccaagatcaagattaccttaaaatttatttgaattttttagatgttttggttgtcaaactgtaggaaacttcacaacatttaagtcttactctgtatgtaacaatccatcattcaccttcactactggtaataacatagagctgccattttccttttaccatgcatcatctctttacagtaggcctggcagatcattttttaaaaagattattcaactaccaatcagtaatgtttttaaacagtacatttgctttgaacttggaaaatgtgttcagaaagaaaaatggaattgaatttcatttatacactaattccttggattttgcacagttacctaacggttttagtctggagttaaattcagatgcatggaatcctgaaggaaaatggtagctttttaatctttttgtgtgtgtgtgagtcttttaaatcaagtactgattaactattaagtacaactttgagattttagttttaactcttcagaagccagtgtgaaatagaattggttattctcaaagactcaggataaactaaataagctatatatagagtacatttaaaatgtacaacacaaattggaaataaaataagttacaagataagtttacagggatatattgcttacaatttttaaaaggcagtttgttttttatgtgaatatgtttcttagtgaaattttacattcctttgttttggaagattggcgatatttgaagagttaaaaatagtacagaaatgtgaagtttggtatctctaaatgtgttgtacttgactttc

SEQ ID NO: 185914 - DNA, 1547 bp, Homo Sapiens
  misc_feature (1175)..(1237): n is a, c, g, or t
  misc_feature (1268)..(1277): n is a, c, g, or t
ttggattgactcttcagttttagtctttcttaatctaaatagctctatatgctgaagaaatagaaaacgtgcagtaagaacaaaccatctcggagattgaatatgaggacagcagaattcatttgagtgaatactttatctacctgaacattttgatgtacttagccttgttgatgtaaataataaggaataggatatatttgatcaaatcctaaaatcctaaaatttgaaagattgttagagaaaacctcccatccagtggatgaattttttcatagactttttgatagcagaaaatcctcccacttctgcttcagttcctctctgttcaggatgtaaatgtaagggttatgaggtctatgcacatgtgtttctgtatcagaagttacagttgtgcaaagcttcaacactggctttttctccacagattgctagtgcaactactgctccatcgatcccttcacatttgtctcctggtttacgagatgtggctcttcgttgtttagaacttcaacctcaggacagacctccatcaagagagctactgaagcatccagtctttcgtactacatggtagccaattatgcagatcaactacagtagaaacaggatgctcaacaagagaaaaaaaacttgtggggaaccacattgatattctactggccatgatgccactgaacagctatgaacgaggccagtggggaacccttacctaagtatgtgattgacaaatcatgatctgtacctaagctcagtatgcaaaagcccaaactagtgcagaaactgtaaactgtgcctttcaaagaactggccctaggtgaacaggaaaacaatgaagtttgcatgactaaattgcagaagcataattttatttttttggagcactttttcagcaatattagcggctgaggggctcaggatctattttaatatttcaattattcttccatttcatatagtgatcacaagcagggggttctgcaattccgttcaaattttttgtcactggctataaaatcagtatctgcctcttttaggtcagagtatgctatgagtagcaatacatacatatatttttaaaagttgatacttctttatgacccacagttgacctttattttcttaaataccagggcagttgtggctcattgtgcattttactgttggcccattcnnnnnnnnnnnnnnnnnnnnnnnnnnnnnnnnnnnnnnnnnnnnnnnnnnnnnnnnnnnnnnncagggaaagctgatctttttttcaaaccagnnnnnnnnnntgaactagatatgaagtagagttcattaaatatcttgctattgtcagagtttttaaaatatagacttaattttgtttttttaaattgggaatacaataaagtactacctacatttgagtcagtcaccactcttattgtgcaggttaagtacaagttaactaaaaataaactgtcctctctggtgcaactcacaccaagatcaagattacccttaaaatttatttgaattttttagatgttttggttgtcaaactgtaggaaacttcacaa

SEQ ID NO: 185915 - DNA, 2347 bp, Homo Sapiens
ttgggaacaaactgacgcagagtaagatctgggacgtggtggagaaggcagacatcggctgcaccccgggcagtgggaaggattacgccggtgtcttctccgacgcagggctgaccttcacgagcagcagtggccagcagaccgcccagaggggggaacttcagtgcccgcagccagccgcccgccgacgccgttccgtgcagctcacggagaagcgaatggacaaagtcggcaagtaccccaaggagctgcgcaagtgctgcgaggacggcatgcgggagaaccccatgaggttctcgtgccagcgccggacccgtttcatctccctgggcgaggcgtgcaagaaggtcttcctggactgctgcaactacatcacagagctgcggcggcagcacgcgcgggccagccacctgggcctggccaggagtaacctggatgaggacatcattgcagaagagaacatcgtttcccgaagtgagttcccagagagctggctgtggaacgttgaggacttgaaagagccaccgaaaaatggaatctctacgaagctcatgaatatatttttgaaagactccatcaccacgtgggagattctggctgtcagcatgtcggacaagaaagggatctgtgtggcagaccccttcgaggtcacagtaatgcaggacttcttcatcgacctgcggctaccctactctgttgttcgaaacgagcaggtggaaatccgagccgttctctacaattaccggcagaaccaagagctcaaggtgagggtggaactactccacaatccagccttctgcagcctggccaccaccaagaggcgtcaccagcagaccgtaaccatcccccccaagtcctcgttgtccgttccatatgtcatcgtgccgctaaagaccggcctgcaggaagtggaagtcaaggctgccgtctaccatcatttcatcagtgacggtgtcaggaagtccctgaaggtcgtgccggaaggaatcagaatgaacaaaactgtggctgttcgcaccctggatccagaacgcctgggccgtgaaggagtgcagaaagaggacatcccacctgcagacctcagtgaccaagtcccggacaccgagtctgagaccagaattctcctgcaagggaccccagtggcccagatgacagaggatgccgtcgacgcggaacggctgaagcacctcattgtgaccccctcgggctgcggggaacagaacatgatcggcatgacgcccacggtcatcgctgtgcattacctggatgaaacggagcagtgggagaagttcggcctagagaagcggcagggggccttggagctcatcaagaaggggtacacccagcagctggccttcagacaacccagctctgcctttgcggccttcgtgaaacgggcacccagcacctggctgaccgcctacgtggtcaaggtcttctctctggctgtcaacctcatcgccatcgactcccaagtcctctgcggggctgttaaatggctgatcctggagaagcagaagcccgacggggtcttccaggaggatgcgcccgtgatacaccaagaaatgattggtggattacggaacaacaacgagaaagacatggccctcacggcctttgttctcatctcgctgcaggaggctaaagatatttgcgaggagcaggtcaacagcctgccaggcagcatcactaaagcaggagacttccttgaagccaactacatgaacctacagagatcctacactgtggccattgctggctatgctctggcccagatgggcaggctgaaggggcctcttcttaacaaatttctgaccacagccaaagataagaaccgctgggaggaccctggtaagcagctctacaacgtggaggccacatcctatgccctcttggccctactgcagctaaaagactttgactttgtgcctcccgtcgtgcgttggctcaatgaacagagatactacggtggtggctatggctctacccaggccaccttcatggtgttccaagccttggctcaataccaaaaggacgcccctgaccaccaggaactgaaccttgatgtgtccctccaactgcccagccgcagctccaagatcacccaccgtatccactgggaatctgccagcctcctgcgatcagaagagaccaaggaaaatgagggtttcacagtcacagctgaaggaaaaggccaagcaccttgtcggtggtgacaatgtaccatgctaagccaaagatcaactcacctgtaataaattcgacctcaacgtcaccataaaaccagcaccggaaacagaaaagaggcctcacgatgccaagaacactatgatccttgagatctgta

SEQ ID NO: 185916 - DNA, 1223 bp, Homo Sapiens
taaaaaagccaactttgtacaaaaaagttggtggagaagcagaagcccgacggggtcttccaggaggatgcgcccgtgatacaccaagaaatgattggtggattacggaacaacaacgagaaagacatggccctcacggcctttgttctcatctcgctgcaggaggctaaagatatttgcgaggagcaggtcaacagcctgccaggcagcatcactaaagcaggagacttccttgaagccaactacatgaacctacagagatcctacactgtggccattgctggctatgctctggcccagatgggcaggctgaaggggcctcttcttaacaaatttctgaccacagccaaagataagaaccgctgggaggaccctggtaagcagctctacaacgtggaggccacatcctatgccctcttggccctactgcagctaaaagactttgactttgtgcctcccgtcgtgcgttggctcaatgaacagagatactacggtggtggctatggctctacccaggccaccttcatggtgttccaagccttggctcaataccaaaaggacgcccctgaccaccaggaactgaaccttgatgtgtccctccaactgcccagccgcagctccaagatcacccaccgtatccactgggaatctgccagcctcctgcgatcagaagagaccaaggaaaatgagggtttcacagtcacagctgaaggaaaaggccaaggcaccttgtcggtggtgacaatgtaccatgctaaggccaaagatcaactcacctgtaataaattcgacctcaaggtcaccataaaaccagcaccggaaacagaaaagaggcctcaggatgccaagaacactatgatccttgagatctgtaccaggtaccggggagaccaggatgccactatgtctatattggacatatccatgatgactggctttgctccagacacagatgacctgaagcagctggccaatggtgttgacagatacatctccaagtatgagctggacaaagctttctccgataggaacaccctcatcatctacctggacaaggtctcacactctgaggatgactgtctagctttcaaagttcaccaatactttaatgtagagcttatccagcctggagcagtcaaggtctacgcctattacaacctgaggaaagctgtacccgggttctaccatccggaaaaggaggatggaaagctgacaagctctgc

SEQ ID NO: 185917 - DNA, 2533 bp, Homo Sapiens
ttggtctagtgtgtgtttaagcatttctttagcttgtttgtataaaatgaagaatgtgttttgttcttattggaagttcaaaactagaatgcaatatctttttccttgatttctgtactagaatgcaatatttctcttcttgatttctgtagagcaggttgttgccctggatgcccaaaatattgtagctgtttcatgtggagaagctcatacgttagcgctaaatgacaaaggccaggtgtatgcttggggtctcgattctgatggacagcttggcctggtaggatcagaggaatgcatcagagtacccagaaatattaaaagtttgtcagatatccagattgtacaggttgcttgtggttactatcattcacttgcactttctaaagcaagtgaagtcttctgttggggacagaataaatatggccaattgggtttaggtactgactgtaaaaagcaaacttcaccgcagctgcttaagtctttgcttggaatccctttcatgcaagttgcagcaggaggagcccatagttttgtactcaccctttctggagctatctttggatggggacgcaacaagtttggtcagctaggtcttaatgatgaaaatgataggtatgttcctaatttactaaagtcactaagatctcagaaaatagtttatatttgttgtggagaagatcatactgctgctctaaccaaggaaggtggagtgtttacttttggagctggagggtatggtcagttgggccataattctaccagtcatgaaataaacccaaggaaagtttttgaacttatgggaagcattgtcactgagattgcttgtggacggcagcacacttctgcttttgttccttcatcaggacgaatttactcttttgggcttggtggtaatgggcagctgggaaccggttcaacaagcaacaggaaaagcccctttactgtaaaaggaaattggtacccctataatgggcagtgtctaccagatattgattctgaagaatatttctgtgtaaaaagaattttctcagggggagatcaaagcttttcacattactctagtccccagaactgtgggccaccagatgacttcagatgtcccaatccgacaaagcagatctggacagtgaatgaagctctaattcagaaatggctgagctatccttctggaaggtttcctgtggagatagccaatgagatagatggaacgttttcttcctctggttgcctaaatggaagttttttagctgttagcaatgatgatcactatagaacaggtaccagattttcaggggttgatatgaatgctgctaggcttttattccacaaacttatacaacctgatcatccgcagatatctcagcaggtggcagctagtttggaaaagaatcttattcctaaactgactagctccttacctgatgttgaagcattgaggttttatcttactctaccagaatgtcccctgatgagtgattccaacaatttcacaacaatagcaattccctttggtacagctcttgtgaacctagaaaaggcaccactgaaagtacttgaaaactggtggtcagtacttgaacctccactattcctcaagatagtagaactttttaaggaagttgtggtacatcttttgaaactctacaagatcggtattcccccttctgaaagaagaattttcaacagttttcttcatactgcattaaaggttttagaaatactacatagggtaaatgagaaaatgggacagattatacagtatgataaattttatatacatgaagtacaagaattgatagacataagaaatgattatatcaactgggtccaacagcaggcctatggaatgttggcagatatccctgttacaatctgtacatatccatttgtatttgatgcccaagcaaaaactactctgttacagaccgatgcagtcttacagatgcagatggctattgatcaggcccacaggcagaatgtctcctctctttttctcccagtgattgaatctgtgaatccctgcttaattctagtggtgcgtagagaaaatattgtaggagatgcaatggaagtccttaggaaaacaaagaacatagattacaagaagccactcaaggttatatttgttggagaagatgctgtggatgcaggaggggtgcgcaaagaatttttcttgctcatcatgagggaattattggatcctaaatacggcatgtttaggtattatgaagattccaggctcatttggttttctgataagacatttgaagacagtgatttgttccatttgattggtgttatctgtggcttagcaatttataattgtaccattgtggacctccattttcctttggctttatataagaaactactgaaaaagaagccatccttggatgatttgaaagaactaatgcctgatgttgggagaagcatgcaacagttactgggattatccagaagatgacatagaggaaacattttgtcttaattttacgatcacagttgaaaactttggtgcacagaagtgaaa

SEQ ID NO: 185918 - DNA, 1832 bp, Homo Sapiens
ttggctctcgaggcagctccagtcccggacgcaaccccggagccgtctcaggtccctggggggaacggtgggttagacggggacgggaagggacagcggccttcgaccgccccccgagtaattgacccaggactcattttcaggaaagcctgaaaatgagtaaaatagtgaaatgaggaatttgaacattttatctttggatggggatcttctgaggatgcaaagagtgattcatccaagccatgtggtaaaatcaggaatttgaagaaaatggagatgtttacatttttgttgacgtgtatttttctacccctcctaagagggcacagtctcttcacctgtgaaccaattactgttcccagatgtatgaaaatggcctacaacatgacgtttttccctaatctgatgggtcattatgaccagagtattgccgcggtggaaatggagcattttcttcctctcgcaaatctggaatgttcaccaaacattgaaactttcctctgcaaagcatttgtaccaacctgcatagaacaaattcatgtggttccaccttgtcgtaaactttgtgagaaagtatattctgattgcaaaaaattaattgacacttttgggatccgatggcctgaggagcttgaatgtgacagattacaatactgtgatgagactgttcctgtaacttttgatccacacacagaatttcttggtcctcagaagaaaacagaacaagtccaaagagacattggattttggtgtccaaggcatcttaagacttctgggggacaaggatataagtttctgggaattgaccagtgtgcgcctccatgccccaacatgtattttaaaagtgatgagctagagtttgcaaaaagttttattggaacagtttcaatattttgtctttgtgcaactctgttcacattccttacttttttaattgatgttagaagattcagatacccagagagaccaattatatattactctgtctgttacagcattgtatctcttatgtacttcattggatttttgctaggcgatagcacagcctgcaataaggcagatgagaagctagaacttggtgacactgttgtcctaggctctcaaaataaggcttgcaccgttttgttcatgcttttgtattttttcacaatggctggcactgtgtggtgggtgattcttaccattacttggttcttagctgcaggaagaaaatggagttgtgaagccatcgagcaaaaagcagtgtggtttcatgctgttgcatggggaacaccaggtttcctgactgttatgcttcttgctatgaacaaagttgaaggagacaacattagtggagtttgctttgttggcctttatgacctggatgcttctcgctactttgtactcttgccactgtgcctttgtgtgtttgttgggctctctcttcttttagctggcattatttccttaaatcatgttcgacaagtcatacaacatgatggccggaaccaagaaaaactaaagaaatttatgattcgaattggagtcttcagcggcttgtatcttgtgccattagtgacacttctcggatgttacgtctatgagcaagtgaacaggattacctgggagataacttgggtctctgatcattgtcgtcagtaccatatcccatgtccttatcagtaaaagctatcacttggattatgtctctatttacatttaatgtagaaaatgtttcatggaaatatacttgtcatggatgtaaaagttgatttcacgtgagaaaatacagagccataggtaaggatttcctatacatcaactgaaactggggatgaatgtttcatgacttc

SEQ ID NO: 185919 - DNA, 1225 bp, Homo Sapiens
  misc_feature (225)..(278): n is a, c, g, or t
  misc_feature (865)..(919): n is a, c, g, or t
  misc_feature (1026)..(1065): n is a, c, g, or t
  misc_feature (1157)..(1165): n is a, c, g, or t
ggggaagaaagttttcgtgactttattgctcctttattttctctcgtgtggggggggtctgctcagcacggtcagggtggagggagtggtgggtcgtctgagccacccggcccctctgggacccagagcgcggcgtccgctccgccagcacgggggtgagaacaaggcactaggtcggccggccagcgcgggggcgcgtgtataaggcagtcgacagggctggtnnnnnnnnnnnnnnnnnnnnnnnnnnnnnnnnnnnnnnnnnnnnnnnnnnnnnncgggcctgggcaaatcgacctgtcagcgtggctggtcctgtcctggagcgtcgagccttcccggtgttccccggagggggtcggggataggatgagagatgttgaatgggggcgggaggggcgccgggaaaggggggaggaaactaccaacttgctgagcgcgctcctgataatgctggtgagggtcaagttggcgtctggctcaaagaagggcgctcggggcggagagggagggagggaggggacgtttgttcgttggcattgacctctgcgggggaggggccggggacccctgccgcgcccccgtacccggacggggatggggcgaggaggggtgctgggccccagggaggggcgcccggggagacccgcggccggagcagtccagccgccgggggcacgccgctgtcccgttccgttaaactcaacaaagaagggatatgcgtattcctaacaagtgcaggatatttaattgattcataaacttatgtataatagtttgtgggttctttaaaacgtactttataatgtaagaagcaccagggttttatgtttaattatcttaaaaataatttttctctcgtccnnnnnnnnnnnnnnnnnnnnnnnnnnnnnnnnnnnnnnnnnnnnnnnnnnnnnnnaaactctaaaatgtgaacgtttccttcagccctcccaccgaaacagaacgaacgacgaaacaaataaaaaccccagatcatcctcgtcaacgcaggaaaacgacttnnnnnnnnnnnnnnnnnnnnnnnnnnnnnnnnnnnnnnnncactcagctttcgttatccccgcgcagggcggggcaggcccggttcttttagcgtccccagagccgcgaggacattacaacaaaaatagaannnnnnnnncttaatctcttaacatacaaagataggaaaactctctgatgcattgcacttggttcaatg

SEQ ID NO: 185920 - DNA, 2584 bp, Homo Sapiens
  misc_feature (756)..(765): n is a, c, g, or t
  misc_feature (2373)..(2407): n is a, c, g, or t
  misc_feature (2502)..(2521): n is a, c, g, or t
ttgggatttgttttccgaagagaccaccagtgacaacaacaatacctcgataaccacgccaactcttagtcccagccagcagccgcttccgacagaactgaatgtaacttcaccgagtaaagaggagtgtgggccatgcacagacacagctcatgtctcattaatcacaccaacaaaaagatcctgtggtacagattcacagtctgagaatgaggcttcaccagtaaaacggccacgactacttgagaatacggaacggtccgaggaaaccagtcgatctaaacagaagagtcgacgtcggtgcttccagtgccaaaccaaactggagctggtgcagcaggaattgggatcgtgtcgctgcggttatgtgttctgtatgttacatcgcctccccgagcagcacgactgcacattcgaccacatgggccgtggccgggaggaagccatcatgaaaatggtgaagctggaccggaaagtggggcgctcctgccagcgcatcggggaggggtgctcctgaaggccaggcatggccaccacgtgacgctgttcttagttcactaatgttagccttatttaggacaaagtcagccagacaccttgtactgggcacgcgtcagactgcagccagtccgtttcctttctttagccagccatcctggtactgtagtttaggggttgatggtggttgaaattgatttctggctggttactaaggtgcctgctagccattgtataaaattaaaacatgaagaatannnnnnnnnngagcatggctagtggatttaaaacaacacatacctgtcactgctggagtcaaacttataaaaagccttaagtggaaagtgttccagacggagactctgagttaatagaggagtagaagctggtgttaaagttcccacgacgcacatggctttgccagaaactctgtttaatgatcggcctttcacctcttcacttatccttagtcccagtagccaggatacctgatggccacgtgtgccttggccacgggaggctgctgagattggccacgtggctgggctgggtggtggcctcactctcccacagagctggaaatggggggtgggggacagattcttacggaaatttttttacctgacttgctatgaaaaaactcatcacacaagaagagaaacagtaacctcactttgaaaattagctccactcaagactagtccacgaacgagacccgccttttctacacaggatccaaggtcacgagaagcagccagagtgccccgcctccgccggctctggtctgccattcgccagtgcagggatctggcacggaccagatgtggcgaatggcagcacagcgcggtggctgggtctgcacactggcctctgcagccagatttctatattgggagttttttaaaaagacatttcatagccaacaagaatcagtagaagtgctgggagcagcagctggggaagctgccgcccacgggctctgccccttccagctggagccgcccgtgcctccaggggccaagaggatgatgtcgtggcctccattctcgtttctatgcagccccatagtccaaggacacccagtccacatctaccatatagcaagtttagtaagggaaggcagcatacgtcccagggacagtgggtttggatctgtctagaacagcggtttgtggctgtggcccagctccgagagtgatatttgctctggtaggtgagggcctgagggtacatttctccacctgtgccccctcatgttcacagaggatttcagcagctgcaactgcgcacgccaggtggggaagggtgggggtgggcctggttgccccatgttaggaaatcactaccagtcaggtggggctggggctgggtggacaggatcaggattcccttgaaagcccaggcagggtgagcagtcccagtggtcctagtgccgcatcagatccaggtgggtgagggcaggaggcccctgcggaggcagcgtggatctgcccacacataggctactggaatagtttaacccagcaactttcctttttataaaacaacaaatggttcaactctgtctgcaaattaacagctgaacacctgcaactgcaaatgttttttgatccgacgtactgaaataggaagtcatgctcttcccaccctccacccaccagagtggaacccgctgcaaaatccccagccttaattcttgcttcaggacccagaccggtgtcttgctctagggcaacccagggcagaggggccaggtctgcccagcgtttaccactgctgtcaagccacagcccttggccaccatacgggccatcctcagtgaggcagccccccataggcttccgccaagctctggtcccgaagaggctgtgcgannnnnnnnnnnnnnnnnnnnnnnnnnnnnnnnnnntcctctgcctgctgcgtggaggcagccatgggaaggagcccaggggagctggcctgggggagcgaagcccatgttcgcttcctgacttagagctnnnnnnnnnnnnnnnnnnnncttgttcccctgcagtatctgttctgtgaagtttgttaaatgtaaggaaagcttaaattcttg

SEQ ID NO: 185921 - DNA, 1585 bp, Homo Sapiens
  misc_feature (1078)..(1086): n is a, c, g, or t
gagcaatggcttttcctataatagccaactttgtacaaacatcatgttgtccacactcattccaaaccttacaactgtaaccactgtgggaagacatacaagcagatctccacgctggccatgcacaaacggacagcccacaacgacactgagcccatcgaggaggagcaggaagccttctttgagccgcccccaggtcaaggtgaagatgttcttaaagggtcccagattacgtatgttacaggtgtagaaggggacgacgttgtttctacacaagtagccacagtaacccaatctggactgagtcaacaagttacactcatatcccaggatgggactcagcatgtcaacatatctcaagctgacatgcaggccattggcaacaccatcacaatggtaacgcaggatggcacgcccatcacagtccccgcccatgatgcagtcatctcctcagcaggaacgcactctgttgctatggttactgctgagggtacagaagggcaacaggttgcaattgtagctcaagacttggcagcattccatactgcctcatcagaaatggggcaccagcagcatagccatcacttagtaaccacagaaaccagacctctgaccttagtagcaacatccaatggcacccagattgcagttcagcttggagaacagccatctctggaagaagccatcagaatagcgtctagaatccaacaaggagaaacgccagggttggatgattaatcctcagaacaatggagcaataaagcagaaggagtctttcatcttctggcagcagaaatccatgaagcccgggcccaggaaaattagaagttttccattcctgatacactgtacacatttttatgcgagagtggagaacattttattcttgacacttttgtgtatataacccttggaatagattctcagagtgattcattgtgtacaaggaagtatgaaattagggcaatacagtaaattttcatgttactcttttatcagatcacaaactcctagagtctacatgcaagactagtaaagtcttatggagtcttatgatggatttttaacttcccgtggnnnnnnnnntaaaggctgtatctaaaatatcaaaggttctatatgtcacacaatcgtaattccaaaagccattatggataataaagggtgtaaagccttcagatatttccccagttagtagagtgtctgcggtttttgttctactatatgcttgtccatttttatttgtatctcatggtttgcagactgtttgaataatttatagtttcccatccctgttaaaaaccagctcttcaagctgaaatgctaattatattggcattacattgaattatgtacaaaattataaaatttggttatttaaaattaaaaagttaaatccagtggttttgttaagattttgcttagtattcatttttattactgttttttaaaaatatgaatcatcaaagtttaaccacaggctggtgcccgggataacagtactgtattggaaatggctttactctgaaaaataggttagtggggttggtgtaaattattaatttttgctatgtactttggttta

SEQ ID NO: 185922 - DNA, 628 bp, Homo Sapiens
  misc_feature (68)..(119): n is a, c, g, or t
ttggctgttcgacacaggcttggggccgacgggggagacggagccccaggagtgttgaagcctggaannnnnnnnnnnnnnnnnnnnnnnnnnnnnnnnnnnnnnnnnnnnnnnnnnnnttcccattctgataatctggccatgactagcagaagcacagctaggcccaatgggcaaccccaggccagcaaaatttgccagttcaaattggtcctgctgggagaatctgcagtgggaaagtcaagcctggtattacgttttgtcaaagggcagttccatgagtaccaggagagcaccattggagcggccttcctcacccagtccgtttgtctagatgacacaacaatgaagtttgagatctgggacacagctgggcaggagcgatatcacagcttagcccccatgtactacaggggtgcccaagctgcaatcgtggtttacgacattactaatcaagaaacctttgcccgagcaaagacatgggtgaaggaactacagcgacaggccagtcctagcatcgttattgccctggcagggatcaaagctgacctggccaaaaacgtatggtggagtatgaaaaggcctaggcatatgcagatgacaacagcttattgttcatggagacttc

SEQ ID NO: 185923 - DNA, 1614 bp, Homo Sapiens
  misc_feature (1477)..(1519): n is a, c, g, or t
actttgtacaaaaaagttggcatcctctgatttatacatatgcattttttcccctctggcctttagatggcctcagccccagccaccatatacccctgcagtttgcactttaattgatggtagttcagttggggtacttgttttatggaagttttgattgatttacttgccctcccaccttctttttaattcaatgaaatctgaggttaatgcgaggttcgaggagaggttatagataaaactaccagtggcagctactcaagtcctatctccactgttagcttcctccaactctaattattaacctatattcttgccaagctaactattgactataggtttgcctttcctggagaattaattgagcaattgaggagtgtctcaggatagcacaggccaaggtaggggagtaaaaaggaggtcaggcaaaagggaggagttttctgtcctttcccaggtttcacactcaatttgatatccattaccatgtcttttctacttccttgtaaataggtatgatctttattcccactgtacagtctgttctatcctctgcctcccatcaggccctgtttctttgttcctttgttaatatcttgaatttagtccctccatccttaatccccccatccctccccatcatgcaaccagtggtttaatccatgtaccaataggggctagtaccacagaggcctcctgtggtgccctcgtatcataccacctgttcctgtggagagggaatgaccggcactgaaggtaccttacaactggctcatattatcagaggaccttggtcctttctaaatctctagtctctcttcatatccttcatcaggtgttttaagatgtctctgagaagccatcaaggcaaaagagaactttaagttccttgttccagcccggagttttgggaaagaaagaaaggaaaggtcacagtgacctaggattggaaccttcctgcccttttggcttgcagactgccttctatcccagaacagctgagaaatctatgaagctgagattctgaaggacccagcttaggttcttccacttaggcctcaattcccttccttttccaggggcagccttagttcccatggccctgaaacacacacatttcccccttcctttcccagaagccactggccccccatagcacccagtgcatcctttttactagtggaagaactaggatggctttccaaagtcttctagaaatgaagttctttctctgtgcagctttcccccttggagcaggagtgaagatgtttcattatcttgggcctgggaaaccacttccccaggcttctccctccccccacccccataggaacaggatttggccttagcttctgggcctatcggctgccttccctctacttcctaccacctcttctgccttcctttgagctctgttgggcttggggatcttagttttcttttgtttatttcccagctcatttttttcttctggtcnnnnnnnnnnnnnnnnnnnnnnnnnnnnnnnnnnnnnnnnnnngcttctgagaaagcatttgcctttcttcctctcccaacataacaatcgtggtaacagaatgcgactgctgatttaccgatgtatttaatgtaagt

SEQ ID NO: 185924 - DNA, 1849 bp, Homo Sapiens
  misc_feature (1717)..(1773): n is a, c, g, or t
gaattaaaaagaaggtgggagggcaagtaaatcaatcaaaacttccataaaacaagtaccccaactgaactaccatcaattaaagtgcaaactgcaggggtatatggtggctggggctgaggccatctaaaggccagaggggaaaaaatgcatatgtataaatcagaggatgggtaccagaaactgtccctcctccaatcagatcacagcagagccaaagatgcaggcaaccagtgaaaattctttggaagactctggggtccaacccccacgattaggggaaacgctacctaagaggctgcgtgaggggaaactgggcctttgaagagttacagagccacagttgacactgcacctccacctccgcccagttagcttacaaggcacctcctgcctggtgcctgagatcttgcctccccattctcacctctacctaggaacaccctccacaaggccaaatcatggataccgcaatgttttcaaatatgagaaactccaaccaaataaaaacaaaaaggaaatgtttccttactccctcctgctctgagctttattctcccccagggcccttaatgtaaatgaactggaaacctccttcctcagttcctgggttcaccactttctgcatcctggggagaggagaaaagaggctcaagaacagggactgaccaaaagcagaaggggaagggacaggagtcagaagtgttttctgaaaaaatggggaggaacactagggaggaggagaaaagatacgtaagtcgctgtcttgtacctataatacaaagtgaagaaagtttgttttggaaggtaagtcctggggggagttgacccccaagccccagagtagggggtaggaggccagtggcaacagctgcctggtgtttgttgctgaagcgttaaaaagtgccatgacggagctgtcaggaggcagcccttgggagccagggctcagtgtgctgttaccgtaggggttgtgtgctgaggggtagggatggaggttatttcttagctcttgtgctagctccatacttgtttgctgctagccaccccctcagttgctacaacactggctcttgttctgctgggactgttcatggagatccacaccccggcttcggcctgctgcacctcccagattctggggttcactctttggcaacttcttagctattgccaggaagagatcattcacgttcatagctgtcttggctgaagtctccatgaacaataagctgttgtcatctgcatatgcctgggcctcttcatactccaccatacgtttgttggccaggtcagctttgttccctgccagggcaataacgatgctaggactggcctgtcgctgtagttccttcacccatgtctttgctcgggcaaaggtttcctgattagtaatgtcgtaaaccacgattgcagcttgggcacccctgtagtacatgggggctaagctgtgatatcgctcctgcccagctgtgtcccagatctcaaacttcactgttgtgtcatctagacaaacggactgggtgaggaaggccgctccaatggtgctctcctggtactcatggaactgccctttgacaaaacgtaataccaggcttgactttcccactgcagattctcccagcaggaccaatttgaactggcaaattttgctggcctggggttgcccattgggcctagctgtgcttctgctagtcatggccagattatcagaatnnnnnnnnnnnnnnnnnnnnnnnnnnnnnnnnnnnnnnnnnnnnnnnnnnnnnnnnnttccaggcttcaacactcctggggctccgtctcccccgtcggccccaagcctgtgtcgaacagacaaacagcccaa

SEQ ID NO: 185925 - DNA, 1098 bp, Homo Sapiens
ttccctttccaccaggaaccaggtgtatgatacgagggcaccacaggaggccttctgtgttactagcccctattggtacatggattaaaccactggttgcatgatggggagggatggggggattaaggatggagggactaaattcaagatattaacaaaggaacaaagaaacagggcctgatgggaggcagaggatagaacagactgtacagtgggaataaagatcatacctatttacaaggaagtagaaaagacatggtaatggatatcaaattgagtgtgaaacctgggaaaggacagaaaactcctccttttgcctgacctcctttttactcccctaccttggcctgtgctatcctgagacactcctcaattgctcaattaattctccaggaaaggcaaacctatagtcaatagttagcttggcaagaatataggttaataattagagttggaggaagctaacagtggagataggacttgagtagctgccactggtagttttatctataacctctcctcgaacctcgcattaacctcagatttcattgaattaaaaagaaggtgggagggcaagtaaatcaatcaaaacttccataaaacaagtaccccaactgaactaccatcaattaaagtgcaaactgcaggggtatatggtggctggggctgaggccatctaaaggccagaggggaaaaaatgcatatgtataaatcagaggatgggtaccagaaactgtccctcctccaatcagatcacagcagagccaaagatgcaggcaaccagtgaaaattctttggaagactctggggtccaacccccacgattaggggaaacgctacctaagaggctgcgtgaggggaaactgggcctttgaagagttacagagccacagttgacactgcacctccacctccgcccagttagcttacaaggcacctcctgcctggtgcctgagatcttgcctccccattctcacctctacctaggaacaccctccacaaggccaaatcatggataccgcaatgttttcaaatatgagaaactccaaccaaataaaaactaaaaaggaaatgtttcccaacttttttgtacaaagt

SEQ ID NO: 185926 - DNA, 629 bp, Homo Sapiens
  misc_feature (94)..(150): n is a, c, g, or t
tttgtacaaaaaagttgggcagctgtttgtctgttcgacacaggcttggggccgacgggggagacggagccccaggagtgttgaagcctggaannnnnnnnnnnnnnnnnnnnnnnnnnnnnnnnnnnnnnnnnnnnnnnnnnnnnnnnnattctgataatctggccatgactagcagaagcacagctaggcccaatgggcaaccccaggccagcaaaatttgccagttcaaattggtcctgctgggagaatctgcagtgggaaagtcaagcctggtattacgttttgtcaaagggcagttccatgagtaccaggagagcaccattggagcggccttcctcacccagtccgtttgtctagatgacacaacagtgaagtttgagatctgggacacagctgggcaggagcgatatcacagcttagcccccatgtactacaggggtgcccaagctgcaatcgtggtttacgacattactaatcaggaaacctttgcctgagcaaagacatgggtgaaggaactacagcgacaggccagtcctagcatcgttattgccctggcagggaacaaagctgacatggccaaaaacgtatggtggagtatgaagaggcccaggtatatgcagaggaca

SEQ ID NO: 185927 - DNA, 1088 bp, Homo Sapiens
  misc_feature (880)..(896): n is a, c, g, or t
cctccccaccgcccccacaacctccacaaccccacaaattctctggccgggcctccagacagcttctacccccacacaatctctctttctggtgctggaaattgagggggcaacaccaagttcccagctccttgggacaggaccccattatcccagcagagtggggagtgattggggggtccattcctggggctctgaaccaaggcctcatgggaaaggacatgtccttagcctcagattgactcagaaataccccctctaccctgattgactgtgcgcagaccctgactgcacaagaaagacacccctgattaaccacatagactcccaaatccctgattcgccaacagattccccaggccctgattggctggaggatacatcctcctcaaggccctgattggctgggagacactccagcaagccttgattggccagaagatggtccctggcctagcggctgggcggaggctgcttctcctctgaccctcctgaggtcccacaggctgggtggcctaggtccaggaggggtgggagaaggtgatgccatacagctgggcccacgatgagaagacccttttctcggtgatgaagcggtggtggttgcccttgcgactgtgctcattctggatgtaggtgacacattcgtccggccccttgggctcgtagtagtggtagggcatgcgctggaggcggggccgctggctgggacagagcagacgggcgtcatcagggcaaggtgagcgctagcagggtccttgccctttcagcccctcgcttaccataggacctcaataggagaaatccccatgcctcctggggcctcggtttccccatccataaaatgggtgcagggtagactaggtgtgtaaccaccaannnnnnnnnnnnnnnnnaaatgcagtggcactttttcctttccctaagaaggcggcagtgtggagcagtggtgagggctgtgagcactggagcctggcccctcttcctactgtttggaggacctttggctactcataaaacatactcctcagtttttctcatttaattaatgggaagaataacagttcttatcccgtaaggttgcccaa

SEQ ID NO: 185928 - DNA, 1209 bp, Homo Sapiens
cagctgggcccacgatgagaagacccttttctcggtgatgaagcggtggtggttgccttgcgactgtgctcattctggatgtaggtgacacattcgtccggccccttgggctcgtagtagtggtagggcatgcgctggaggcggggccgctggctgcagtagttgggggggaccatgccatagacatgcacgtggtcacacaactccaccgcgatcaccatggtaaaccagcctgtgctcaaccacgaatgagacttctcccccggaagaggtcgtcaaattgccgcatgcggccgggagagacggcatatgcttccatgttggggaacaccaggcccgctcgctggatcacacgcacgaggctgccctggggcttctgcatcttgctcgggggcccccagaagatgaacacggtttcaggggtccggttgacaaactcctggggcctcctcagcacgcggaacacactggaatgggccacgacgcggtaggtggtcttgttgcccacatcagctgagtagccagtggtgggtgcatcattcatgcggattgtacactcagcccgctcgatctcagggcccagcttggtgcccagcaggtggctggagctgctgacaatcacacactggtggcaccgagagggcagtgtcttgttgccgagaatggggacatagccgtcagtgatgctccacttcttgaggttgacaggtcggcggctacggccccgcagggagccgtaatggaagacctcattggcactgttggagtttgttgctactcatttctctccggcgtctgctgaggggtaggtgtcggcgtcctgcaggtggccctgggggcagggatgtgggttcacactggctggggggcctcgagcaagccatgtgacctctctgagcctcagtttcctcatatcaaggaagctgcagtaattgctttggcaaaagcagagagtcttcagtttcctgatcaagacagccttcagtagaccccgaaccagccaccagacctctgcctgacacctgttgagagctcctcgttccgtgctgtggctccgctgccagcctgctccttgcttcgccagctcagggctctcctcccccctcccattcctgcagaaacttctgggtccacctggcactgggcaggaggaagccgggcacaaaagcggtgctgtgaaccaagtgccaggtctcagccccctctgtg

SEQ ID NO: 185929 - DNA, 2100 bp, Homo Sapiens
ttgggtaccatcatggcttgagtgctctgaagcccatccggactacttccaaacaccagcacccagtggacaatgctgggcttttttcctgtatgactttttcgtggctttcttctctggcccgtgtggcccacaagaagggggagctctcaatggaagacgtgtggtctctgtccaagcacgagtcttctgacgtgaactgcagaagactagagagactgtggcaagaagagctgaatgaagttgggccagacgctgcttccctgcgaagggttgtgtggatcttctgccgcaccaggctcatcctgtccatcgtgtgcctgatgatcacgcagctggctggcttcagtggaccagccttcatggtgaaacacctcttggagtatacccaggcaacagagtctaacctgcagtacagcttgttgttagtgctgggcctcctcctgacggaaatcgtgcggtcttggtcgcttgcactgacttgggcattgaattaccgaaccggtgtccgcttgcggggggccatcctaaccatggcatttaagaagatccttaagttaaagaacattaaagagaaatccctgggtgagctcatcaacatttgctccaacgatgggcagagaatgtttgaggcagcagccgttggcagcctgctggctggaggacccgttgttgccatcttaggcatgatttataatgtaattattctgggaccaacaggcttcctgggatcagctgtttttatcctcttttacccagcaatgatgtttgcatcacggctcacagcatatttcaggagaaaatgcgtggccgccacggatgaacgtgtccagaagatgaatgaagttcttacttacattaaatttatcaaaatgtatgcctgggtcaaagcattttctcagagtgttcaaaaaatccgcgaggaggagcgtcggatattggaaaaagctgggtacttccagagcatcactgtgggtgtggctcccattgtggtggtgattgccagcgtggtgaccttctctgttcatatgaccctgggcttcgatctgacagcagcacaggctttcacagtggtgacagtcttcaattccatgacttttgctttgaaagtaacaccgttttcagtaaagtccctctcagaagcctcagtggctgttgacagatttaagagtttgtttctaatggaagaggttcacatgataaagaacaaaccagccagtcctcacatcaagatagagatgaaaaatgccaccttggcatgggactcctcccactccagtatccagaactcgcccaagctgacccccaaaatgaaaaaagacaagagggcttccaggggcaagaaagagaaggtgaggcagctgcagcgcactgagcatcaggcggtgctggcagagcagaaaggccacctcctcctggacagtgacgagcggcccagtcccgaagaggaagaaggcaagcacatccacctgggccacctgcgcttacagaggacactgcacagcatcgatctggagatccaagagggtaaactggttggaatctgtggcagtgtgggaagtggaaaaacctctctcatttcagccattttaggccagatgacgcttctagagggcagcattgcaatcagtggaaccttcgcttatgtggcccagcaggcctggatcctcaatgctactctgagagacaacatcctgtttgggaaggaatatgatgaagaaagatacaactctgtgctgaacagctgctgcctgaggcctgacctggccattcttcccagcagcgacctgacggagattggagagcgaggagccaacctgagcggtgggcagcgccagaggatcagccttgcccgggccttgtatagtgacaggagcatctacatcctggacgaccccctcagtgccttagatgcccatgtgggcaaccacatcttcaatagtgctatccggaaacatctcaagtccaagacagttctgtttgttacccaccagttacagtacctggttgactgtgatgaagtgatcttcatgaagagggctgtattacggaaggaggcacccatgacgaactgatgaatttaaatggtgactatgctac

SEQ ID NO: 185930 - DNA, 2049 bp, Homo Sapiens
  misc_feature (807)..(890): n is a, c, g, or t
  misc_feature (1798)..(1834): n is a, c, g, or t
ttggttttctttatcctctcttgaaaaatggtttgaaatgtcattgttatttaaaaacccgatgtgttggaacttctttaatctgctgtttcctctttttccccccctttgaaagtttcgcatagtgtaaacattcactatgtcttttaccttccctgctcctcccatctgggaggcgctgatgctattacccagtgctgaaaaatggcactctaaaggtatgggaaggaaggagcccaaggcaaccacctgctgtcctttcagccttcctttggagactgctccatcagtgccgaggtgtgtgggaacaggcttcactgcaccgccatcttactgagttgcttcacgtgaggaaaagggggctttggccctgtgactcagttccacattttggattgcatactggaaaagaagccaatcttcttgctagtaaaccagcaacccggctgtatacagtggtgacccaagcaatggatataaacctaaaaatctgagggaggggagaggtggaatacagtagttcttggaatctgaagtctcctatttgatcaggttatttcctgggacttggcaaaaatctgattggtggggatctcctaggacctagtggacatctggtattaatttaatctcaggaaaaacaagaaattaacccagagagagtctgggttttggaattcagcgtagctacctccagaccgtggtgtctggcctccatttttgtctgtcattcagctctgacttacagctgcagtcacctttgctataaggcacctgggtagaagggtggatgggcttcacatcaannnnnnnnnnnnnnnnnnnnnnnnnnnnnnnnnnnnnnnnnnnnnnnnnnnnnnnnnnnnnnnnnnnnnnnnnnnnnnnnnnnnagatgcaaggacttgaaaagacccagaaggatgccaccagtttttccttgaggcctaggattttttattctgtcccgagcagaggtaattcctcacaacttagtgcaccagtagcaccagccattttgagcagagtacctctttggggagcttttcgttttgttttgtttttaattctctttccttagcagcaaggtcttttttcctagagaatctactccgttgcagaatcattgcaacctcaggagccctcactgattgagtgctgtcagcctgatatactactttggactctggaaacagatatgggttctattctctatttctactgtgtgtcgttaaacaaccgtcggagaccagatgacctgttagatggctagtcctgtataactcgactctgtatgtttcaatgtatgttactgcaatgcttcacctgctgtacagtgtttgtgagatgctctttgaagatggtacttttatattttttcattttcaataaaagtacattccttcccacttcctggtatttaatactgttgctgaatgtgccttgtgtgagtgtgtgctccggcgttgcaggacctcagctggaggtggcactcggtggttcttgggggctggccgccttccctctgcaggtggtgttagacatatgctacctgaggtaacatgttttcatttttgggagggagtcgggagtggggcgggcccatgggagggtctctggatttttgatagcctgctttgtttgctctcttctgtactattaaactgctgatgtttattttcaggaatgttttgcaaatgcacttctcactcttccccagtacaactgtaggtacactgttcctttttatcaaataagcacgtttgaaacgatccaaaaaaaaggtcttaatttcatgtannnnnnnnnnnnnnnnnnnnnnnnnnnnnnnnnnnnntcaaagctatacttttgaatgaccatgtgtttagagttaatttcagctcattgataggtttatgttacattagaaagagtaatggttttgatgatgtcctgtaagaagaaagtttgcaattagacctagctcctgcagaatgccctgagtaagttactgcagcagcttgtaataattgggtcctcaaagttttgctttgcttgcgcactggttcc

SEQ ID NO: 185931 - DNA, 1109 bp, Homo Sapiens
ttggcccttttaaacattcaaaggtggaagaaagtgatttattttttctcttcagcatacatatataaaagacttgtcagatgtttaatttggggaggttgataatgaaacatatcaacagagtatagtagttatagtagtgtttgtgggtaaataatttcctggggtcagacatatataaacatatttgcttcaaaatgataaaggcatgaaatcagtcttaaaaattgaaatgggggtgatgggggagaaaaagaagaacaaatttgaagtgccctttcaaatctgctggatacaagtattgaagttttaagtcatcttattctgtctgaaagtgtatttttcattctacaatagacccaatcaacaagacgtataacttgagttgcatgatgttcagtttatgtaatctactgttgggatggtaagaattgatgtaggctgtggtgtaagaatgaattaaaatatagtttcactggcttttctctacatatccactatcacaatggctaggtttcctgttgctcactgttggattctggagaaaaatttaatgaaagatgatatcagaggaagaataagtggaggtagagaagaaaggagtgatagaggaggggaaaaaaacaaaacatatttttgtgttatccaaaggagctttttccttattctgtcaagcattgagatcttcttcagctttcaatgtagttgctaaatacaaataatgctactaggtagtgactaaatatagcaaacacttcatcagatattagaattaggtcacactattgaggttataatctgaaggttgtgttacatagaaaccactttagattattatcaacttggactaggctttattttataatagcatagtaagtaatatctattgtgtcatttcttcaaccattttattctaagatccatgaagcttcttgaggccaaataaaataataagtttagacaagaagtagattgtgactttttttcccttagagatactatttactatctcctatcctgataggtggaaagtttactgaattggaaattggttgactattagtttttaactaaaatgtgcaataacacattgcagtttcctcaaacta

SEQ ID NO: 185932 - DNA, 1556 bp, Homo Sapiens
ctttgtacaaaaaagttggatcaacaagacgtataacttgagttgcatgatgttcagtttatgtaatctactgttgggatggtaagaattgatgtaggctgtggtgtaagaatgaattaaaatatagtttcactggcttttctctacatatccactatcacaatggctaggtttcctgttgctcactgttggattctggagaaaaatttaatgaaagatgatatcagaggaagaataagtggaggtagagaagaaaggagtgatagaggaggggaaaaaaacaaaacatatttttgtgttatccaaaggagctttttccttattctgtcaagcattgagatcttcttcagctttcaatgtagttgctaaatacaaataatgctactaggtagtgactaaatatagcaaacacttcatcagatattagaattaggtcacactattgaggttataatctgaaggttgtgttacatagaaaccactttagattattatcaacttggactaggctttattttataatagcatagtaagtaatatctattgtgtcatttcttcaaccattttattctaagatccatgaagcttcttgaggccaaataaaataataagtttagacaagaagtagattgtgactttttttcccttagagatactatttactatctcctatcctgataggtggaaggtttactgaattggaaattggttgactattagtttttaactaaaatgtgcaataacacattgcagtttcctcaaactagtttcctatgatcattaaactcattctcagggttaagaaaggaatgtaaatttctgcctcaatttgtacttcatcaataagtttttgaagagtgcagatttttagtcaggtcttaaaaataaactcacaaatctggatgcatttctaaattctgcaaatgtttcctggggtgacttaacaaggaataatcccacaatatacctagctacctaatacatggagctggggctcaacccactgtttttaaggatttgcgcttacttgtggctgaggaaaaataagtagttcgaggaagtagtttttaaatgtgagcttatagatagaaacagaatatcaacttaattatgaaattgttagaacctgttctcttgtatctgaatctgattgcaattactattgtactgatagactccagccattgcaagtctcagatatcttagctgtgtagtgattcttgaaattctttttaagaaaaattgagtagaaagaaataaaccctttgtaaatgaggcttggcttttgtgaaagatcatccgcaggctatgttaaaaggattttagctcactaaaagtgtaataatggaaatgtggaaaatatcgtaggtaaaggaaactacctcatgctctgaaggttttgtagaagcacaattaaacatctaaaatggctttgttacaccagagccatctggtgtgaagaactctatatttgtatgttgagagggcatggaataattgtattttgctggcaatagacacattctttattatttgcagattcctcatcaaatctg

SEQ ID NO: 185933 - DNA, 1641 bp, Homo Sapiens
  misc_feature (706)..(732): n is a, c, g, or t
ttggctcatttcatttttctaaaggggcagaggcctcttttagaaaataataaaatgcaatgtgtgtgatttacttttctgatctctttgagaaatagagaaatataaaagtgtgttcttaactccagaaccactctttttgcataaatacctcatcgggcagctttctaagtgtgattttcctgagtctcccttcgttggatctgccggaagacttgtcggggaacctttagtgagggtacttcttcctatttttcttctgtttttggaggcatacacattatgcataaccaaaacaatggctcaattgtgtttaactttgtattttgattgttgagaacaaaaacaaaaagtatcaatgtgtatgtggctgtttgtagtgaatttattggagaatgaggttgtccgtgtccttaacaagccaaggggcaggaggcaccctctcttatcccctcctccaagagcagtagagaatttaagcacaagcctatttgtgaaagaatattttgcttaagtgtcattcactttagtcttggaattccttcccaaacgtcaggtgttcttttagcttccaaactagcatatgtatccattagtctgacagatcgcctgaacaccattaagaggtgtggcgtttttgctttcatttctcctgctgggagaagtggcggttcatgtgtcattccagtatctcacatactcacannnnnnnnnnnnnnnnnnnnnnnnnnnaactatagcaatatttaaagatgctttggaaaccaaccgtgaacacatcaacaccacgacgtctacgattacttgctattggccctcggatacatttaagagaaagagacagtcactcttttttttcttaaatgatatacatataaacagttatttttatcctattataattgtcttttgtctttatctagtactatgtggaaagggtttgcatcatagatttttcccagccttataatataccataagctcctacttccctgcccctccctaatcagtattctttcaagagttctttggtgaagccatctatctgaaactaaaatgaaccaaacccatatttcactggtggttggagaaaaccatggccaaaacgattgtggcaggtctcaatcttgggagtttttaagaaggaatgtgccagaggccgattcccaagaacagagttttcttttgttttgcagaggcattcaatgtgtctagtgcttgctggccacagcagttactaccacagagccttctgggaggggccgttgtgttgaaggaggctcctgcctgagggacagcatcaggcagtgggctctgtagagtgagaaccaggtggaggccttctgtgcccagctcagagttctgcaccacgccaggactgcccaggccaagggctactgacgcaagttccactcattccactctgtggggggcgccttgggcctctcctggaagggctcttggagaagaattggagttacgtacaagtgacctaaatgggaagcttttctagatgagattggattaaattccatgtgatttctctttccctttaatccaggttgggactcgtttctttctggtggatcacagctgcccagatgtgcaattgatttttatgtttctgtagagaagtatttt

SEQ ID NO: 185934 - DNA, 901 bp, Homo Sapiens
  misc_feature (756)..(770): n is a, c, g, or t
tacaaaaaagttggcagactcgtcagctcggttgctttatcatgaataatgtgtgtgaccttgcagttcttccacagttcagcaaacaagtgctagcttcactgaccaaaaattaaggaaggaaaacacagtttttaaaacgatccatcttttaacagccgaaaccgatgtgtctatggtgctgcaccttgctgttgtacttctgaaatcagacgtgtgtgaacgatcatttctgacttaaccgtgagatgctcacgagtacccttcctgttgttttgttagcattgaaatcgagactatttatttggaatatatacaacagtgtttttccactgtatttcatttgcaaaagttgagaactgctttctctaccttttgcaaaataattgatattccatattggattctcaaagacttcgatatggtgaacctattaaacctagaaattgtattcatcctttcatgactgtggcctgagttccccagcccctctcctccttttttttagatgagatttagcacactctcagttatttaaacatgcaacatttcttgagtatgtatgttgaggccatctgagctcatagctgattcagtaaccagtttcatgctgtgtcattcacactcactacttaatactgccatggtgaaaatgtggaggaaaaatgtatccatgtgtgtctgggaagcatatacacttgtacattttttaatactctgattctgtaacatttctgagttttgttttgttttacnnnnnnnnnnnnnnngtgataaagcaatcagaagaccaagaggtttactattgatgcttagggtcgtctgaccttggctggccaatagacctacacggccaaattaatttacgagagtaataatttttcaaaaggcaaattttttt

SEQ ID NO: 185935 - DNA, 1594 bp, Homo Sapiens
  misc_feature (1459)..(1472): n is a, c, g, or t
ttgtacaaaaaagttgggggaagctttccctaaataagagattggattaaattccatgtgatttctctttccctttaatccaggttgggactcgtttctttctggtggatcacagctgcccagatgttgcaattgatttttatgtttctgtagagaagtatttttctttcatcttcaggattttttttgccaccaaaagaaaacattggaactctgtgtttcctcttgattgtgacttcccagtgttgacagttaagtccttagtgtcgtaggtcccagcccaccaatactatatcaaacactgttatgcacataatgcagcactgtgatctaatttaaataatacttttttattatttatactactatatataatatacatcaacacttttgctatataacctaagtgataaccctcttttagttacctgccaaactctggacttggtttatattgcagttaacacagttacaaagctgtaatgggtctttttttcctttgtaacggaatgtgtaaatcaaagtatatacattgtgtggtgttcctgtttctggagtttcatgaggatttacacatggcattcagtgttctgtatagatctgcctacctttgtgaattcatctgttaacccctcttcctttgagagagcaccggcgatggtggttaactccttgtgttttctctctctcctactggttattcttgaattaagcacagactcgtcagctcggttgctttatcatgaataatgtgtgtgaccttgcagttcttccacagttcagcaaacaagtgctagcttcactgaccaaaaattaaggaaggaaaacacagtttttaaaacgatccatcttttaacagccgaaaccgatgtgtctatggtgctgcaccttgctgttgtacttctgaaatcagacgtgtgtgaacgatcatttctgacttaaccgtgagatgctcacgagtacccttcctgttgttttgttagcattgaaatcgagactatttatttggaatatatacaacagtgtttttccactgtatttcatttgcaaaagttgagaactgctttctctaccttttgcaaaataattgatattccatattggattctcaaagacttcgatatggtgaacctattaaacctagaaattgtattcatcctttcatgactgtggcctgagttccccagcccctctcctccttttttttagatgagatttagcacactctcagttatttaaacatgcaacatttcttgagtatgtatgttgaggccatctgagctcatagctgattcagtaaccagtttcatgctgtgtcattcacactcactacttaatactgccatggtgaaaatgtggaggaaaaatgtatccatgtgtgtctgggaagcatatacacttgtacattttttaatactctgattctgtaacatttctgagttttgttttgttttacagnnnnnnnnnnnnnngtgataaagcaatcagaagacccagaggtttactattgatgcttagggtcgtctgaccttggcctggccaatagacctacacggccaaattaatttacgagagtaataatttttcaaagcca

SEQ ID NO: 185936 - DNA, 1886 bp, Homo Sapiens
  misc_feature (1052)..(1063): n is a, c, g, or t
  misc_feature (1620)..(1640): n is a, c, g, or t
actttgtacaaaaaagttggcaaagttgaacaaaagacgaggttttgtgtttatcacctttaaagaagaagaacccgtgaagaaggttctggagaaaaagttccatactgtcagtggaagcaagtgtgagatcaaggtggcccagcccaaagaagtctatcagcagcagcagtatggctctgggggccgtggaaaccgcaaccgagggaaccgaggcagcggaggtggtggtggaggtggaggtcagagtcagagttggaatcagggctacggcaactactggaaccagggctacggctaccagcagggctacgggcctggctatggcggctacgactactcgccctatggctattacggctacggccccggctacgactacagtcagggtagtacaaactacggcaagagccagcgacgtggtggccatcagaataactacaagccatactgaggcggcagcaggagcgaccaactgatcgcacacatgctttgtttggatatggagtgaacacaattatgtaccaaatttaacttggcaaactttctattgcctgtcccatgtgcatcttatttaaaatttcccccatggaaatcactctcctgttgactatttccagagctctaggtgtttaggcagcgtgtggtgtctgagaggccatagcgccatcatgggctgatttttattaccaggtcccccagaagcaggtgggaggctctgcttcctgctgccgctctgcagcctggacctgtggaccctggttgtaaagagtaaattgtatcttaggaaaccagtgtcacctttttttcaccttttaattttatattatttgcgtcatacatttcctgtaacggaagtgttaattttactgtactttttggtaccttttgggaatctaatgtattgtaaggtattttacacgtgtcctgattttgccacaacctggatattgaagctatccaagcttttgaaataaaatttaaaaacccccaagcctgggtgagtgtgggatatgctgtgtgagacctcttgctcagggtcgagggaggcnnnnnnnnnnnntgccaggtgccctggacttggggctttctcctgcagcaggctcttccagctgcaggcccagttgtgggggtatcctttaaggactgccctgcctagggctgagccccccttcaaagaaaggaatgagaggcctatggggagtgaggatggggcagtgatgagggcttacatccccagcaggcatgtcccctcctgggacaccttggaacaccaaccttcttggctgatgaatgaaaaaatgggattctttacacactagggcagtgccagggccgtctgaattggggcacaatagtgctcctcctggctggtgaagaaaagcctgctctggcaggggatgtttattggctggattggagcccaactccaggtctggtatttagggcataagactaggtggttacaagaggcaagggtgggttggggttccacgtggatacagccccataggtttcaagggaggatatagctgttcctgccatcaagtgcaagctaagcattggagaatttccagtgttgaagaaactaacctttgggaaggagcatcagtcagaacnnnnnnnnnnnnnnnnnnnnngctcagcttgccgaggctgcttgctgctgatggtaaggaacccgctgtgcatcttcaagagtaagaagcaaggcccactcacctggagtacacttaggcagagcagggctggcttagggctggagcctcagcgtttcacaacttctcaccttctcttccatgtcagtcagaatggcatccagctttgccaccacctgccgtgcattgtccaggctgaagcacattgggggcttaaacttcagccaa

SEQ ID NO: 185937 - DNA, 1390 bp, Homo Sapiens
gaagctgtttcctgctagagtgaacttactctaagaagcaagtggatggtctttacttttgaaactcttggcggggaagtgctgttggagccgctgtggttgctgtccgtgtagtgaaagcgcgtgcctttgtttgtgtccctggccatgtgtccctggccatggcgctgcagctctcccgggagcagggaatcaccctgcgtgggagtgccgaaatcgtggacgagttcttctcattcggcatcaacagcattttatatcagcgtggcatttatccatctgaaatctttactcgagtgcagaaatacggactcaccttgcttgtaactactgatcttgagctcataaaatacctaaataatgtggtggaacaactaaaagattggttatacaagtgttcagttcagaaactggttgtagttatctcaaatattgaaagtggtgaggtcctggaaagatgacagtttgatattgagtgtgataagactgcaaaagatgacagtgcacccagagaaaagtctcagaaagctatccaggatgaaatccgttcagtgatcagacagatcacagctacggtgacatttctgccactgttggaagtttcttgttcatttgatctgctgatttatacagacaaagatttggttgtacctgaaaaatgggaagagtcgggaccacagtttattaccaattctgaggaagtccgccttcgttcatttactactacaatccacaaagtaaatagcatggtggcctacaaaattcctgtcaatgactgaggatgacatgaggaaaataatgtaattgtaattttgaaatgtggttttcctgaaatcaggtcatctatagttgatatgttttatttcattggttaatttttacatggagaaaaccaaaatgatacttactgaactgtgtgtaattgttccttttatttttttggtacctatttgacttaccatggagttaacatcatgaatttattgcacattgttcaaaaggaaccaggaggtttttttgtcaacattgtgatgtatattcctttgaagatagtaactgtagatggaaaaacttgtgctataaagctagatgctttcctaaatcagatgttttggtcaagtagtttgactcagtataggtagggagatatttaagtataaaatacaacaaaggaagtctaaatattcagaatctttgttaagggtcctgaaagtaactcataatctataaacaatgaaatattgctgtatagctccttttgaccttcctttcatgtatagttttccctattgaatcagtttcccattatttgactttaatttatgtaacttgaacctatgaacaatggatattgtactgtttaatgttctgtgaacagaactcctaaaaa

SEQ ID NO: 185938 - DNA, 1130 bp, Homo Sapiens
  misc_feature (1052)..(1064): n is a, c, g, or t
ttggtgatataactgagaatgttggtgaaaccatatggtctttctaaaaggactggagaagcttgcacagaaaggaaaatcattgtcacctttagcaagtataactggaatatcactatttttgattatatccatgtgtcttctcttcctatggaaaaaatatcaaccctacaaagttataaaacagaaactagaaggcaggccagaaacagaatacaggaaagctcaaacattttcaggccatgaagatgctctggatgacttcggaatatatgaatttgttgcttttccagatgtttctggtgtttccaggatcccaagcaggtctgttccagcctctgattgtgtatcggggcaagatttgcacagtacagtgtatgaagttattcagcacatccctgcccagcagcaagaccatccagagtgaactttcatgggctaaacagtacattcgagtgaaattctgaagaaacattttaaggaaaaacagtggaaaagtatattaatctggaatcagtgaagaaaccaagaccaacacctcttactcattattcctttacatgcagaatagaggcatttatgcaaattgaactgcaggtttttcagcatatacacaatgtcttgtgcaacagaaaaacatgttggggaaatattcctcagtggagagtcgttctcatgctgacggggagaacgaaagtgacaggggtttcctcgtaagttttgtatgaaatatctctacaaacctcaattagttctactctacactttcactatcatcaacactgagactatcctgtctcacctacaaatgtggaaactttacattgttcgatttttcagcagactttgttttattaaatttttattagtgttaagaatgctaaatttatgtttcaattttatttccaaatttctatcttgttatttgtacaacaaagtaataaggatggttgtcacaaaaacaaaactatgccttctcttttttttcaatcaccagtagtatttttgagaagacttgtgaacacttaaggaaatgactattaaagtcttannnnnnnnnnnnncaaggaaagatggattcaaaataaattattctgtttttgcttttatgtggtcttaattctttgtct

SEQ ID NO: 185939 - DNA, 1386 bp, Homo Sapiens
ttggcccatgtccccagctgtggtcctgcaccgaggccagctcctggggctccgagccaataagacatcccccacctctggggagggcgcccgtcccgggggcatcatccacgtgtatggcgatgacagcagtgacagggcggccagcagcttcatcccctactgctccatggcccaggcccagctatgcttccatgggcaccgcgatgccgtgaagttctttgtctcggtgccagggaacgtgctggccaccctgaatggcagtgtgctggacagcccagccgagggccctgggccagctgcccctgcctcggaggtcgagggccagaagctgcggaacgtgctggtgctgagcggcggggagggctacatcgacttccgcattggagacggagaggacgacgagacggaggagggcgcaggggacatgagccaggtgaagcccgtgctgtccaaggcagagcgcagtcacatcatcgtgtggcaggtgtcctacacccccgagtgaagctgctgccctgcctggcccgacctgtacataggacccccgaccacctgacccccgcccggcccgcggggtagccagccaggcgccgccgcccctcttctaacctctcaacctgcagctttcacctgagtctggcccctccagcgggcagggagtgcggggatgcggatcagctgggaggaggaggggaggggtgcttccacccgaggggaagatgctctcgggacagtttcccgggcagctcctggccagcttccagcccagagtcctcaagtccagggcaccttgggcccagcgcaggcagaatccgaggtggtcctggctctaccctgggcctcctactccccagcacccctggaggaggcaggggctccccgccgccgaggctgcctgccctgggcccacctctgcatgctgctcatggggccaccctgcctcctgggccctcactctgcctaggggagctgggccaggcactagcctttgcccagggaggtgggcctcaggctgcccaggtgcctgcaccccagccggccttctctggggcctccccgtcgtcaagcctctatcctgtctgtccccaccccagctgtcccctgcccagggaactggcataaaagcacgaggcccggctccctggggcagctgcttgagaacagagactgctaccccatcctgcccatgcaggcaggctcttgccagccccgttctgacccgtgtccccccaggctctgcctgggcagaagactcaccttggaggagtgggccctggagtcctgtccctcccagaagcccccagggtgggatttctcatgctgccagggcaggcccaggcctcatgaagaaagggaggcccctggcctctccgggatcagtcc

SEQ ID NO: 185940 - DNA, 1453 bp, Homo Sapiens
  misc_feature (966)..(1000): n is a, c, g, or t
ttggctctagggcaccgtgagggtggttgtcagctgtgaaggtgccacttacacactaagtcctccttccttgtggagggaagggctcaagtagcaaatattggagcccccgcttggtgctgggagctgtgacaggcagctcctgaagaagcagtttaattggaaccagtgaccatctaaaactgtttgtactctaaaccagattttacagaaatattggaatcatacctttatacttgattttttcattttagatagttaggcgtaaaggaagcctcctgagggtctggtctgatcctcctgatccttgaagagcttccagcatcattctcccttcatgctccccattttcataagtaactggtggcttgacatgctgggtttggtttgggagccctctgacaaactgaaagggtggatcaggaagcgtctgaccacaccactggtagacacgctctgcgtccaacaagtccttcccagcaacatgtagaaagcaaagtgcatgcttcattctaaggttgttgtctaaatgtttccctgtgtttcctttttgtaggatgtgttcttaatttgcttttcccttgtgagtcctgcatcatttgaaaatgtccgtgaaagtggtatcctgaggtgcggcaccactgtcccaacactcccatcatcctagtgggaactaaacttgatcttagggatgataaagacacgatcgagaaactgaaggagaagaagctgactcccatcacctatccgcagggtctagccatggctaaggagattggtgctgtaaaatacctggagtgctcggcgctcacacagcgaggcctcaagacagtgtttgacgaagcgatccgagcagtcctctgcccgcctcccgtgaagaagaggaagagaaaatgcctgctgttgtaaatgtctcagcccctcgttcttggtcctgtcccttggaacctttgtacgctttgctcnnnnnnnnnnnnnnnnnnnnnnnnnnnnnnnnnnncaacggtggagccttcgcactcaatgccaactttttgttacagattaatttttccataaaaccattttttgaaccaatcagtaattttaaggttttgtttgttctaaatgtaagagttcagactcacattctattaaaatttagccctaaaatgacaagccttcttaaagccttatttttcaaaagcgccccccccattcttgttcagattaagagttgccaaaataccttctgaactacactgcattgttgtgccgagaacaccgagcactgaactttgcaaagaccttcgtctttgagaagacggtagcttctgcagttaggaggtgcagacacttgctctcctatgtagttctcagatgcgtaaagcagacagcctcccgaatgaagcgttgccattgaactcaccagtgagttagcagcacgtgttcccgacataacatggtactgtaa

SEQ ID NO: 185941 - DNA, 1869 bp, Homo Sapiens
  misc_feature (423)..(457): n is a, c, g, or t
ctttgtacaaaaaagttggcttaatttgccttttcacttgtgagtcctgcatcatttgaaaatgtccgtgcaaagtggtatcctgaggtgcggcaccactgtcccaacactcccatcatcctagtgggaactaaacttgatcttagggatgataaagacacgatcgagaaactgaaggagaagaagctgactcccatcacctatccgcagggtctagccatggctaaggagattggtgctgtaaaatacctggagtgctcggcgctcacacagcgaggcctcaagacagtgtttgacgaagcgatccgagcagtcctctgcccgcctcccgtgaagaagaggaagagaaaatgcctgctgttgtaaatgtctcagcccctcgttcttggtcctgtcccttggaacctttgtacgctttgctcnnnnnnnnnnnnnnnnnnnnnnnnnnnnnnnnnnncaacggtggagccttcgcactcaatgccaactttttgttacagattaatttttccataaaaccattttttgaaccaatcagtaattttaaggttttgtttgttctaaatgtaagagttcagactcacattctattaaaatttagccctaaaatgacaagccttcttaaagccttatttttcaaaagcgccccccccattcttgttcagattaagagttgccaaaataccttctgaactacactgcattgttgtgccgagaacaccgagcactgaactttgcaaagaccttcgtctttgagaagacggtagcttctgcagttaggaggtgcagacacttgctctcctatgtagttctcagatgcgtaaagcagaacagcctcccgaatgaagcgttgccattgaactcaccagtgagttagcagcacgtgttcccgacataacattgtactgtaatggagtgagcgtagcagctcagctctttggatcagtctttgtgatttcatagcgagttttctgaccagcttttgcggagattttgaacagaactgctatttcctctaatgaagaattctgtttagctgtgggtgtgccgggtggggtgtgtgtgatcaaaggacaaagacagtattttgacaaaatacgaagtggagatttacactacattgtacaaggaatgaaagtgtcacgggtaaaaactctaaaaggttaatttctgtcaaatgcagtagatgatgaaagaaaggttggtattatcaggaaatgttttcttaagcttttcctttctcttacacctgccatgcctccccaaattgggcatttaattcatctttaaactggttgttctgttagtcgctaacttagtaagtgcttttcttatagaaccccttctgactgagcaatatgcctccttgtattataaaatctttctgataatgcattagaaggtttttttgtcgattagtaaaagtgctttccatgttactttattcagagctaataagtgctttccttagttttctagtaactaggtgtaaaaatcatgtgttgcagctttatagtttttaaaatattttagataattcttaaactatgaaccttcttaacatcactgtcttgccagattaccgacactgtcacttgaccaatactgaccctctttacctcgcccacgcggacacacgcctcctgtagtcgctttgcctattgatgttcctttgggtctgtgaggttctgtaaactgtgctagtgctgacgatgttctgtacaacttaactcactggcgagaatacagcgtgggacccttcagccactacaacagaattttttaaattgacagttgcagaattgtggagtgtttttacattgatcttttgctaatgcaattagcattatgttttgcatgtatgactta

SEQ ID NO: 185942 - DNA, 1301 bp, Homo Sapiens
ttggcgattgataaagtcacatatcaagaccaaccatcctgaggtctccatgagcaccatttctgaggttctcgggaggagggttcagctgaaagggctaattggaaagagagccatgaaatgcccatattgtgacttttatttcatgaagaatggctcagaccttcagcgtcatatttgggctcatgaaggtgtgaagcccttcaagtgttctttgtgtgagtatgcaactcgtagcaagagtaacctcaaggctcatatgaatcgtcacagcactgagaaaacccacctatgtgacatgtgtggcaagaaattcaaatcaaaagggacactgaaaagtcacaaactccttcacactgcagatgggaagcagtttaagtgcacggtgtgtgactacacagcggcccagaagccacagctgctgcggcacatggaacagcatgtctccttcaagcctttccgctgtgcccattgccattactcctgcaacatatctggctctctgaagcggcactacaacaggaagcaccctaatgaggagtatgccaacgtgggcaccggggagctggcagcggaggtgctcatccagcaaggtggtttgaagtgtcctgtttgcagctttgtatatggcaccaaatgggagttcaataggcacttgaagaacaaacatggcttgaaggtggtggaaattgatggagaccccaagtgggagacagcaacagaagctcctgaggagccctccacccagtatctccacatcacagaggccgaagaagacgttcaagggacacaggcagcggtggccgcgctccaggacctgagatacacctctgagagtggcgaccgactggaccccacggccgtgaacatcctgcagcagctccaaccacacggtcatgatccaggagacggtccagcaagcgtccgtggagcttgccgagcagcaccacctggtggtgtcctccgacgacgtggagggcattgagacggtgactgtctacacgcagggcggggaggcctcggagttcatcgtctacgtgcaggaggccatgcagcctgtggaggagcaggctgtggagcagccggcccaggaactctagaggacatgtggcatcggatggccacagggcggggctgccaggctctgcaggcacccagggtgggggaggccacccttcctgccctacccgcagaatggtgctctccctttgccctccctgcccagcagcctgataggactctcctagtcccaacttggggtggggcaaggcagtccagcatccaccatcataccacaggga

SEQ ID NO: 185943 - DNA, 937 bp, Homo Sapiens
ttggcgaggatccaggcgcaggaggacagagcaatgggtgagagaactcttcacgctgcagtgcccacaccaggttatccagaatctgaatccatcatgatggcccccatttgtctagtggaaaaccaggaagagcagctgacagtgaattcaaaggcattagagattcttgacaagatttctcagcccgtggtggtggtggccattgtagggctataccgcacaggaaaatcctatctcatgaatcgtcttgcaggaaagcgcaatggcttccctctgggctccacggtgcagtctgaaactaagggcatctggatgtggtgtgtgccccacctctctaagccaaaccacaccctggtccttctggacaccgagggcctgggcgatgtagaaaagagtaaccctaagaatgactcgtggatctttgccctggctgtgcttctaagcagcagctttgtctataacagcgtgagcaccatcaaccaccaggccctggagcagctgcactatgtgactgagctagcagagctaatcagggcaaaatcctgccccagacctgatgaagctgaggactccagcgagtttgcgagtttctttccagactttatttggactgttcgggattttaccctggagctaaagttagatggaaaccccatcacagaagatgagtacctggagaatgccttgaagctgattccaggcaagaatcccaaaattcaaaattcaaacatgcctagagagtgtatcagcatttcttccgaaaacggaagtgctttgtctttgaccggcctacaaatgacaagcaatatttaaatcatatggacgaagtgccagaaaaaatctggaaaggcatttccttatgcaatcagacaacttctgttcttatatcttcacccatgcaaagaccaagaccctgagagagggaatcattgtc

SEQ ID NO: 185944 - DNA, 1568 bp, Homo Sapiens
ttggagacaagtatcctgttgtgcacattgggaaacgctatctgaattcaggaggatttattggctatgctccatatgtcaaccgtatagttcaacaatggaatctccaggataatgatgatgatcagctcttttacactaaagtttacattgatccactgaaaagggaagctattaacatcacattggatcacaaatgcaaaattttccagaccttaaatggagctgtagatgaagttgttttaaaatttgaaaatggcaaagccagagctaagaatacattttatgaaacattaccagtggcaattaatggaaatggacccaccaagattctcctgaattattttggaaactatgtacccaattcatggacacaggataatggctgcactctttgtgaattcgatacagtcgacttgtctgcagtagatgtccatccaaacgtatcaataggtgtttttattgagcaaccaaccccttttctacctcggtttctggacatattgttgacactggattacccaaaagaagcacttaaactttttattcataacaaagaagtttatcatgaaaaggacatcaaggtattttttgataaagctaagcatgaaatcaaaactataaaaatagtaggaccagaagaaaatctaagtcaagcggaagccagaaacatgggaatggacttttgccgtcaggatgaaaagtgtgattattactttagtgtggatgcagatgttgttttgacaaatccaaggactttaaaaattttgattgaacaaaacagaaagatcattgctcctcttgtaactcgtcatggaaagctgtggtccaatttctggggagcattgagtcctgatggatactatgcacgatctgaagattatgtggatattgttcaagggaatagagtaggagtatggaatgtcccatatatggctaatgtgtacttaattaaaggaaagacactccgatcagagatgaatgaaaggaactattttgttcgtgataaactggatcctgatatggctctttgccgaaatgctagagaaatgactttacaaagggaaaaagactcccctactccggaaacattccaaatgctcagccccccaaagggtgtatttatgtacatttctaatagacatgaatttggaaggctattatccactgctaattacaatacttcccattataacaatgacctctggcagatttttgaaaaccctgtggactggaaggaaaagtatataaaccgtgattattcaaagattttcactgaaaatatagttgaacagccctgtccagatgtcttttggttctccatattttctgaaaagcctgtgatgaattggtagaagaaatggaacattacggcaaatggtctgggggaaaacatcatgatagccgtatatctggtggttatgaaaatgtcccaactgatgatatccacatgaaagcaagttgatctggagaatgtatggcttcattttatccgggagttcattgcaccagttacactgaaagtctttgcaggctattatacgaaggatttgcactactgaattttg

SEQ ID NO: 185945 - DNA, 1366 bp, Homo Sapiens
ttgtacaaaaaagttggggcagtgctaccataagagaagagatagacaagatcagctccaggcctgggaaagtgaaggacttttccagatttctcagaataaagtagcagttcttcttctagctggtgggcaggggacaagactcggcgttgcatatcctaaggggatgtatgatgttggtttgccatcccgtaagacactttttcagattcaagcagagcgtatcctgaagctacagcaggttgctgaaaaatattatggcaacaaatgcattattccatggtatataatgaccagtggcagaacaatggaatctacaaaggagttcttcaccaagcacaagtactttggtttaaaaaaagagaatgtaatcttttttcagcaaggaatgctccccgccatgagttttgatgggaaaattattttggaagagaagaacaaagtttctatggctccagatgggaatggtggtctttatcgggcacttgcagcccagaatattgtggaggatatggagcaaagaggcatttggagcattcatgtctattgtgttgacaacatattagtaaaagtggcagacccacggttcattggattttgcattcagaaaggagcagactgtggagcaaaggtggtagagaaaacgaaccctacagaaccagttggagtggtttgccgagtggatggagtttaccaggtggtagaatatagtgagatttccctggcaacagctcaaaaacgaagctcagacggacgactgctgttcaatgcggggaacattgccaaccatttcttcactgtaccatttctgagagatgttgtcaatgtttatgaacctcagttgcagcaccatgtggctcaaaagaagattccttatgtggatacccaaggacagttaattaagccagacaaacccaatggaataaagatggaaaaatttgtctttgacatcttccagtttgcaaagaagtttgtggtatatgaagtattgcgagaagatgagttttccccactaaagaatgctgatagtcagaatgggaaagacaaccctactactgcaaggcatgctttgatgtcccttcatcattgctgggtcctcaatgcagggggccatttcatagatgaaaatggctctcgccttccagcaattccccgcagtgctacaaatgggaagtcagagaccatcacagctgatgtcaatcacaacttgaaggatgccaatgatgtaccaatccaatgtgaaatctctcctcttatctcctatgctggagaaggattagaaagttatgtggcagataaagaattccatgcacctctaatcatcgatgagaatggagttcatgagctggtgaaaaatggtatttga

SEQ ID NO: 185946 - DNA, 1000 bp, Homo Sapiens
  misc_feature (908)..(944): n is a, c, g, or t
aacacaatagacatgaatgctccaaatgcctcttgctccatatcctccacaatattctgggctgcaagtgcccgataaagaccaccattcccatctggagccatagaaactttgttcttctcttccaaaataattttcccatcaaaactcatggcggggagcattccttgctgaaaaaagattacattctctttttttaaaccaaagtacttgtgcttggtgaagaactcctttgtagattccattgttctgccactggtcattatataccatggaataatgcatttgttgccataatatttttcagcaacctgctgtagcttcaggatacgctctgcttgaatctgaaaaagtgtcttacgggatggcaaaccaacatcatacatccccttaggatatgcaacgccgagtcttgtcccctgcccaccagctagaagaagaactgctactttattctgagaaatctggaaaagtccttcactttcccaggcctggagctgatcttgatcccttgtagcactgcctaatacctctcgaggcacaggttccattcgtgcatccacattcttttggtgagaagactggttaaaaccttcaatggccttttggaaaaagaagttcagctcctcaaagttcatggcctggagctctgcataaagttctacctgttgggcttcttcaagctcattccagaaacgtagtaggtgctcttgcccagctttggacaacgtgagtttgaggtcattaatgttcataatgctctaatagccaagctttgtagaaataggggtgtaatgtatgtacctgtaaacctttctcggcgcgaccgcagctacgaccgtctccagctccttccgcgcggccactcatcggcgtcccgcgctcgctccgaatatataccctcatcnnnnnnnnnnnnnnnnnnnnnnnnnnnnnnnnnnnnngccaagtggagcgccagccccggccaccccgcccctctcgccacgactagtgccaa

SEQ ID NO: 185947 - DNA, 924 bp, Homo Sapiens
actttgtacaaaaaagttggggagctggagacggtcgtagctgcggtcgcgccgagaaaggtttacaggtacatacattacacccctatttctacaaagcttggctattagagcattatgaacattaatgacctcaaactcacgttgtccaaagctgggcaagagcacctactacgtttctggaatgagcttgaagaagcccaacaggtagaactttatgcagagctccaggccatgaactttgaggagctgaacttctttttccaaaaggccattgaaggttttaaccagtcttctcaccaaaagaatgtggatgcacgaatggaacctgtgcctcgagaggtattaggcagtgctacaagggatcaagatcagctccaggcctgggaaagtgaaggacttttccagatttctcagaataaagtagcagttcttcttctagctggtgggcaggggacaagactcggcgttgcatatcctaaggggatgtatgatgttggtttgccatcccgtaagacactttttcagattcaagcagagcgtatcctgaagctacagcaggttgctgaaaaatattatggcaacaaatgcattattccatggtatataatgaccagtggcagaacaatggaatctacaaaggagttcttcaccaagcacaagtactttggtttaaaaaaagagaatgtaatcttttttcagcaaggaatgctccccgccatgagttttgatgggaaaattattttggaagagaagaacaaagtttctatggctccagatgggaatggtggtctttatcgggcacttgcagcccagaatattgtggaggatatggagcaaagaggcatttggagcattcatgtctattgtgttgacaacatattagtaaaagtggcagacccacggttcattggattttgcatt

SEQ ID NO: 185948 - DNA, 1714 bp, Homo Sapiens
  misc_feature (1441)..(1451): n is a, c, g, or t
ttggcctgaagccgttcttcttcccttccaacggcctggccagtgggccccactgcacaagggctgtgatcagggagctggtgcacgtgatcacacgggtgctgctgagtggctcggacaagggccgggcaggcaccctgagtccggggctcgggcctcagggcccgcgagtctgcgaagccagccctttcagtaggagccttcgctgccaaggaaaaaacaccccagagcgctcggggttaccgaagggctgtcttctgtacaaaaccctccaggtgcagatgttggacctgctggacatcgaaggcctctaccctctgtacaaccgggttgagcgatacctggaagagtttcccgaggagagaaaaaccttacaaatagatgggccttatgatgaagcattttaccagaagctgcttgacctttccactgaggatgacgggacagtggccttcgcgctaacgaaggtgcagcagtaccgcgtcgccatgactgccaaggactgctccatcatgattgcactgtctccctgtctgcaggatgccagctctgatcaaaggcctgtcgtcccttcatcgaggtccaggtttgccttttccgtgtctgtgctggaccttgacctcaagccctacgagagcattccccatcagtataaactggacggcaagatcgtcaactattattcaaagactgtacgtgccaaagacaacgccgtgatgtcgactcggttcaaggaaagcgaagattgcacattagttctccacaaggtctaactctttccctgcagtgtctttgaaacttgaacataatgtgaaggctgaatgatagagatattttctgttgtgttgggtgacctttggttgtgaatgtttttgcttttaaccccttttgaggtgggattgcctcttggagacatggaattgaagagcactagaaacaacttcctggacaaggaatgtaggaagtgagtgctgtgtcccaggaagctgctcacactcttaaaatggaagtgtccgttaagccctgggaagacgttctggatagttcttctttcccaaccagggctcatgtctgattctctaatgcgaaaagccttattctaagacccaaggtttggatctgctaccaccagactcctaacatagaaaacttgaattgtcacatacattttacagtttggacttttaagaaaacatggatactactggaacttcccccagctgagttacatggtcactttttcagtgcaagccacatatcaacacaggtttttaggtggttccctgctgcacagcgtgacctcgtggtcgcgcagatgccgattctgagcagtgtagactcagggtccctgtggaggtgctgaagcccacagttccacacagggcagcagggagcgcaaggctcaggtcaggatggacaccactcatgcgagcattgaccnnnnnnnnnnngctttacaatttaatctttcacatgagggggagatgagctgttctttcccactaaaaattgctgctgtagaagttggaggtggagctgtgactggctgagctgctgtggccgggctgggcagtgtgccccaacagctcaatgctttcctgacactccagtgtctggggtggttgaggagcgagttctctctttcctcccagaccaagttctccctcggggtttgccttgagacgtgttgcgtttttgggccccgtgggcctct

SEQ ID NO: 185949 - DNA, 2573 bp, Homo Sapiens
ttggagtttagccagtattatgtattacaaagaaagatttcactgttaaagtagacaaaaaatgttctttgaatttatacattgattttaaaaacttctgaaaagttgattcttttaaataaagatgttatgtaaagatggatctccccaccacctctcattttccttttttagcagttaggacttcaggaattatttcctcaaggtcatagctgtgctgtttgtggtaaagtgaaatgtaaacgacataggtaagttaaatatttttttatttgttgatccttctaattacatttggatttcaagtgatttagttgtataatttttctttaggccttctttgctacttgaaaactaccagccatggctagacctgaaaatttcttccaaggttgatgcatctctctcagaggttcttgaattagtgttggaaaactttgtttatccgtggtacagggatgtgacagatgatgaatcctttgttgatgaactgagaataacattacgtttttttgcatctgtcttaataagaaggattcacaaggtggatattccatctattataaccaagaaactattaaaagcagcaatgaagcatatagaagtgatagttaaagccagacagaaagtaaaaaatacagagtttttacagcaagctgctttagaagaatatggtccagagcttcatgttgctttgagaagtcgaagagatgaattgcactatttaaggaaacttactgaactgctttttccttatattttgcctcctaaagcaacagactgcagatctctgaccttacttataagagagattctgtctggctctgtgttccttccttctttggatttcctagctgatccagatactgtgaatcatttgcttatcatcttcatagatgacagtccacctgaaaaagcaactgaaccggcttctcctttggttccattcttgcagaaatttgcagaacctagaaataaaaagccatctgtgctgaagttagaattgaagcaaatcagagagcaacaagatcttttatttcgttttatgaactttctgaaacaagaaggcgcagtgcacgtgttgcagttttgtttgactgtggaggaatttaatgatagaattttacgaccagaattatcaaatgatgaaatgctgtctcttcatgaagaattgcagaagatttataaaacatactgtttggatgaaagtattgacaaaattagatttgatcccttcattgtagaagagattcaaagaattgctgaaggcccatacatagatgttgtgaaacttcaaactatgagatgtctttttgaagcatatgaacatgttctttcccttttggagaatgtatttactcctatgttctgccatagtgatgagtatttcagacaacttttaagaggtgcagaatcaccaacacgcaattcaaaattgaacagaggtagcctaagtttggatgattttcggaacacacagaaaaggggagaatcatttggaatcagcagaataggtagcaaaattaaaggagtattcaaaagtaccacaatggagggagctatgttgcctaattatggtgtagctgaaggtgaagatgattttattgaagaaggtattgttgtaatggaagatgattctccagtggaggctgtgagcacacctaatactccccgaaaccttgctgcatggaaaattagcattccatatgtagacttttttgaggatccctcctctgaaaggaaggagaaaaaagaaagaattcctgtgttttgtattgatgttgaaagaaatgatagaagagcagttggacacgagcctgaacattggtctgtctatagaagatatcttgaattctatgtacttgaatcaaaactaacagaatttcatggtgcatttcctgatgcccagcttccttctaagaggatcattggccccaaaaattatgaattcttaaagtcaaagagggaagagttccaagaatatctacagaaacttctgcagcatccagaactgagtaatagtcaacttctggcagactttctttcccctaatggtggggaaacacaatttcttgataagatactaccagatgtaaatcttgggaaaattataaaatctgttcctggaaaactaatgaaagagaaaggtcagcatttggaaccttttatcatgaatttcattaattcttgtgagtctccaaagcctaaaccaagtagaccagaactgaccattctcagccctacttcagaaaacaacaagaagcttttcaatgatctgtttaaaaataatgcaaaccgtgctgaaaatacagagagaaagcaaaatcagaattattttatggaggtgatgactgtagaaggagtctatgattacctgatgtatgtaggacgggtagttttccaggttcctgactggcttcatcatctcttaatgggaactcgaatcctctttaaaaacaccctggaaatgtatactgattactatcttcagtgtaaactagaacagctatttcaagagcaccgtttgggtctcactcataacacttctcagagatgctatattctgtgaaaac

SEQ ID NO: 185950 - DNA, 995 bp, Homo Sapiens
ttggcattgctgagacttccatcacaatcaatgacatcgtgcatgtggtggacagtgggctgcacaaggaagaacgctatgacctgaagaccaaggtgtcctgcctggagacagtgtgggtatcaagagccaatgtgatccagcgccggggccgggcgggccgctgccagtccggctttgcctaccacttgttccctcgaagccggctggagaaaatggtccctttccaagtgccagagatcctgcgcacacctcttgagaacctggtgctgcaagcgaaaatccacatgcctgagaagacggcggtggagttcctgtccaaggctgtggacagtccaaacatcaaggcagtggacgaggctgtgatcttgctccaggagatcggggtgctggaccagcgggagtacctgactaccctggggcagcgcctggctcacatctccaccgacccccggttggccaaggccattgtgttggctgccatcttccgttgcctgcacccactactggtggtcgtttcctgcctcacccgggaccccttcagcagcagcctacagaaccgggcagaggtggacaaggtgaaagcactgttgagccatgacagcggcagtgaccacctggcctttgtgcgggctgtcgccggctgggaggaggtgctgcgttggcaggaccgcagctcccgggagaattacctggaggaaaacctgctgtacgcacccagcctgcgcttcatccacggactcagtcgggcccacacctgctctcctgagcccctcccacccccactgagtttctgtcacctccagcctgtggctaggggctgtaggtccaccacacattctgtctccctaggactcatcaagcagttctcagagaacatttatgaggccttcctggtggggaagccctcggactgcaccctggcctccgcccagtgcaacgagtacagtgaggatgaggagctggtgaaagggcgtgctgatgggccggcctct

SEQ ID NO: 185951 - DNA, 2916 bp, Homo Sapiens
  misc_feature (1670)..(1960): n is a, c, g, or t
ttggctactttacaatgatccgttcttccccctctccttcctggtcaacagctggctcccagggatgctggatgacctctttcagtccatgttcctgtgcgccctgctgctcttctggctgtgcgtgtaccacgggattcgtgtccagggagaaagaaagtgtttaactttctatttgcctaaattcttcattgttggactattgtggttggcttctgttacgctaggaatatggcaaacagttaacgaattacatgatccaatgtaccagtatcgagttgataccggaaattttcagggaatgaaggtcttcttcatggtggtggcagcggtgtacattctgtacctcttgttcttgatagtgcgggcgtgttccgagctacgtcacatgccttatgtggatctcaggttgaaatttttgactgcattgactttcgtagtacttgtcattagcatcgccatcctttatttgagatttggggcgcaagtactacaagacaattttgtagcagagctgtcaactcactaccagaattcagccgagttcttatctttctatggcctgttgaacttctatctctacaccttggcctttgtatattctccatcgaagaatgccctctatgagtcccagctgaaagacaatcctgccttctccatgctgaatgactcggatgatgatgtgatttatgggagtgactatgaggaaatgccgctgcagaacggccaggccatccgggccaagtacaaggaggagtcagatagtgactgagccccggccagcccagcgaggcgacaagatgcctggatgctttccccggtgaccgtctgctgaccttcccctgttatattcagatttttcttacaagcagagatttcctgttcatttgtttacatatttttttaaaggaaaaccaaaactgagggtaaatttaaatgtttagccaaatttattgtcatggtggctacgagaagaggcattgataacaagtttcaacagccaaatccttttttacagagatttcagatgagcgtgttttcagtgatgaggaaatttcacgtttttagtacagtgaattatgtacttttttttcctgtaatcattcactgattccaagttcacgggcagcctgtgactaggtcctcagcgtgacagcatcaccctctttcttcccttttccatggtactgttttgtgaccctttaaactcaaagggaagccttatctgtggctgcttcagggcagtccttcctcgttgagtggccagtgccctgggtaaccaggtggctgaagtgattggtcagttatgtggactgcgttttgtgcagtgtgtgagttatgactcatcgggaatgggagatgctggggttccaacccttcacgtcaccaaaggggaagtaatagtgtggagttctgaggagggtttgataagttgaataaggaaaggctaagataatttacaggttaccaactcatgtggggaaggtcttactgccatggtgcttttcaggggcctgtgtgtacacacatgattaaatggatttgcctgtgggaggtatgggcaggagaggaacccttaccattccagtaaatagcagtttctgcaattctgttgaatatgaaatgccatagagctttatttatttatgtaagtaaaagctaaatgaggnnnnnnnnnnnnnnnnnnnnnnnnnnnnnnnnnnnnnnnnnnnnnnnnnnnnnnnnnnnnnnnnnnnnnnnnnnnnnnnnnnnnnnnnnnnnnnnnnnnnnnnnnnnnnnnnnnnnnnnnnnnnnnnnnnnnnnnnnnnnnnnnnnnnnnnnnnnnnnnnnnnnnnnnnnnnnnnnnnnnnnnnnnnnnnnnnnnnnnnnnnnnnnnnnnnnnnnnnnnnnnnnnnnnnnnnnnnnnnnnnnnnnnnnnnnnnnnnnnnnnnnnnnnnnnnnnnnnnnnnnnnnnnnnnnnataaagctacatgaaagattgatagaatattttagattatttattggccaaaagtttttaaaactcatatttggaagcaaaatgaaaagcaagtaaaatgttttaaatggttcatggaaaacgtatttgggtagaaggcaactcgtgcttccggaaggggttccctgtcctccatgtgtccacatggcggtcaggtagggacgacctgttctgtaaagtccttggcactgctgaatctgtggcatcatagaaggccctggagcttccccgttcctttcagtcagggactccatatagagtctcatgtggacgtctcccgtgctttcctcttgacctctacagtcacacttctgttaacatctggtaactgtgggcaacctgactgatgccgtcttggcaattgaggtccagaagatgatagttccgcaacgcaagcagtacctactttttttcttcatctatgcattgactctcagattaccatgcagagcttcacgttatcatccacgttaagtagtgctaggtaggaccttagagatgttcatgagaaactatttgttatgactttcctttgtatctttccttttaatttaaactttaatgataatgtacttttaatatggattctattcacatttgttttaaaaaccttgtaaatatgaatgtttaagacaacttactgcaagggtaattcaagtttacatgatttttaaatttgcaatgatgttttttttattctgtgtattgaaaaaaattttctgttaccaaattttacaacttctaataagactactataactttatgtaaactgatgaagatgtgctgattaacatattctgtgatatggtttacaacttttaatcataattgtccatgattttggaatgctgttatttatcagtaaatgtaaaatatttgaggcatttagccatacacccaacttttttgtacaaag

SEQ ID NO: 185952 - DNA, 1196 bp, Homo Sapiens
ttggcacatttgttttaaaaaccttgtaaatatgaatgtttaagacaacttactgcaagggtaattcaagtttacatgatttttaaatttgcaatgatgttttttttattctgtgtattgaaaaaaattttctgttaccaaattttacaacttctaataagactactataactttatgtaaactgatgaagatgtgctgattaacatattctgtgatatggtttacaacttttaatcataattgtccatgattttggaatgctgttatttatcagtaaatgtaaaatatttgaggcatttagccatacacacactagaactttttaaaactttgtcctatagtgtaattataaactgatgactattatcttcatacattgagtcttcatgcatcaatgaaatgaaaaatataggattatttatttactttttgtaactaagtgggaaataagaaaaaaagttagaaagtacttaaggggaaaatcgttcttactaagtcatgtattttcaacttgtcttccctggtatatcataaataccgacatattacataccccatgtaaaattttgcttaaactctctagcacttggcatgtagaatatgtaccataggtatcaggttaaaacactaaagtctgccagaaacttttgacagtagcaagaaaattgttgaagaaaaaataaattatttactgagggtagttatgttaaagttttgcgaacttaaagggctgactttagttccttcatggtaatggcttgagtaacatcatctttgggattttttaaatactggtccagtctaggagaacctggaagatgaccagaggtatttcagtttccctagggagagcttcgttatccatgtggatgataagtctgcttgatttattattaaatcattatagcagtgaagtggtgccattttctctctcttaagccccatttgaaaggctagagaaggggatatatatactatgttcaaggtttgtaaggttgttaatgtacataattgcagattgcaataaaagcttagatacattttgtaaacccaacccactaaatgagcaggttacaagacaaatgtcaccagcctcaagtattttatgaactatttactgagggtagttatgttaaatagattataaatgtggtaaattatttcctgaatcctttatcacaggaaaaacacagac

SEQ ID NO: 185953 - DNA, 1477 bp, Homo Sapiens
ttggcatcaacgcaattgcaactccggctggagccccggacctgcaagcctgggtgtccgtgggtccgtctgcccagccatctgctggtggcacctctccctcctgccgcctccctcggtgaaccccaccttgcagaagtgcagctcgcccggagcagcccaggagctcagcatgcgtcccccaggcttcaggaacttcttgctgctggcgtcctcccttctctttgctgggttgtcagctgttcctcaaagcttctcgccatctctgaggagctggccgggcgccgcctgcaggctgtcccgggccgagtcggagcgacgctgccgcgcacctgggcagcccccgggggccgcgctgtgccacggccggggccgctgcgactgcggcgtctgcatctgccacgtgactgagccgggcatgttcttcgggcccctgtgtgagtgccatgagtgggtgtgcgagacctacgacgggagcacctgtgcaggccatggtaagtgtgactgtggcaagtgcaagtgtgaccagggatggtatggggatgcttgccagtacccaactaactgtgacttgacaaagaagaaaagtaaccaaatgtgcaagaattcacaagacatcatctgctctaatgcaggtacatgtcactgtggcaggtgtaagtgtgataattcagatggaagtggacttgtgtatggtaaattttgtgagtgtgacgatagagaatgcatagacgatgaaacagaagaaatatgtggaggccatgggaagtgttactgtggaaactgctactgcaaggctggttggcatggagataaatgtgaattccagtgcgatatcaccccctgggaaagcaagcgaagatgcacgtctccagatggcaaaatctgcagtaacagagggacttgtgtatgtggtgaatgtacctgtcacgatgttgatccgactggggactggggagatattcatggggacacctgtgaatgtgatgagagggactgtagagctgtctatgaccgatattctgatgacttctgttcaggtcatggacagtgtaattgcggaagatgtgactgcaaagcaggctggtatgggaagaagtgtgagcacccacagtcctgcacgctgtcagctgaggagagcatcaggaagtgccagggaagctcggatctgccttgctctgggaggggtaaatgtgaatgtggcaaatgcacctgctatcctccaggagatcgccgggtgtatggcaagacttgtgagtgtgatgatcgccgctgtgaagacctcgatggtgtggtctgtggaggccacggcacatgttcctgtggtcgctgtgtttgtgagagaggatggtttggaaagctctgccaacatccgcggaagtgtaacatgacggaagataaagcaagatctgtgtgaatcagcagatggcatattgtgctcggggaagggttcttgtcattgtgggaagtgcatttg

SEQ ID NO: 185954 - DNA, 2420 bp, Homo Sapiens
  misc_feature (2131)..(2140): n is a, c, g, or t
ttggggagtgttcagcgaaaaacctgaagaacatatcagagctcttttattacgcacagaaagctgttcttcatcctacagggcccctgtactgcccagaggagaaggagatgaaaccagcttgtataaaagcccttactcgtatatttaaaatatctgatcaagataatgatggtactctcaatgatgctgaactcaacttctttcagaggatttgtttcaacactccattagctcctcaagctctggaggatgtcaagaatgtagtcagaaaacatataagtgatggtgtggctgacagtgggttgaccctgaaaggttttctctttttacacacactttttatccagagagggagacacgaaactacttggactgtgcttcgacgatttggttatgatgatgacctggatttgacacctgaatatttgttccccctgctgaaaatacctcctgattgcactactgaattaaatcatcatgcatatttatttctccaaagcacctttgacaagcatgatttggatagagactgtgctttgtcacctgatgagcttaaagatttatttaaagttttcccttacataccttgggggccagatgtgaataacacagtttgtaccaatgaaagaggctggataacctaccagggattcctttcccagtggacgctcacgacttatttagatgtacagcggtgcctggaatatttgggctatctaggctattcaatattgactgagcaagagtctcaagcttcagctgttacagtgacaagagataaaaagatagacctgcagaaaaaacaaactcaaagaaatgtgttcagatgtaatgtaattggagtgaaaaactgtgggaaaagtggagttcttcaggctcttcttggaagaaacttaatgaggcagaagaaaattcgtgaagatcataaatcctactatgcgattaacactgtttatgtatatggacaagagaaatacttgttgttgcatgatatctcagaatcggaatttctaactgaagctgaaatcatttgtgatgttgtatgcctggtatatgatgtcagcaatcccaaatcctttgaatactgtgccaggatttttaagcaacactttatggacagcagaataccttgcttaatcgtagctgcaaagtcagacctgcatgaagttaaacaagaatacagtatttcacctactgatttctgcaggaaacacaaaatgcctccaccacaagccttcacttgcaatactgctgatgcccccagtaaggatatctttgttaaattgacaacaatggccatgtatccgcacgtgacacaagctgacctcaagagctccacgttttggcttcgagcaagttttggtgctactgtttttgcagttttgggctttgctatgtacaaagcattattgaaacagcgatgatataaaaagaaatactgtccctaccaaaaacaaatacttttatgtacattctgaatgctttaagttctgctagaattattgagatatttatacatgcagagttactttattaatatttgtaattcatgcataagagtattttaatgatagttataactgcagtattggctagcatatggaaagaaaacagctaacagccaaactaaaatggctaaattccagaggccaaaagggaatattttgtaaatatatgtacatattcaggcaagatatggtctcccaagctgagttctagaaatgatgtttctagacatttctaagtggtattgttagtgctcacttggctcactcttctaggtttaagttagcccagagattgtatttactcatggatcactttatttatttcacatttactcagaatgatcctttgggttctataaggacataaggtacaatttgccattgtctctccatttttaaaaacatacaagtcagtgtcagcttaccaacatgacattttttcagtcagttgtggtaggccagccttgaagccatcgcacagtctagaaacttgtgtagctgagtgtgcagctcacctttaagggtgaagttaggtaaaagcaattagcagaggcgttatctatgtgattatgttgcttccttgtcagtatgttgaattttatagccctttcaatgaaatnnnnnnnnnntttgtatattaccaatgtttttagtttaaataaagagtcacccttaatactgttgaattttattccaagtgtaaatcattttataaagggtgtgtttgttatagtattttacagtaaatgcatgtgtccccaagtgttttatatccgggttgggtaacctaggggccgtaattttttaaatgataaaataaatttaaagaatataaactttcaagataaacctattttttccatcatcagccttttcaagtatttaaataaataaatgctgtgtattgtg

SEQ ID NO: 185955 - DNA, 935 bp, Homo Sapiens
ttggcctttccagaagttcctggggctccgtgttgcagttcaggactccttgcttcttggaccctactatttatcctggactagcttgggttggtgatcatgtctcctcttgtcaggctacagagtggtggaagaggacacacacacatctcctccatgttcctgccacagggccccttccttaagtaatgacttatctccttccagttgccacctgttggagccaagaatgtattagtttgtggtgacactgggttagctcagcatggatttcccttatccgatgatttttctacatttacttggccaatttggggaacagacctccactgtgattccatactctctctttgctttcactatcccagggatgggaggcggagggtagagatgaactcactgagcagccagagccaaatgcaatcggtacgaatcttagaaggaaggagggggagcccaggtatgagaaagaaaaaaccactaagaaaatacctccctgggaggatgagctggggccctttttcttttgctggatggttcctttatgcagcttggccctgtctaccgagatgcccatctcttcctgcctgctagcctgctagaccctcaaactgggtgggttctgtgtcaataaaaagcttcaccccctggctgagtgaggtggtcccctgcaatcactgtttgtcccctacccacccaacctgtccctgcctgctcccagcccactcatccttatgtgctagggataaatcaagagtcctcagcactccacattcccaaaaaatcccaggaactcctaaaccttcccctgtgacagaagatgaagttggcagctgatcagacctcaataattttatactgtaataagctctttgaatgtgtatattattattttttacaatcatttcattttgtatttaatatcaatggactga

SEQ ID NO: 185956 - DNA, 1482 bp, Homo Sapiens
  misc_feature (824)..(837): n is a, c, g, or t
ttggctgggtcctaaggctgaagagattctgcagacatacttgaaatccaaggagtctatgactgatgcaattctccagacagaccagactctcacagaaaaagaaaaggagattgaaggtgaggagtgagttaagagattagatggcctcaaaagctccaaaaattgaaataacttgactggataaacatgggaccctttaactagagcaagatccacaaaggtgtgtcttacttgccgaggtcatctctgagtaaggcatatgcagtcaacaacaatgacaggtaagtgtataaggaagaatgaggcaacaagataaccccacacaaatttttcttcttccttttcctcctcagtggaacgtgtgaaagctgagtctgcacaggcttcagcaaaaatgttgcaggaaatgcaaagaaagaatgagcagatgatggaacagaaggagaggagttatcaggaacacttgaaacaactgactgagaagatggagaacgacagggtccagttgctgaaagagcaagagaggaccctcgctcttaaactttaggaacaggagcaactactaaaagagggatttcaaaaagaaagcagaataatgaaaaatgagatacaggatctccagacgaaaatgagacgacgaaaggcatgtaccataagctaaagaccagagccttcctgtcacccctaaccaaggcataattgaaacaattttagaatttggaacaagcgtcactacatttgataataattagatcttgcatcataacaccaaaagtttataaaggcatgtggtacaatgatcaaaatcatgttttttcttnnnnnnnnnnnnnngactgtaaattgtgcaacaaagatgcatttacctctgtatcaactcaggaaatctcataagctggtaccactcaggagaagtttattcttccagatgaccagcagtagacaaatggatactgagcagagtcttaggtaaaagtcttgggaaatatttgggcattggtctggccaagtctacaatgtcccaatatcaaggacaaccaccctagcttcttagtgaagacaatgtacagttatccattagatcaagactacacggtctatgagcaataatgtgatttctggacattgcccatgtataatcctcactgatgatttcaagctaaagcaaaccaccttatacagagatctagaatctctttatgttctccagaggaaggtggaagaaaccatgggcaggagtaggaattgagtgataaacaattgggctaatgaagaaaacttctcttattgttcagttcatccagattataacttcaatgggacactttagaccattagacaattgacactgggattaaacaaattcacataatgccaaatacacaatgtatttatagcaacgtataatttgcaaagatggactttaaaaggatgctgtgtaactaaactgaaataatttcaattacttattatttagaa

SEQ ID NO: 185957 - DNA, 1430 bp, Homo Sapiens
ttggagaagcttccacagaagcctgagctcctccttgcaggcccctgtagtcagtacagtgggcatgcagcgcctcgggacgactacagtgcatattacagacaaattgaagagctgcgaagtcagattaaggatgctcaactgcaaaatgctcggtgtgtcctgcaaattgataatgctaaactggctgctgaggacttcagactgaagtatgagactgagagaggaatacgtctaacagtggaagctgatctccaaggcctgaataaggtctttgatgacctaaccctacataaaacagatttggagattcaaattgaagaactgaataaagacctagctctcctcaaaaaggagcatcaggaggaagtcgatggcctacacaagcatctgggcaacactgtcaatgtggaggttgatgctgctccaggcctgaaccttggcgtcatcatgaatgaaatgaggcagaagtatgaagtcatggcccagaagaaccttcaagaggccaaagaacagtttgagagacagactgcagttctgcagcaacaggtcacagtgaatactgaagaattaaaaggaactgaggttcaactaacggagctgagacgcacctcccagagccttgagatagaactccagtcccatctcagcatgaaagagtctttggagcacactctagaggagaccaaggcccgttacagcagccagttagccaacctccagtcgctgttgagctctctggaggcccaactgatgcagattcggagtaacatggaacgccagaacaacgaataccatatccttcttgacataaagactcgacttgaacaggaaattgctacttaccgccgccttctggaaggagaagacgtaaaaactacagaatatcagttaagcaccctggaagagagagatataaagaaaaccaggaagattaagacagtcgtgcaagaagtagtggatggcaaggtcgtgtcatctgaagtcaaagaggtggaagaaaatatctaaatagctaccagaaggagatgctgctgaggttttgaaagaaatttggctataatcttatctttgctccctgcaagaaatcagccataagaaagcactattaatactctgcagtgattagaaggggtggggtggcgggaatcctatttatcagactctgtaattgaatataaatgttttactcagaggagctgcaaattgcctgcaaaaatgaaatccagtgagcactagaatatttaaaacatcattactgccatctttatcatgaagcacatcaattacaagctgtagaccacctaatatcaatttgtaggtaatgttcctgaaaattgcaatacatttcaattatactaaacctcacaaagtagaggaatccatgtaaattgcaaataaaccactttctaattttttcctgtttctga

SEQ ID NO: 185958 - DNA, 1118 bp, Homo Sapiens
ttggcctgaagctacaggtgctccctcctggaatctccaatggatttcagtcgcagaagcttccacagaagcctgagctcctccttgcaggcccctgtagtcagtacagtgggcatgcagcgcctcgggacgacacccagcgtttatgggggtgctggaggccggggcatccgcatctccaactccagacacacggtgaactatgggagcgatctcacaggcggcggggacctgtttgttggcaatgagaaaatggccatgcagaacctaaatgaccgtctagcgagctacctagaaaaggtgcggaccctggagcagtccaactccaaacttgaagtgcaaatcaagcagtggtacgaaaccaacgccccgagggctggtcgcgactacagtgcatattacagacaaattgaagagctgcgaagtcagattaaggatgctcaactgcaaaatgctcggtgtgtcctgcaaattgataatgctaaactggctgctgaggacttcagactgaagtatgagactgagagaggaatacgtctaacagtggaagctgatctccaaggcctgaataaggtctttgatgacctaaccctacataaaacagatttggagattcaaattgaagaactgaataaagacctagctctcctcaaaaaggagcatcaggaggaagtcgatggcctacacaagcatctgggcaacactgtcaatgtggaggttgatgctgctccaggcctgaaccttggcgtcatcatgaatgaaatgaggcagaagtatgaagtcatggcccagaagaaccttcaagaggccaaagaacagtttgagagacagactgcagttctgcagcaacaggtcacagtgaatactgaagaattaaaaggaactgaggttcaactaacggagctgagacgcacctcccagagccttgagatagaactccagtcccatctcagcatgaaagagtctttggagcacactctagaggagaccaaggcccgttacagcagccagttagccaacctccagtcgctgttgagctctctggaggcccaactgatgcagattcggagtaacatggaacgccagaacaacgaataccatatccttcttgacataaa

SEQ ID NO: 185959 - DNA, 1623 bp, Homo Sapiens
ttgggagacgcttacctgccgcttccccgcgccgcccggtgcacctggccgcaagggacctcgttctcagggaagacggcgacattccgcggaggtggaaccggcgcgcgccgtccgggctcggaccttccccggaacgtgggggcgccttagcgactccttccctgttgtgcccccgttcccggcgttcagcccggccccgcaaaggtgggacggctcccggcttcagttacggaagcggcccgtgtccagcgacgagggttcgaaaatgccccgcgcgttcctggtgaagaagccgtgcgtctccacgtgcaagaggaactggagcgagctccccgacgaggagcgcggcgagatctacgtgccagtcagcctgggcttctgcccaccacagccctaccgggagccggaaccctctgtggccgaacccccttcctgcccgctggctttgaacatgagccttcgagactctagctacagcatggcccccgggccctgtgtggtggcccagctgccctctgaagacatgggccacttgacagacccccagagcagagaccatggcttcctgcgcaccaagatgaaggtgacccttggggacagtcccagtggagacctgttcacctgccgtgtctgccagaaggccttcacctaccagcgcatgctgaaccgccacatgaagtgtcacaacgacgtcaagaggcacctctgcacgtactgcgggaagggcttcaatgacaccttcgacctcaagagacacgtccgaactcacactggcgtgcggccctacaagtgcagcctgtgtgacaaggccttcacgcagcgctgctctctggagtctcacctcaagaagatccatggtgtgcagcagaagtacgcgtacaaggagcggcgggccaagctgtacgtgtgtgaggagtgcggctgcacatctgagagccaggagggccacgtcctgcacctgaaggagcaccaccctgacagcccgctgctgcgcaagacctccaagaaggtggccgtggcactacagaacactgtcacttccctgctgcagggcagcccccacctgtgagtggctcgagccctgggggtgctcctggaagccccaagagcatccaggattgcctcccagctgcctggccagcccaccctcctgcaacctctcacccgaacaccagtgatcaggactggagcccccgtgccttggtctcccccctgggcacacgtgctcactcaggcccagcaatgacctctgctcatttttgcatttttgacttatgggccgaggctgttctgagcctgggaagatgtacctatgtcaagagaagggatgaggccaaggctgccttcaattagaagcagccgcccacagagacaggcactgtgtgcctggcagcaggacttcctacccagaggaggttcgagctaggatcccactgcccccgcctctcagcacagggcaggggctgcaggtccccagtggacatcagagtcaaaagcactggcaaagggtacccctgcaaacaactgtggtgggggctggcagcagaccccccacctggcagggcttctaatgctcagggttctggagggctctgtccttccggcaaggagaggcacaca

SEQ ID NO: 185960 - DNA, 3506 bp, Homo Sapiens
ttggttggctcgctgggaacgcacttcctgggacgctgagagggagacgctccaagaggctcctcagtgtgggcgagtaaaatgccctgcgtgtgagaagcaggctcagattattgctactctgtattcagatcttcatgtgtctcttctaagctgaataaagctgttttggaactgtcaggtacctcaaagctctgactgacagtactccacaagcttgcctgccatgggctgtcgggatgtccacgcagccacagtcctttccttcctgtgtggaatcgcctcagtagcaggcctctttgcagggactctgcttcccaactggagaaaattacgattgatcacattcaacagaaacgagaagaacctgactgtttacacaggcctgtgggtgaaatgtgcccggtatgacgggagcagtgactgcctgatgtacgacactacttggtactcatcagttgaccagctggacctgcgtgtcctccagtttgccctacccctcagcatgctgatcgccatgggtgccctgctgctctgcctgattggaatgtgcaacactgccttcaggtcctcggtgcccaacatcaaactggccaagtgtctggtcaatagtgcaggttgccacctggtggctgggctgctatttttcctggcaggtactgtgagcctctccccatctatctgggtcatcttttataacatccatctgaacaagaagtttgagccagtcttttcatttgactatgcagtgtatgtcactattgctagtgctgggggcctgtttatgacttcccttatactatttatttggtattgtacatgcaaatctttgccttctcctttctggcaaccattgtactcccatccacccagtatgcatacttactcacagccctattcagcacgctctcgcctctctgccattgaaattgacattccagtagtttcacacaccacttaatggggaaatagttaattgttaaagaaaacttcttgtagcctcacattccccttgtgcaaagagctcttttggacctacatacattttcctttgtttttgaccaatcaatgaagccaaatttatatgtcctagtagaatgaagtgctgctagtttttatgagaagtatattatattaaatgtgaattttttaaattttgcttcttatactggaaggaattttagccttcatattgatatctaattaattatttaagtggaagaggcctgcatcacaattgaggtaatgtagagcaacatgttaaagaatgatggttagcagaagctgttgtatacaatcttcatgaaaatttcagtgtgtatttttctttttctataatacctttaactgcaaagaaaaggcagtttcaaatataagaaatttatttcaggtaagggtaatattttaatagtagtcaataatctagcttaaggctgtaactcttctatcggggctaattgtatgaataggtgtcagtatgttgaagattactttcttttgtgactttcttctacctcatgccactgtttaaaagtaaaacgtattttaatgatgttagaataagactaccattctaaatatcacctacttatgaataacatgtaataatttttaacattaatgattccataaattgtattattgggattagaatgtgctttatgacaggttagtgtttcctctgaggcagaaaactcttttttggagatatcttccatcaagcagtactcgtgcccatatacaatctcttagtggctaggagaaataaataaaagggccataatggtttgttctctttcagacataatttagtaggggacaagaagtctgttcttcagtgagtacactagagatttactctggtgactgccttttgagttatgggtgaagtaaggtatggctttaccataaccttgattcattcacccttgattcatttctcgcccccgtcactgattatttccttgagcatatatctctgcctaacactttagtaggtgctatagaggatacatgaaaagtatgagatctggttccatccagtaagacattttaatagagaagatcaaaatgttacctggcagttggggaataatctgacttcgttggcagttggccttaacttcttaatcattgatccaggaatatttcaaccagagacacaactttctggcagacagacaaattgtacaacaccaacaatatcctggaccttgaaattctgtttacttcagtccattgtatcctttaaggcacctgtgctagcctagattttgtaataacactgatttatgagaatggacaaaagtggtagggaaattgttccctctccacttctgaaagtatgatgatgtattaaggatggaggagttattaaaaatgtctcttctgatgaggtaacaattagatgaaaccatgttaaagctgagatgaacacttagaaattcagggatattgggtctttagccttatgaatttgagctgcttatttaattggtgtaatttactacatattagtactatattcgtaaggattttttattaaccattacagattttacaaacagctagttatatggtaaacagattattatgcctttttgcaattctgaatatgattctagtatttgtgtagatgtatttggtactttttcccctaattccaacactagtttatatatatagcgaataaatctagttgtataaatttttaaatgccgtcagtagaaagcacacaaggttatgatttttttaattactggcttctgatttctttcacttctgatccttttcctttttctcagatgtagctgagtcttgatcattttaagacaacgatgggtagaattttgagattaatgttaattttccctttttgttaatttcagtcccctctcactatgcttttgtccagaaggatcaagaattctaccatcccttgggtctttgtgtataaacaatgttaaataaaggtagactcagtctttaagatattagacagtttttttagtccatgggattgtaaatataaacattaactttcctataagaatattttggctttgtaatctatagcctcaaattggtatttattatggattcactagacaaacagctgtttccttattgtcttttttctttagtgtttctgatttgctatcagtagctgtttttaaagccatccaaggaaaataattatttacagtttttgaagtcacttttgagccctcatcaagctctcattgtgatgggagggatacctttttgttgttaaaagcctattattgttaaaggccttttatggaaaccaacttggaaaacaaccttaaatgtggatgtatcagatttggtttatccagccatggggagagaaaacaaacctaagtttactttacttgtacatatacactacaatgggatagtatatttgctgtaacctacaatgtaaaacctccaataaaagtgcgcctgtacttcttattgtttattaaagatgtattttttcc

SEQ ID NO: 185961 - DNA, 2609 bp, Homo Sapiens
ttggcgcttccggctcgcgcgtctagtccctttcccggccggcggccgagggggcatcatgaagcgggctggcggcgctgccgctcccgggcggccgcgggcgggaggtgcttcccaaggaccgtagatgcctctctagagcatgagctcaggcaagagtgcccgctacaaccgcttctccggggggcccagcaatcttcccaccccagacgtcaccacagggaccagaatggaaacgaccttcggacccgccttttcagccgtcaccaccatcacaaaagctgacgggaccagcacctacaagcagcactgcaggacaccctcctcctccagcacccttgcctactccccgcgggacgaggaggacagcatgccccccatcagcactccccgccgctccgactccgccatctctgtccgctccctgcactcagagtccagcatgtctctgcgctccacattctcactgcccgaggaggaggaggagccggagccactggtgtttgcggagcagccctcggtgaagctgtgctgtcagctctgctgcagcgtcttcaaagaccccgtgatcaccacgtgtgggcacacgttctgtaggagatgcgccttgaagtcagagaagtgtcccgtggacaacgtcaaactgaccgtggtggtgaacaacatcgcggtggccgagcagatcggggagctcttcatccactgccggcacggctgccgggtagcgggcagcgggaagccccccatctttgaggtggacccccgagggtgccccttcaccatcaagctcagcgcccggaaggaccacgagggcagctgtgactacaggcctgtgcggtgtcccaacaaccccagctgccccccgctgctcaggatgaacctggaggcccacctcaaggagtgcgagcacatcaaatgcccccactccaagtacgggtgcacgttcatcgggaaccaggacacttacgagacccacctggagacttgccgcttcgagggcctgaaggagtttctgcagcagacggatgaccgcttccacgagatgcacgtggctctggcccagaaggaccaggagatcgccttcctgcgctccatgctgggaaagctctcggagaagatcgaccagctagagaagagcctggagctcaagtttgacgtcctggacgaaaaccagagcaagctcagcgaggacctcatggagttccggcgggacgcatccatgttaaatgacgagctgtcccacatcaacgcgcggctgaacatgggcatcctaggctcctacgaccctcagcagatcttcaagtgcaaagggacctttgtgggccaccagggccctgtgtggtgtctctgcgtctactccatgggtgacctgctcttcagtggctcctctgacaagaccatcaaggtgtgggacacatgtaccacctacaagtgtcagaagacactggagggccatgatggcatcgtgctggctctctgcatccaggggtgcaaactctacagcggctctgcagactgcaccatcattgtgtgtgacatccagaacctgcagaaggtgaacaccatccgggcccatgacaacccggtgtgcacgctggtctcctcacacaacgtgctcttcagcggctccctgaaggccatcaaggtctgggacatcgtgggcactgagctgaagttgaagaaggagctcacaggcctcaaccactgggtgcgggccctggtggctgcccagagctacctgtacagcggctcctaccagacaatcaagatctgggacatccgaacccttgactgcatccacgtcctgcagacgtctggtggcagcgtctactccattgctgtgacaaatcaccacattgtctgtggcacctacgagaacctcatccacgtaaggcctgggcatctgggtgcaaggccagactgtggccccgtctcccccgccttgctcagtgtctttgacctgcctgtgcccacccctcccaggtgtgggacattgagtccaaggagcaggtgcggaccctcacgggccacgtgggcaccgtgtatgccctggcggtcatctcgacgccagaccagaccaaagtcttcagtgcatcctacgaccggtccctcagggtctggagtatggacaacatgatctgcacgcagaccctgctgcgtcaccagggcagtgtcaccgcgctggctgtgtcccggggccgactcttctcaggggctgtggatagcactgtgaaggtttggacttgctaacaggatccaggccaggctgtggtttcccctgaaccagccctggacctttctgagccaggctggccacatggggtggtctcggggtttctgcctgccccgtgggcataggtggacaggctctggcagccgggcagtgccctccccgtcccatgctcggcgagcctccctctactcggcactgtccttgctgcccagcccctctctgggtgccaggtacgacgcttgccccggcccaccctcatccccaccctccatccccaccctagatgggagcgagggcctttttactcaccttttctacccgtttttagactgtatgtagatttggttaccttcctggtttgaaaataaaatgctcc

SEQ ID NO: 185962 - DNA, 1706 bp, Homo Sapiens
ttgggtgttattgactatgaccgggatcgatttgacagagaacgccgaccccgagatgatagagctcagtcatatcgagacaaaaaagaccattcctcatccagaagagggggttttgataggccatcctatgaccggaagtctgaccgaccagtctatgaaggaccatccatgtttggaggagaacgaaggacttatcctgaggagcgaatgcctctgccagctccttcactgagccaccagcctcctccagctccacgagtcgagaagaagcctgaatcaaagaatgtggacgatattttgaaaccaccgggccgggagagcagacctgagagaattgttgttataatgagaggattacctggcagtggaaagacacatgttgcaaaacttattcgagataaggaggtagaatttggaggacctgcacccagagttctaagcctggatgattacttcatcactgaagtggaaaaagaagaaaaagatccagattctggaaagaaagtgaaaaagaaggtaatggaatatgaatatgaagctgagatggaggagacttaccgcaccagcatgttcaaaactttcaaaaagactctggatgatggcttttttcccttcatcatcctggatgccatcaatgacagagttaggcattttgaccagttttggagtgcagcaaaaaccaagggatttgaggtatatttggctgaaatgagtgcagataaccagacttgtggcaagagaaatattcatggaagaaagcttaaagaaataaataagatggctgatcactgggaaactgcacctcgtcacatgatgcgtctagatattcgttctttgctgcaagatgctgctattgaagaggtagagatggaagattttgatgcaaatatcaagaacagaaagaagaaaagaaagatgcagaggaagaggaaagcgaactgggttacattccgaaaagcaaatgggagatggacacatctgaggcaaagctagacaagttggatggcttgaggactggtactaaaaggaaacgtgactgggaggccattgccagcagaatggaggattatcttcagctccccgatgattatgatactcgtgcttctgagcctgggaagaagagggtcagatgggcagacctggaagagaagaaggatgcagataggaaaagggccataggttttgtggtcggacagactgattgggagaagatcacagatgaaagtggtcacctggctgaaaaagccctcaatcgaaccaaatatatatgagacttagtttttgaacggagtcattattcctctaaggtggttcgctttgaggtggtctgaagccaaggcctcgcggagcttctttgtgtgtcaccttgcttccacgtttcagttcttgttttgtttctactgctttagttttttttaaagttctccagtgtccccaagaggtattagaatcttgctgtacccaagcaagacgttaatttttcttttaactgttttggggagggagggagtgatagcttaactgctgaagccaggcgggggtctgctggaggattccaacagagagtatttcctccactgtacaatgtcacagactatctctatcatcattgctttgtggctgtttctgttttttactgtatgtaaactgggtagctgattgtactaggattaaaaaacaataaaactttcatgataaaagcc

SEQ ID NO: 185963 - DNA, 899 bp, Homo Sapiens
  misc_feature (209)..(221): n is a, c, g, or t
ttggaaacattctttgtttagaaggagattctaaagttatttatgatgcttagccatagtattcaggcaaatgttcatttctcctggtacctgtatttaaaatgtacattccacattttaataaattaaccacaagaaaataatcccacatatacaaggtcaggggtggggaagagtattaatggtatcttaattatacccagtctggnnnnnnnnnnnnnaaatggggtaaaaatcaaatgcaaccccatcttgttttaggaattttgagaactaataaatgcaccttaatggtcagtgttcctttcaaacatgtgagttctttaacaaaaatgaaataaaccaggtgtctgtgatttctaattaatcaccgctggccattacacaggttttgttgtttggggtggggagggggcttttgttcccttttgacataatatagtcaatgcactaacaattatgtatattcaaacttgattattttaaattcgatcttcagctgtactgtaaatagggtactgcattgtagtctccatatctgtattacttttctgtaatatttaagagttgcttaaaagcatacaaaatgtactgttactaaaacagctaattatttctctctccccctttgacaggaaggggcttcaattgttcctccatggctagaaccataataaacaatgtacccgtaatttgtaacataaagtattgcaatatgttagtaacaatcttgcagccttcctttccaaagttcattttattttgatcagttcattatattgcactaattattttaggtattttcattatatgaaagctaccatgtgtcacagatgatttaatcaatttaaatgttggactgctaggagaacttgtacatttatgataatgcataatta

SEQ ID NO: 185964 - DNA, 1436 bp, Homo Sapiens
ttggcgctgtgtgtgtcgccggctccttgagggtccatgtgatttttacgccagtgctgctgaactgtgcagggtagggagctggcacagtccgattaattgtccttgggtcgaggtgtctcgtcggaccctttggggctcagtggagaattaaggcagagtcactgtaattatttctaataccaattccaaaatagtgactcttggacaatagtgcaattatatggaattatggctggttataagcctgtagctattcagacatatcctatacttggtgaaaaaatcacccaagatacactgtactggaacaactataagacccctgttcagattaaggaatttggtgcagtttcaaaagtagacttttctcctcagcctccatataattatgctgtcacagcttcctcaagaattcacatttatggccgatactcccaagaacctataaaaaccttttctcgatttaaagacacagcatactgtgctacttttcgacaagatggtagattgcttgtggctggcagtgaagatggtggagttcaactttttgatataagtgggagggctcccctcaggcagtttgaaggccatacaaaagcagttcatacagtagattttacagctgacaaatatcacgtggtctctggggctgatgattatacagttaaattatgggatattccaaactccaaagaaattttgacatttaaagaacactctgattatgtgaggtgtggatgtgctagcaaacttaatccggatctctttataacaggatcatatgatcatactgtgaagatgtttgatgcacgaacgagtgagagtgttctctccgttgagcatgggcagccagtggagagtgtcctacttttcccctctggaggtcttctggtgtcagcaggaggtcgttatgttaaagtctgggacatgttaaaaggaggacaattgctagtatctttgaaaaatcatcacaaaaccgtgacatgtttatgtctaagcagctctggacagaggttactctctggctcactggataggaaggtgaaagtatacagcacaacttcctacaaagtagtccacagttttgattatgcagcttcaattttgagtcttgcccttgcacatgaagatgagacaatagttgtaggaatgaccaatggaatactgagtgttaaacatcggaaatctgaagcaaagaaggaatcacttcccagaagaagaaggcctgcatatcgaacctttattaaaggaaaaattacatgaagcaacgggatgacattttgattaacaggccagcaaagaagcacctagaattgtatgacagggatctgaaacattttcggatctctaaacactcgatagagttcttgatcccacttgtacaataaagacacccgagattacggtgtccatcataaaggagttaaatcgaa

SEQ ID NO: 185965 - DNA, 1377 bp, Homo Sapiens
ttggcaagcgccttatgtataacagttcaaatcctgtgctcaagaatatgtggcctgaaggcaaactgagcattacagaggtgaccaagcgacctctgactgctgctaccttgtttaagaattctatgattgctctagtagacaaccttgcatcaaaggaaccatattacgttcgttgcatcaaacccaatgacaagaaatctccacagatatttgatgatgaacgctgccggcaccaagtagaatatcttggactactggaaaatgtgagagtgcgtcgggcaggatttgccttccgccagacatacgagaagtttcttcacaggtataagatgatctctgaattcacctggcccaaccatgaccttccttcagacaaagaggctgtcaagaaactaattgaacggtgtggttttcaggatgatgtagcttatgggaagaccaaaattttcattcgaacaccccgaacattgtttaccttggaagaactccgtgcccagatgctcataaggattgtcctctttctacaaaaggtgtggcggggcaccctggcccgcatgcggtacaaaagaaccaaggcagctctgacaataatcaggtactaccggcgctacaaagtgaagtcgtacatccacgaggtggccagacgcttccatggcgtcaagaccatgcgagactacgggaagcacgtgaagtggccaagccctcctaaagttcttcgccgttttgaggaggccctgcagacgattttcaatagatggagagcatcccagctcatcaagagcattccggcctcagacctgccccaggtcagggcaaaggttgcagccgtggaaatgttgaagggtcaaagggctgacctcgggctccagagggcctgggagggcaactatcttgcttcaaagccagatacacctcagacctcaggcacttttgtccctgttgctaatgaattgaaacggaaggacaaatacatgaatgtcctcttttcctgtcacgtccgtaaggtaaatcgatttagtaaggtggaagacagagcaatttttgtcactgaccgtcacctgtataaaatggatcccactaaacagtacaaggtgatgaagactatccctctatacaatttgactggtctgagtgtctccaatggaaaggaccaacttgtagtgttccatacgaaagacaacaaagacctcattgtctgcctcttcagcaaacagccaacccatgagagtcgaattggagaacttgttggagtgctggtgaatcatttcaagagtgagaagcgccaccttcaagtgaacgtcaccaacccagtacagtgcagcctgcacgggaagaagtgcaccgtctccgtggagacgcggctcaccagcccca

SEQ ID NO: 185966 - DNA, 2195 bp, Homo Sapiens
tttgtacaaaaaagttggcggaaggacccatacatgaatgtcctcttttcctgtcacgtccgtaaggtaaatcgatttagtaaggtggaagacagagcaatttttgtcactgaccgtcacctgtataaaatggatcccactaaacagtacaaggtgatgaagactatccctctatacaatttgactggtctgagtgtctccaatggaaaggaccaacttgtagtgttccatacgaaagacaacaaagacctcattgtctgcctcttcagcaaacagccaacccatgagagtcgaattggagaacttgttggagtgctggtgaatcatttcaagagtgagaagcgccaccttcaagtgaacgtcaccaacccagtacagtgcagcctgcacgggaagaagtgcaccgtctccgtggagacgcggctcaaccagccccagcccgacttcaccaagaatcgctcgggcttcatcctcagcgtgcccgggaactgacgccccgcggaggcctggcccggaacccggccacactccgagtcctgggtcccagtccagctgctgcctcccaacccatgcccgctagaaacctgctgcgagggcccctcccagaggagccccgcccctgtaagatttccttcctggttttctgcctttggtatcatcttcctctgtccttactgtccacggtccctgttcaataagccaaagaccctggtgccccgcccagacccctgggctgacgtccagaccaatctcaccccagaggcaactggatggtgcctttagttggtgcggatgccccgtggccaggtcaagtcagagcacctggacaggtgtcctccctgctgctgaccctgcagagggaaggggtggggatgcaggaccccgctctgcgggagccccatagccacctctcttgcccaaggtgagccagccctggggacccagctcagggaggctctgctcagagttcggcggacccaccccaacccaactcccagccgccagccaaagccactgggtgagcagagtcacccacagggccagcccctcagccaggagccagtggcaggagcggaacagcccatccagcagagtgagtccatccttcccaggttctcccctgggagactccctttgccaccaaggcccccaccagggcctctgaccaccgctctggagaggacagtgtggcatgctccaaggatcatcttacttaactcgcagcctgtggctgtggtcctcttatagatactttcaccgtttgcagggttgctaatcagatacctgctgtcaccacacttgggtcaggaaccctaatgagaacggggagctgccagggtgagggcagccctcagggtcggccgctttccctctggaccacctcccgctgcgtttcctactcagagaaacagcaagggcggggtcaagacacgggatgacgggaagcaggaagcggggcagcagcacagcgtggggtcctggcactgcaggccaggccaggatgcccaccccgccctctacacggccccttggggcctgcgcccgtgaaactggtgccagggagcactgccagcttgccagtttctgcccagcaaaagcacgtatgcttcaggggccttctgagaccaccttccccactgagccccagctgctgagaaggccttgagggaagtagaggctgggagcaaatgccccatgcggtgagaggatgaggggagcctacgcctcaggcatgtggtgagaggatgagggggagggagcccacgcctcaggtggagtgggcagaggtgcaagagagggatgtactgaagcttcttcccgtcctgccacagacactactcctgccttcccaccctgacccggcagaacccaccaagtgcctgtgtgcagcctcctgtgcctcacccagggcctgaccccagagtggtcccaacaacccggtctcatgcccactccccatccctgcttcccaaaaattgcactgtgtgcagtttgcaacaaagaatcccgctggcatcctgtccttgggaaccctttctcattctccaagcctggtcagctgcctgcacaggcagaggtgccctcagcccaagttagcaacactcatagttttgccaattaccagtaaacactagtggaaccatctaactggaacttcctctctccttccacttaatttcctcaaccttgttgct

SEQ ID NO: 185967 - DNA, 965 bp, Homo Sapiens
ttggcttacacctttgatattgacaagtgggatgaccccaattttaaccctttttcttccacctcaaaaatgcaggagtctcccaaactgccccaacaatcatacaactttgacccagacacctgtgatgagtccgttgacccctttaagacatcctctaagacccccagctcaccttctaaatccccagcctcctttgagatcccagccagtgctatggaagccaatggagtggacggggatgggctaaacaagcccgccaagaagaagaagacgcccctaaagactgacacatttagggtgaaaaagtcgccaaaacggtctcctctctctgatccaccttcccaggaccccaccccagctgctacaccagaaacaccaccagtgatctctgcggtggtccacgccacagatgaggaaaagctggcggtcaccaaccagaagtggacgtgcatgacagtggacctagaggctgacaaacaggactacccgcagccctcggacctgtccacctttgtaaacgagaccaaattcagttcacccactgaggagttggattacagaaactcctatgaaattgaatatatggagaaaattggctcctccttacctcaggacgacgatgccccgaagaagcaggccttgtaccttatgtttgacacttctcaggagagccctgtcaagtcatctcccgtccgcatgtcagagtccccgacgccgtgttcagggtcaagttttgaagagactgaagcccttgtgaacactgctgcgaaaaaccagcatcctgtcccacgaggactggcccctaaccaagagtcacacttgcaggtgccagagaaatcctcccagaaggagctggaggccatgggcttgggcacccctttcagaagcgattgaaattagagaggctgctcacccaacagacgtctccatctccaaacagccttgtactcccgcatcgggac

SEQ ID NO: 185968 - DNA, 958 bp, Homo Sapiens
ttggagtttgactattctgaggacaagagtagttgggacaaccagcaggaaaacccccctcctaccaaaaagataggcaaaaagccagttgccaaaatgcccctgaggaggccaaagatgaaaaagacacccgagaaacttgacaacactcctgcctcacctcccagatcccctgctgaacccaatgacatccccattgctaaaggtacttacacctttgatattgacaagtgggatgaccccaattttaaccctttttcttccacctcaaaaatgcaggagtctcccaaactgccccaacaatcatacaactttgacccagacacctgtgatgagtccgttgacccctttaagacatcctctaagacccccagctcaccttctaaatccccagcctcctttgagatcccagccagtgctatggaagccaatggagtggacggggatgggctaaacaagcccgccaagaagaagaagacgcccctaaagacggtgaaaaagtcgccaaaacggtctcctctctctgatccaccttcccaggaccccaccccagctgctacaccagaaacaccaccagtgatctctgcggtggtccacgccacagatgaggaaaagctggcggtcaccaaccagaagtggacgtgcatgacagtggacctagaggctgacaaacaggactacccgcagccctcggacctgtccacctttgtaaacgagaccaaattcagttcacccactgaggagttggattacagaaactcctatgaaattgaatatatggagaaaattggctcctccttacctcaggacgacgatgccccgaagaagcaggccttgtaccttatgtttgacacttctcaggagagccctgtcaagtcatctcccgtccgcatgtcagagtccccgacgccgtgttcagggtcaagttttgaagagactgaagcccttgtgaacactg

SEQ ID NO: 185969 - DNA, 1358 bp, Homo Sapiens
ttgggtatcaatgatagtaaagatctgccagaagagtatctctcaagcatctatgaagagatagaaggcaagaaaattgcaatgaaagaaacaaaagagctaacgattgcaaccaaatctactaagcagaatgtagctagtgaaaagcagcggcggctgctgtacaacttagagatggagcaaatggctaaaacagccaaagctctgatggaggctgtgagccatgccaaagccccgtttaccagtgccactcacctggaccatgtccggccaatgttcaaactggtgtggacgccactattggcagcctacagcatcggactccagaactgtgatgacactgaagtggcctccttgtgtttggaaggcatccgatgtgcaatccgaatcgcctgcatctttggaatgcagctggaacgagatgcctatgttcaggctcttgctcgcttctccctactcacagccagctccagcatcacagaaatgaagcagaaaaacatcgacaccattaagacgcttatcacagtggctcacaccgatggcaactaccttgggaattcctggcatgagatcttgaaatgcatcagccagctggagctcgctcagctgataggaaccggtgtgaagacgcgctacctgtctggatctgggcgtgaaagagaagggagcctgaagggccacacattggcaggagaagagttcatgggccttggcctcggtaatttggtgagtggcggagtggataaaagacagatggccagcttccaagaatcggttggtgagaccagctcgcagagtgtggttgtagctgtggacaggatttttactgggtctaccagactggatggaaatgcaatagttgactttgtccgctggctgtgtgctgtgtccatggatgaactggcttccccccaccatcctcgcatgttcagcttgcagaagattgtggagatatcatactacaacatgaatcggatccgactacagtggtctcgaatatggcatgtgattggagatcacttcaataaggttggctgcaaccctaatgaagatgtggctatctttgctgttgactcattaaggcaactctccatgaagtttcttgagaagggtgaattagccaacttccgtttccagaaagattttctgaggccctttgagcatattatgaagaaaaacaggtctcccaccatccgggacatggcgatccgctgcattgcccagatggtgaactcccaggcggccaacatccgctcagttggaagaacatctttgccgtgttccaccagcagcctctgatcatgatgggaacatgtggagctggccttcagaccactgccacattgtcacactatttt

SEQ ID NO: 185970 - DNA, 916 bp, Homo Sapiens
cccactttgtacaaaaaagttggattttatcttccttctagcagctgtctgaaattggttgggtctgttttcttgtttatggtattctcaagcccttgacagaccggctagtgtggttttcccgtgcatcttcagcctggcacattatggacacttaaatactacgtattgatctaatattgttgggttaatttttccatcccacccttttcttaatcgcttccgtggatggatgaagggtgctgttcatttccattagatgtatgtgaaggcacagtgaaaatggaaatgttcttggagctacttcctcaaaatgtatccttagtcacctcagtgcaacagctgggagggggccgtgttaagattttttttgctacaaagaggaggtggcaatggtagatccacccttatgcttctcagtttagcataacctcttatggattttcatcaaattcagcgtgttggtcactggaaagagccttttccttctccttttcttactctcccctcatggtgttcccctcttaaaggagaggagcttttaatttacacttaccacctcatttgcttttctggaggccatgcaatataggcgggactacagagttaatctcctttttacaaatgaggccaagagaagcctcattggttcacagtcatgcagctcatactgtccacccttgtattctcagatgcaggacaattgcattttagttttattttgtggaagtgcagaatatttactctttctgtccaacccttgattctgccgaggaagacactgatggtttgatgagtgattcactgtttttggctaagggcttttggagctgatggcaggggtttgatgaacccaaatgagctctagacattatcacagactgaatagatcttaactgtctcctacatgtgtgtt

SEQ ID NO: 185971 - DNA, 1659 bp, Homo Sapiens
aattgatgagcaatgctttaccttaaaaaggaactttgtacaaaaaaggcgcgtttgtactgtgtcttaccatgcctgaaccggcaaaatccgctccggcccctaaaaagggctccaagaaagccgtcaccaaagcccagaagaaagacggcaagaagcgcaagcgcagccgcaaagagagctactccatctacgtgtacaaggtgctgaagcaggtccaccccgacaccggcatctcgtccaaggccatgggcatcatgaactccttcgtcaacgacatcttcgagcgcatcgcgggagaggcttcccgcctggcgcactacaacaagcgctccaccatcacatcccgcgagatccagacggccgtgcgcctgctgctgcccggcgagctggccaagcacgccgtgtccgagggcaccaaggcggtcaccaagtacaccagctccaagtgagtccctgccgggacctggcgctcgctcgctcgagtcgccggctgcttgactccaaaggctcttttcagagccacccacctaatcactagaaaagagcttgttcacttattcccttagtttcttttcataaagtaagttattttagtgtgaaggtcatgggaaatggcatacgtagctttttaactatttggaactcgaggtccccagtgcgtcattggatttgcttttgaatctagagcgtgtctttactcattgtgctgcttagccttcccaggagtcggttctcaattaggctgttgggaatccgcctctttacccgcccccactcccgccccacacgcgccctggtggctccttgggtctgtttcattctaaaacgaagtggctgagttcggctgtcatttaagagaactccaggacacaattcagcccgggttccgcaaacactgcgtgacagctctgtatgactgacgcttggcagcagcttttgtgtccggtcaccagttctgccgtgcgatggggcctcctgtggataccagccgttctgtgtattttggacgaaggccgcgcagccgggtcccagccttgtcctgattgggcgacaagaatattcaaaattctgcgcctttttctaatttgtagatttcagtttccgtcgttcactttgagactttgaaattcctatttctcattttgttgataatttctgcatttaatggtctgtgctttaaatggtaacgctacggccccaggtcactgcgaggcacttaccatgtagatacgggctcaaaagtcacctctcagagacctacgtcatccactcaggaattcgcgcctctcatacttgcctgtctcattttatcttccttctagcagctgtctgaaattggttcgtctgttttcttgtttatggtattctcaagcccttgacagaccggctagtgtggttttcccgtgcatcttcagcctggcacattatggacacttaaatactacgtattgatctaatattgttgggttaatttttccatcccacccttttcttaatcgcttccgtggatggatgaagggtgctgttcatttccattaaatgtatgtgaaggcacagtgaaaatggaaatgttcttggagctacttcctcaaatgtatcctttagtcacctcagtgcaacagctgggaggggccgtgttaagattttttttgctac

SEQ ID NO: 185972 - DNA, 532 bp, Homo Sapiens
aaatcggaaaaattattccctagaaaacggtgaaattcaatattaaagctctttatgtgagacttgagtggctctgaaaagagcctttgagttttaaagcacctaagcacacatttacttggagcttgtatacttggtgacagccttggtaccttcggacactgcgtgcttggccagctctccgggaagcagcagacgcacggcggtctggatctccctggaggtaatggtcgagcgcttgttgtagtgggccagacgggaagcctcgcctgcgatgcgttcgaagatgtcgttaacgaaggaattcatgatgcccatggccttggatgagatgccagtatcggggtgaacctgttttagcaccttgtacacatacacggagtagctctccttacgactgcgcttgcgcttcttgccatccttcttctgcgccttggtcacagccttcttggaacccttcttcggagcaggagctgacttagctggttcaggcatgctgtcagaaaacaataacagcagtgagaatgaccaa

SEQ ID NO: 185973 - DNA, 798 bp, Homo Sapiens
ttgggattggcttctttaagtctcttttctcttttttcgcgcaaaaatgccggatccagcgaaatccgctcctgctcccaagaagggctccaaaaaggctgttacgaaagtgcagaagaaggacggcaagaagcgcaagcgcagccgcaaggagagctactccgtttacgtgtacaaggtgctgaagcaggtccaccccgacaccggcatctcgtccaaggccatgggcatcatgaactccttcgtcaacgacatcttcgagcgcatcgcgggagaggcgtcccgcctggcgcactacaacaagcgctccaccatcacatcccgcgagatccagacggccgtgcgcctgctgctgcccggcgagctggccaagcacgccgtgtccgagggcaccaaggcggtcaccaagtacaccagctcgaagtaagagtgtgcaagggacgcaatagatcaaccacctaaccccaaaggctcttttcagagccacttcagtaatcgagaaagcagctgtaaacacttgtcagagcgtttgatagcttttggtcaggtagggagtgttaccatggtcacggatgcattcgggtttaggactaaggagtttcctgtagtcctgtaatgagttggccctcagtcatccccgtccagtcttactgagttgcttgttatctgtgctacgagattcgaaaggtttgactcgttctgggatatttgggagggatggagggaaggaggcggggggtggttctacaccccttcggcttttaacctgtatctttaagtcgttttcccttttttgtt

SEQ ID NO: 185974 - DNA, 1629 bp, Homo Sapiens
ttggcggggcaggaagggaggcggccgccgtgccattcttaaaggcgcccgagtgaaggcgacaggccgctgacggccggaaggaaaatgagtgagtctttggttgtttgtgatgttgccgaagatttagtggaaaagctgagaaagtttcgttttcgcaaagaaacgaacaacgctgctattataatgaagattgacaaggataaacgcctggtggtactggatgaggagcttgagggcatttcaccagatgaacttaaagatgaactacctgaacgacaacctcgcttcattgtgtatagttataaatatcaacatgatgatggaagagtttcatatcctctgtgctttattttctccagtcctgttggatgtaagcctgaacaacagatgatgtatgctggaagtaagaataagctagtccagacagctgaactaaccaaggtatttgaaataagaaataccgaagacctaactgaagaatggttacgtgagaaacttggattttttcactaatgtgaacttctgtgtttctaaagtatttatgtattaacctgaccatactggaatcagacataaatacttatttatgcctaaaaatgcactgttacttacagtttgtttcctgcagtaaagaaaaattcttcatttgtgcaaaatttgaacaaagaggaaatcatcttcatagtaatgaaactttgtaaagtgtttccttatattggtaattgttaggtggactacttttctccagggactttttgcactcttgtgactaatttctataacttatggttcggaatttgttactatttacagacaccattggaaagtggatatattagattgtgagagacaacagttgcctccttttgacaaatactggatattagcagtttatttatgaaaatagcgtattatcacttgtcaaatcattgaaattcatttggggtcaaagacttgagtgacccagtattgagccatgaataatttagtgtaacctgtattacaagtacattgatgaattctgtatcttctttggtttcctgtatctttttaatcaagtctagaaactatgttcatcagtcactcatttttaaggtcgggagttagattttatgatagaattatgactgttagcttttctccttatagcatcttagtcttagaaattggtgggttgtaataatcaagggcttcattccttttatgtcatttctagacagttttgaatctaggttaataacactttatttataaagcacctcaatgtcctgtgaacactaattattttaaatgtgttaatactgtgcctttgatttgttagctttaaagttagtttaagacttttacactgccagtattccacatttggtgaaattaatacttttttaaagggtccaaataaaataattttctaatgtgtatatctgaaatttgtaataaaatcaacttcatattttaaaaattccaactatctgcttgcattggtgaatatatggcagtcgagagttataattttgggtatacttgtggttagttttgtgccatagaaaaaattatcttaaaactttggccatagttaataacattaacacttcaatagcaatcacatcttatatcctaaatgtc

SEQ ID NO: 185975 - DNA, 2894 bp, Homo Sapiens
  misc_feature (2347)..(2382): n is a, c, g, or t
  misc_feature (2578)..(2599): n is a, c, g, or t
ttggatcaccaccaaggacaaagacggtgagctgtgcaaaaccggcaacgcctacctcaccgccgaactgagcacccccgacgggagcgtggcagacggggagatcctggacaacaagaacggcacctatgagtttttgtacactgtccagaaggaaggggactttaccctgtctctgagactctatgaccagcacatccgaggcagcccgtttaagctgaaagtgatccgatccgctgatgtgtctcccaccacagaaggcgtgaagaggcgcgttaagtccccggggagcggccacgtcaagcagaaagctgtgaaaagacccgcaagcatgtacagcactggaaaacgaaaagagaatcccatcgaagacgatttgatctttcgagtgggtaccaaaggaagaaataaaggagagtttacaaatcttcagggggtagctgcatctacaaatggaaagatattaattgcagacagtaacaaccaatgtgtgcagatattttccaatgatggccagttcaaaagtcgttttggcatacggggacgctctccggggcagctgcagcggcccacaggagtggctgtacatcccagtggggacataatcattgccgattatgataataaatgggtcagcattttctcctccgatgggaaatttaagacaaaaattggatcaggaaagctgatgggacccaaaggagtttctgtggaccgcaatgggcacattattgttgtggacaacaagcgtgctgcgtgtttatcttccagccaaacgggaaaatagtcaccaggtttggtagccgaggaaatggggacaggcagtttgcaggtccccattttgcagctgtaaatagcaataatgagattattattacagatttccataatcattctgtcaaggtgtttaatcaggaaggagaattcatgttgaagtttggctcaaatggagaaggaaatgggcagtttaatgctccaacaggtgtagcagtggattcaaatggaaacatcattgtggccgactggggaaacagcaggatccaggtttttgatgggagtggatcatttttgtcctacattaacacatctgctgacccactctatggcccccaaggcctggccctaacttcagatggtcatgttgtggttgcagactctggaaatcactgtttcaaagtctatcgatacttacagtaatggtgggcaggtggatacccgcttccatggtcttgcactataaactggatggatttctcaatgcgggaccagattatgactagagtttttatgccagaaggaatcattggtgaactttccaaggttatttctgaatgtaacaatttccttaaaaatgacttatccaatttctgtatttcacctttagggttaaaaaaaactcttctactgaatctataaaaactgcagttttacatctgtgaactatggcttaagggacaggatttatgtagctaaactaattttgcaaatcaaacagacacttaaaaaactagcatatgtaaaggtattcgttaatcctgtgaatggtagcttttgcacagaacttccaaaagcaaaacaaaaacaaaatctattgtagttatatacttcatttaacctaggtcacaagacccagggaatcttctaacctcacttttacagtaggtattactcttgtgacatttttttggttatcaacaactaaatataaattactttggaaaaagtaaggctgtcttgcaaaatgatcccagctctgattagcagccctctggagttcagaacttaagtatcagtgcaaatttctcaacctttctgggttagacaaagatccttttttgtgtgttcttttcaccacccctttggctcaccttgtatcagcaaacaaagtacttcttcagggaaacctgaaatttctaatgccttgaaaagcatattacaaaagtaatgctaccttttgggaaacaaactgccccgttaactccagatcattgcactggaatgtaatcaagaaagttagtcatgttttatgtaccatgttttcacacgtgtctcttctcttcgacttcctgaaagcgaaagctttacctcctgcaaatgtcagcacatgtagtaggacaccagtatcctaggacagagagccataagtagccctttggaggactgatggtgtcaaccaaaggcatgtgattgattaatgattcccccttagaaagcaagtgttaccaaagttgtgttatcttgaaagcattacaggtaagggcatgttatggttatttatcattgtttaatgaatagtagaggtgtcaagggactatgtatacatgattagggtaagatagaatgtatnnnnnnnnnnnnnnnnnnnnnnnnnnnnnnnnnnnngctgaatctttggtgtattgaaataggcagcactctgaaagacagaagcttcgtccagccactcttcagcacattcctttactaagcagtttaaagccgtcctagtggagcaagccctaaagcagatttaatttttgccattttccaagaatgacggtggtggcttttagtcagaaaatggccttctgtgctttcnnnnnnnnnnnnnnnnnnnnnnccacacacacacataaaaaacccaacaggtcaaaataaaagttgaacttgagttacatttaatttaaatataaatgcattttgagaaatgttaagaacaatttagtcaatcgttcatctgtcattggtactgtaaaataagctgtggtctatttccactgtttaattttctactcagttctaccaaataggatgtcatgtttgacatttttgatagtgactttggggtctcttcactgaaagcaccttaaaactgtactataagaaaacatttcccctatgtataataatatgaa

SEQ ID NO: 185976 - DNA, 3717 bp, Homo Sapiens
ttggggctcggctgcaccggggggatcgcgcctggcagaccccagaccgagcagaggcgacccagcgcgctcgggagaggctgcaccgccgcgcccccgcctagcccttccggatcctgcgcgcagaaaagtttcatttgctgtatgccatcctcgagagctgtctaggttaacgttcgcactctgtgtatataacctcgacagtcttggcacctaacgtgctgtgcgtagctgctcctttggttgaatccccaggcccttgttggggcacaaggtggcaggatgtctcagtggtacgaacttcagcagcttgactcaaaattcctggagcaggttcaccagctttatgatgacagttttcccatggaaatcagacagtacctggcacagtggttagaaaagcaagactgggagcacgctgccaatgatgtttcatttgccaccatccgttttcatgacctcctgtcacagctggatgatcaatatagtcgcttttctttggagaataacttcttgctacagcataacataaggaaaagcaagcgtaatcttcaggataattttcaggaagacccaatccagatgtctatgatcatttacagctgtctgaaggaagaaaggaaaattctggaaaacgcccagagatttaatcaggctcagtcggggaatattcagagcacagtgatgttagacaaacagaaagagcttgacagtaaagtcagaaatgtgaaggacaaggttatgtgtatagagcatgaaatcaagagcctggaagatttacaagatgaatatgacttcaaatgcaaaaccttgcagaacagagaacacgagaccaatggtgtggcaaagagtgatcagaaacaagaacagctgttactcaagaagatgtatttaatgcttgacaataagagaaaggaagtagttcacaaaataatagagttgctgaatgtcactgaacttacccagaatgccctgattaatgatgaactagtggagtggaagcggagacagcagagcgcctgtattggggggccgcccaatgcttgcttggatcagctgcagaactggttcactatagttgcggagagtctgcagcaagttcggcagcagcttaaaaagttggaggaattggaacagaaatacacctacgaacatgaccctatcacaaaaaacaaacaagtgttatgggaccgcaccttcagtcttttccagcagctcattcagagctcgtttgtggtggaaagacagccctgcatgccaacgcaccctcagaggccgctggtcttgaagacaggggtccagttcactgtgaagttgagactgttggtgaaattgcaagagctgaattataatttgaaagtcaaagtcttatttgataaagatgtgaatgagagaaatacagtaaaaggatttaggaagttcaacattttgggcacgcacacaaaagtgatgaacatggaggagtccaccaatggcagtctggcggctgaatttcggcacctgcaattgaaagaacagaaaaatgctggcaccagaacgaatgagggtcctctcatcgttactgaagagcttcactcccttagttttgaaacccaattgtgccagcctggtttggtaattgacctcgagacgacctctctgcccgttgtggtgatctccaacgtcagccagctcccgagcggttgggcctccatcctttggtacaacatgctggtggcggaacccaggaatctgtccttcttcctgactccaccatgtgcacgatgggctcagctttcagaagtgctgagttggcagttttcttctgtcaccaaaagaggtctcaatgtggaccagctgaacatgttgggagagaagcttcttggtcctaacgccagccccgatggtctcattccgtggacgaggttttgtaaggaaaatataaatgataaaaattttcccttctggctttggattgaaagcatcctagaactcattaaaaaacacctgctccctctctggaatgatgggtgcatcatgggcttcatcagcaaggagcgagagcgtgccctgttgaaggaccagcagccggggaccttcctgctgcggttcagtgagagctcccgggaaggggccatcacattcacatgggtggagcggtcccagaacggaggcgaacctgacttccatgcggttgaaccctacacgaagaaagaactttctgctgttactttccctgacatcattcgcaattacaaagtcatggctgctgagaatattcctgagaatcccctgaagtatctgtatccaaatattgacaaagaccatgcctttggaaagtattactccaggccaaaggaagcaccagagccaatggaacttgatggccctaaaggaactggatatatcaagactgagttgatttctgtgtctgaagttcacccttctagacttcagaccacagacaacctgctccccatgtctcctgaggagtttgacgaggtgtctcggatagtgggctctgtagaattcgacagtatgatgaacacagtatagagcatgaatttttttcatcttctctggcgacagttttccttctcatctgtgattccctcctgctactctgttccttcacatcctgtgtttctagggaaatgaaagaaaggccagcaaattcgctgcaacctgttgatagcaagtgaatttttctctaactcagaaacatcagttactctgaagggcatcatgcatcttactgaaggtaaaattgaaaggcattctctgaagagtgggtttcacaagtgaaaaacatccagatacacccaaagtatcaggacgagaatgagggtcctttgggaaaggagaagttaagcaacatctagcaaatgttatgcataaagtcagtgcccaactgttataggttgttggataaatcagtggttatttagggaactgcttgacgtaggaacggtaaatttctgtgggagaattcttacatgttttctttgctttaagtgtaactggcagttttccattggtttacctgtgaaatagttcaaagccaagtttatatacaattatatcagtcctctttcaaaggtagccatcatggatctggtagggggaaaatgtgtattttattacatctttcacattggctatttaaagacaaagacaaattctgtttcttgagaagagaatattagctttactgtttgttatggcttaatgacactagctaatatcaatagaaggatgtacatttccaaattcacaagttgtgtttgatatccaaagctgaatacattctgctttcatcttggtcacatacaattatttttacagttctcccaagggagttaggctattcacaaccactcattcaaaagttgaaattaaccatagatgtagataaactcagaaatttaattcatgtttcttaaatgggctactttgtcctttttgttattagggtggtatttagtctattagccacaaaattgggaaaggagtagaaaaagcagtaactgacaacttgaataatacaccagagataatatgagaatcagatcatttcaaaactcatttcctatgtaactgcattgagaactgcatatgtttcgctgatatatgtgtttttcacatttgcgaatgggttccattctctctcctgtactttttccagacacttttttgagtggatgatgtttcgtgaagtatactgtatttttacctttt

SEQ ID NO: 185977 - DNA, 1802 bp, Homo Sapiens
  misc_feature (376)..(427): n is a, c, g, or t
ttggcttcacaataccacatgagaaaatatctgagacaaaatgtatacaaatatattccttatggcataatttattgcatttctgactgaaatcaaaattctgatttgatggcaattgaattttcattttacaatagataaatgcttgtgttacctaaagcacttagcacacagttaaattatatttacatcctagacccaaataaataggattgtgtgtatatttgggatatctattgaagaaaaaaagaaaaccccttaaagataatgtacatgcttcatgtcatgtctttaaaataatttaatcaactttattgtcttagtatttagactctggataactctacaataatgaggaaattcttaagaataacannnnnnnnnnnnnnnnnnnnnnnnnnnnnnnnnnnnnnnnnnnnnnnnnnnnttaatactcttattttttatttaatttaattacataaattaaaccttaccatgaccaaattgtgttaggaaggcctgctatctacagcacagtgtgtcatttgcagatttgtggttacctataccacgctaggtgttttgacatgtttagtgtttctgctttacagtgctgaattccatattttagaagctatgaaagtccttttatgaaaaagttactgattgcttctcagttattaggaaaacagttgtttcacaattattatgtagatatgatgcccaaatatcatttttagtatatcttgtcgatctttaagttgttactattgtgttattcatgtctttaaatcagataccaaatattttttggaaagaaaaatgttattactgtcattaggttgtcttttaatactttaagttattttgacgaaaagtaatagagaaaatttacttagcattttagattctagagacatggaaatgaaaattattttatgtctagagtaggtcctgaagtttggctttacattaagtttagcactgtatcagaatgaagaaactaatattttacataaaaactaatactttcaattttttatatagtaatatccccattttgtaaatgttagacttttatcatacctgtaagttaaaatacttgttatcaataacttgtcatgttgtgacaaattgatcacttgtgtacgaaaaataaatctccttaaaaactaaataaaatgcactgtattcttacagttaatgtttataactatagtaaaaaattaatatatatcctattacataaatgttatttcttaggtgttccattaagaagagcaatagaataatgctaaaaaataatgcctataaatcttcagagtataaagacatccattcagaaacaaaaattagcactaaattttttataaaatagaccagatgacaaaatttattttatttttaaacagtggttttgacacaaattatgttattgaaaagcattattaatgtttaatttatttaaaattttggaatttgccatttctcagagaatgatcaggccttaggaaattaatacagtagtagtaatcattttctaggggaaaataaaagaataaatcactatactgatattttgatacaagcaagcacttacatggtaatcactatatagatccaacctgtggattttcttcttatgtccatttaactagaatatattattttaggtataatttacaaatgtcacacctaataatcttttataatataccatatttcattaaagttttgttagagaagtatctaccacagaggagtttttgtcattgtgtacgttgtgtatttgaaccaccatgacagaaagtaaattttag

SEQ ID NO: 185978 - DNA, 2593 bp, Homo Sapiens
ttggcaaagagtgtgaaaggaaactgaagccaaaggggtctttgcccccaaagtatgccttggagctgctcaccatctatgcctgggagcaggggagtggagtgccggattttgacactgcagaaggtttccggacagtcctggagctggtcacacaatatcagcagctctgcatcttctggaaggtcaattacaactttgaagatgagaccgtgaggaagtttctactgagccagttgcagaaaaccaggcctgtgatcttggacccagccgaacccacaggtgacgtgggtggaggggaccgttggtgttggcatcttctggcaaaagaagcaaaggaatggttatcctctccctgcttcaaggatgggactggaaacccaataccaccttggaaagtgccggtaaaagtcatctaaaggaggcgttgtctggaaatagccctgtaacaggcttgaatcaaagaacttctcctactgtagcaacctgaaattaactcagacacaaataaaggaaacccagctcacaggagcttaaacagctggtcagccccctaagcccccactacaagtgatcctcaggcaggtaaccccagattcatgcactgtagggtgctgcgcagcatccctagtctctacccagtagatgccactagccctcctctcccagtgacaaccaaaagtcttcagacattgtcaaacgttcccctgggttcacagatctttctgcctttggcttttggctccaccctctttagctgttaatttgagtacttatggccctgaaagcggccacggtgcctccagatggcaggtttgcaatccaagcaggaagaaggaaaagatacccaaaggtcaagaacacagtgattttattagaagtttcatccgcaaattttcttccatttcattgctcagaaatgtcatgtggttacctgtaacttgaaggtggctacaaagatgactgtggacgtgggttgcactggccacccaaggatgtctgccacacctctccaaagccctccctacctaccaagatatacctgatatattccaccaggatatcctccctccagatatacttggttctctccaccaggttctttctttaaagcaggatttctcaactttgatacttactcacatttggggctagacagttctttgtttggggctctcttgtgcattgtaggatgttgagcagcatctctggcctgtacccagtagatgccacccagttgtgacaattaaaagtgtcttgagactttatcatgtgtcttctgccctaggtgagaacccttgcactagaggaaccctacaccccaaccctggggggaatgtagggaagaggtggccaagccaaccgtggggttagctctaattattaagatatgcattataaataaataccaaaaaattgtctctggcaatagttaccttcccagatacaggtccccccttttttcccctaactcttttaagcaatgattgtaactattaggagacattgctctcccacgtatgtttttctttttagacaatgcagacaccaggaagttgtggagctaggatccatcctattgtcaatgagatgttctcatccagaagccatagaatcctgaataataattctaaaagaaacttctggagatcatctggcaatcgcttttaaagactcggctcaccgtgagaaagagtcactcacatccattcttcccttgatggtccctattcctccttcccttgcttcttggacttcttgaaatcaatcaagactgcaaaccctttcataaagtcttgccttgctgaactccctctctgcaggcagcctgcctttaaaaatagttgctgtcatccactttatgtgcatcttatttctgtcaacttgtattttttttcttgtatttttccaattagctcctcctttttccttccagtctaaaaaaggaatcctctgtgtcttcaaagcaaagctctttactttccccttggttctcataactctgtgatcttgctctcggtgcttccaactcatccacgtcctgtctgtttcctctgtatacaaaaccctttctgcccctgctgacacagacatcctctatgccagcagccagccaaccctttcattagaacttcaagctctccaaaggctcagattataactgttgtcatatttatatgaggctgttgtcttttccttctgagcctgcctttctcccccccacccaggagtatcctcttgccaaatcaaaagactttttccttgggctttagccttaaagatacttgaaggtctaggtgctttaacctcacataccctcacttaaacttttatcactgttgcatataccagttgtgatacaataaagaatgtatctggattttgtgcctagttcctagcacacagcttcaaaaattctagagtttcctgataggagtgtcttttgtattcataaaaaagcccttttcacccatgcctgagtttatgctaacaaggttacccatggtgggcccttagttttcaaggaaggagttgggcaagccagaaagaccaaagcatgtggttaaagcattggaattttcagccccatccc

SEQ ID NO: 185979 - DNA, 2471 bp, Homo Sapiens
actttgtacaaaaaagttggccctactccagccttaacccggggcatcgagtggaagcgccccacggagatctgcgctgacccccagtttatcattggaggagccacccgcacagacatctgccaaggagccctaggtgactgctggctgctggcagccattgcctccctcaccttgaatgaagaaatcctggctcgagtcgtccccctaaaccagagcttccaggaaaactatgcagggatctttcacttccagttctggcaatacggcgagtgggtggaggtggtggtggatgacaggctgcccaccaaggacggggagctgctctttgtgcattcagccgaagggagcgagttctggagcgccctgctggagaaggcatacgccaagatcaacggatgctatgaagcactatcagggggtgccaccactgagggcttcgaagacttcaccggaggcattgctgagtggtatgagttgaagaagccccctcccaacctgttcaagatcatccagaaagctctgcaaaaaggctctctccttggctgctccatcgacatcaccagcgccgcggactcggaggccatcacgtttcagaagctggtgaaggggcacgcgtactcggtcaccggagccgaggaggttgaaagtaacggaagcctacagaaactgatccgcatccgaaatccctggggagaagtggagtggacagggcggtggaatgacaactgcccaagctggaacactatagacccagaggagagggaaaggctgaccagacggcatgaagatggagaattctggatgtctttcagtgacttcctgaggcactattcccgcctggagatctgtaacctgaccccagacactctcaccagcgatacctacaagaagtggaaactcaccaaaatggatgggaactggaggcggggctccaccgcgggaggttgcaggaactacccgaacacattctggatgaaccctcagtacctgatcaagctggaggaggaggatgaggacgaggaggatggggagagcggctgcaccttcctggtggggctcattcagaagcaccgacggcggcagaggaagatgggcgaggacatgcacaccatcggctttggcatctatgaggttccagaggagttaagtgggcagaccaacatccacctcagcaaaaacttcttcctgacgaatcgcgccagggagcgctcagacaccttcatcaacctccgggaggtgctcaaccgcttcaagctgccgccaggagagtacattctcgtgccttccaccttcgaacccaacaaggatggggatttctgcatccgggtcttttctgaaaagaaagctgactaccaagctgtcgatgatgaaatcgaggccaatcttgaagagttcgacatcagcgaggatgacattgatgatggattcaggagactgtttgcccagttggcaggagaggatgcggagatctctgcctttgagctgcagaccatcctgagaagggttctagcaaagcgccaagatatcaagtcagatggcttcagcatcgagacatgcaaaattatggttgacatgctagattcggacgggagtggcaagctggggctgaaggagttctacattctctggacgaagattcaaaaataccaagtaagatcccagagatgcgggtggatctgtgttgggaaacattctgttcatatgctttaagatgcagcaactcctgcacagagtggagaaacatttccaaggggattgggattttacccataatgaagctcagagtgagtaaagatggggctgaggaaatgcaaacaaaaaaccaaccaggacttcgcaggtgaaatggcctattcccttcctcctgattattgggatcatctaaaggccaccatcaagggtttcctgaaaagggtttttgacagctaaagtacaaaaattatataagacaagaacatggacctatgggcgttggctggctgatttgatgggcatatttacaaaccagctcacagacagaagcaaaatactattagttatttaaggcagaaacataagtgattcttccacggccaaactagaggcacagagctggaaaaacttcatccccactcagcacatactagggaggtaacttgccagctttgctttgggtcatagttcttacagctaacttatgtgttccagaaaatttaccgagaaatcgacgttgacaggtctggtaccatgaattcctatgaaatgcggaaggcattagaagaagcaggtttcaagatgccctgtcaactccaccaagtcatcgttgctcggtttgcagatgaccagctcatcatcgattttgataattttgttcggtgtttggttcggctggaaacgctattcaagatatttaagcagctgggatcccgagaatactggaacaatagagctcgaccttatctcttggctctgtttctcagtactttgaa

SEQ ID NO: 185980 - DNA, 1378 bp, Homo Sapiens
  misc_feature (1115)..(1123): n is a, c, g, or t
ttgtacaaaaaagttggatccacctcagctaaagagagacggtgtctctcctgacgaatcgcgccagggagcgctcagacaccttcatcaacctccgggaggtgctcaaccgcttcaagctgccgccaggagagtacattctcgtgccttccaccttcgaacccaacaaggatggggatttctgcatccgggtcttttctgaaaagaaagctgactaccaagctgtcgatgatgaaatcgaggccaatcttgaagagttcgacatcagcgaggatgacattgatgatggaggcaggagactgtttgcccagttggcaggagaggatgcggagatctctgcctttgagctgcagaccatcctgagaagggttctagcaaagcgccaagatatccagtcagatggcttcagcatcgagacatgcaaaattatggttgacatgctagattcggacgggagtggcaagctggggctgaaggagttctacattctctggacgaagattcaaaaataccaaaaaatttaccgagaaatcgacgttgacaggtctggtaccatgaattcctatgaaatgcggaaggcattagaagaagcaggtttcaagatgccctgtcaactccaccaagtcatcgttgctcggtttgcagatgaccagctcatcatcgattttgataattttgttcggtgtttggttcggctggaaacgctattcaagatatttaagcagctggatcccgagaatactggaacaatagagctcgaccttatctcttggctctgtttctcagtactttgaagttataactaatctgcctgaagacttctcatgatggaaaatcagccaaggactaagcttccatagaaatacactttgtatctggacctcaaaattatgggaacatttacttaaacggatgatcatagctgaaaataatgatactgtcaatttgagatagcagaagtttcacacatcaaagtaaaagatttgcatatcattatactaaatgcaaatgagtcgcttaacccttgacaaggtcaaagaaagctttaaatctgtaaatagtatacactttttacttttacacactttcctgttcatagcaatattaaatcaggnnnnnnnnntgcagggaggtatttaacagctgagcaaaaacattgagtcgctctcaaaggacacgaggcccttggcagggaatatttaaagcaacttcaagtttaaaatgcagctgttgattctaccaaacaacagtccagattaccatttcccatgagccaactgggaaacatggtatatcatgaagtaatcttgtcaagcatctggagagtccaggagagaagactcacctctgtcgctgggttaaacaagagacaggtttt

SEQ ID NO: 185981 - DNA, 1547 bp, Homo Sapiens
  misc_feature (1096)..(1104): n is a, c, g, or t
actttgtacaaaaaagttggagcaactcctcgcttcagaaaatggagaaacatttccaaggggattgggattttacccataatgaagctcagagtgagtaaagatggggctgaggaaatgcaaacaaaaaaccaaccaggacttcgcaggtgaaatggcctattcccttcctcctgattattgggatcatctaaaggccaccatcaagggtttcctgaaaagggtttttgacagctaaagtacaaaaattatataagacaagaacatggacctatgggcgttggctggctgatttgatgggcatatttacaaaccagctcacagacagaagcaaaatactattagttatttaaggcagaaacataagtgattcttccacggccaaactagaggcacagagctggaaaaacttcatccccactcagcacatactagggaggtaacttgccagctttgctttgggtcatagttcttacagctaacttatgtgttccagaaaatttaccgagaaatcgacgttgacaggtctggtaccatgaattcctatgaaatgcggaaggcattagaagaagcaggtttcaagatgccctgtcaactccaccaagtcatcgttgctcggtttgcagatgaccagctcatcatcgattttgataattttgttcggggtttggttcggctggaaacgctattcaagatatttaagcagctggatcccgagaatactggaacaatagagctcgaccttatctcttggctctgtttctcagtactttgaagttataactaatctgcctgaagacttctcatgatggaaaatcagccaaggactaagcttccatagaaatacactttgtatctggacctcaaaattatgggaacatttacttaaacggatgatcatagctgaaaataatgatactgtcaatttgagatagcagaagtttcacacatcaaagtaaaagatttgcatatcattatactaaatgcaaatgagtcgcttaacccttgacaaggtcaaagaaagctttaaatctgtaaatagtatacactttttacttttacacactttcctgttcatagcaatattaaatcaggnnnnnnnnntgcagggaggtatttaacagctgagcaaaaacattgagtcgctctcaaaggacacgaggcccttggcagggaatatttaaagcaacttcaagtttaaaatgcagctgttgattctaccaaacaacagtccaagattaccatttcccatgagccaactgggaaacatggtatatcatgaagtaatcttgtcaaggcatctggagagtccaggagagaagactcacctctgtcgcttgggttaaacaagagacaggttttgtagaatattgattggtaatagtaaatcgttctccttacaatcaagttcttgaccctattcggccttatacatctggtcttacaaagaccaaagggatcctgcgcttgatcaactgaaccagtatgccaaaaccaggcatccaatttgtaaaccaattatgataaaggacaaaataagctgtttg

SEQ ID NO: 185982 - DNA, 2135 bp, Homo Sapiens
  misc_feature (450)..(465): n is a, c, g, or t
ttggcaaattctcagaaaaatgcattccggaaaaatcccagtgatccaaagcttgcacatttaaaaaccattcatacttcaacgggaaaaaatcttctagtttctggatggtggggctttgttcgccaccccaattacttgggtgatctcatcatggccttggcgtggtccctcccatgtggttttaaccacattctgccttatttctacataatttatttcaccatgttgcttgtccaccgagaagctcgtgacgagtaccactgtaagaagaaatacggcgtggcttgggaaaagtactgtcagcgtgtgccctaccgtatatttccatacatctactaatgctcttctggcttttctacaaaatactcctgcaattccagctgccatttgcaaaaacaaggaaaaaaatccgaaactttcttttgttgcactgacagggtctgtacnnnnnnnnnnnnnnnngagtcaggactatggagccgagtagttgatcttttaatatagccgtgtttacttgtattaacttacagttaacataggaaaaatacaagtaaggatgtgagaatttgcattttaatgggaaattttcaacccttaatctgaaaacagaagacagtcttaatataaatgtactgtgaagaatgctattgatgtttatggtttctgattacttttcaaattttgatgtttttttgccagttggcttttcttaaatgaaaacactgttccatttaaagtacatttatgttttattcagtaagagaatagaattttcatttgtttttctttaaatcctttactaattatataatttgaaagcaaaaagaagggcctatattaaatgctgaaagtgaaaagtgatgacattattagcagacactgcttaaaggagaccatttgtagcagttggcttaacctcaacttctaaaactacattgaaaatgtaaatacatagcttagttttttgtaatatatggtgacttcagatttttttgtacagtattttgaatgtgagatgattgtcaggactaactgtctttttaacaaaacattttcagtattttaaataaaattttgtaaagtaatgtgaattaaaaattttggaacaattagaattcattcactattgtatagaagatgctgttaaaacataggaagggtatttttcttgatccaaagtttgtgaatttggctttgctacctcaattgcaggtgtttgtttgcctttataaactgttgcaaatagaaaaaaaatagaataagtatatatttttggagtaacatcaatatttaaacatttttacacagatcggtgtttgaaaatttgccatttcaggctaatatttttatatatttttgactttttaaaagttcatcagtgtttttgctactgttaagcttatgcagtttatactgtattttttatgtatcctttatatttaccaaacctgactccctgtaaaggagtgctgtcttaaaaacaactgaaggggttaaagtcgtttcttttagtttaatagatgtgcataaggtagctttagcaattaaattctagtgaagttgatatagtctcatttttaattgtcctgtaatggaacagtagcaaattcactaaacttttgtgttcagagttaaattgttctcagtactttcaatgtaggggaatgtaataaacatagtgtgtatgtttgggttttaactacacattttatatatgagccatttagatatgcagtgttaattctatactgcatttgaagtgtatgtaacttagcttatgttaatgcagtcatgaagttggtttgctccagcatccggtagtctttaaacattcttttagtgaaattgtcattgttttatcagtgctaatgtgtgcaagcagtttttttattttgcttttctcctggcatcagaaagtggtggcgttttctgtactggattgcaccaaggaagcttttggggaggaagaaggacattaaattctttccctggtaatgaaaagagccctttatcatacagtgctgcatttctggatatcagctacactttgtttttaaatttgtttttgaaatgtttatttggcaaatttataagaagttttaagtggaaataaaatgtagcaacattttgat

SEQ ID NO: 185983 - DNA, 2331 bp, Homo Sapiens
  misc_feature (2067)..(2082): n is a, c, g, or t
ttgggcggccgggtagcgtcgcgcgcgtggatctgccgccgggttgctgtgcgactattctccgggagccgtccgtgtcaccgccggaacctggcgcaggttaattatagaaaatgccaagtaggaaatttgccgatggtgaagtggtaagaggtcgatggcctgggagttcactttattatgaagtagaaattctgagccacgacagcacctcccagctttacactgtaaagtataaagatggaacagagcttgaattgaaagagaatgatattaagcctttaacttcctttaggcaaaggaaaggtggctcaacttccagttccccttccagacgccgagggagtcgatcaaggtcacgctcccgatcccccggtcgaccacctaaaagtgcccgccgatctgcttctgcttcccaccaggccgacattaaggaagcaaggagggaagtggaagttaaattgactccgctgattctgaagccatttggaaatagcatcagcagatataatggggagcctgagcatattgagagaaatgacgcacctcataaaaatacacaggaaaaattcaatttgtcacaagaaagcagttacatagcaacacagtatagccttcgtccaagaagagaagaagtcaaattaaaagaaatagattctaaggaagaaaaatacgttgcaaaagaactggcagtgagaacctttgaagtgacccccatccgggcaaaggacttggagtttggaggagtacctggtgtgtttctcatcatgtttggcctgcctgtgttcctcttcctgttgctgttgatgtgtaaacagaaagatcccagtcttctgaatttccctcctcctttgccagctttgtatgagttatgggaaaccagagtatttggggtctacctcctgtggtttttgattcaagtcctgttctacctactgccaattggaaaggttgtagaaggaacgcctcttattgatggaagaagactcaagtatagattaaatggattctatgcttttatcctgacatctgcagtcatcggaacatctctcttccagggcgtagagtttcattacgtgtacagtcattttcttcagtttgcacttgcggccactgttttttgtgtggtcttgagtgtgtatctctacatgcgctctttgaaagcgccccggaatgacctgtcgcctgccagctctggaaatgctgtctatgatttcttcattggccgtgaattaaaccctcgaattggtacttttgatctcaaatacttttgtgaattgcgccccggattgattggatgggtggttattaacttggtgatgcttttggctgaaatgaaaatacaggaccgcgctgttccatccttggccatgattttagttaatagtttccagcttctctatgtggtgggctctctggaatgaggaagcgttgttgacgaccatggacatcatccacgatggatttggattcatgctggcttttggagacttggtgtgggttccctttatttacagcttccaagccttttatttagtcagtcatccaaatgaagtgtcttggccaatggcttctctaattattgttctgaaactttgtggttatgtaatcttccgaggtgcaaattctcagaaaaatgcattccggaaaaatcccagtgatccaaagcttgcacatttaaaaaccattcatacttcaacgggaaaaaatcttctagtttctggatggtggggctttgttcgccaccccaattacttgggtgatctcatcatggccttggcgtggtccctcccatgtggttttaaccacattctgccttatttctacataatttatttcaccatgttgcttgtccaccgagaagctcgtgacgagtaccactgtaagaagaaatacggcgtggcttgggaaaagtactgtcagcgtgtgccctaccgtatatttccatacatctactaatgctcttctggcttttctacaaaatactcctgcaattccagctgccatttgcaaaaacaaggaaaaaaatccgaaactttcttttgttgcactgacagggtctgtacnnnnnnnnnnnnnnnngagtcaggactatggagccgagtagttgatcttttaatatagccgtgtttacttgtattaacttacagttaacataggaaaaatacaagtaaggatgtgagaatttgcattttaatgggaaattttccaacccttaatctgaaaacagaagacagtcttaatataaatgtactgtgaagaatgctattggatgtttatggtttctgattactttacaaattttgatgtttttttgccagttggcttttc

SEQ ID NO: 185984 - DNA, 887 bp, Homo Sapiens
ttggggctccccactctgccagagcgaggcggggcagtgaggactccgcgacgcgtccgcaccctgcggccagagcggctttgagctcggctgcgtccgcgctaggcgctttttcccagaagcaatccaggcgcgcccgctggttcttgagcgccaggaaaagcccggagctaacgaccggccgctcggccactgcacggggccccaagccgcagaaggacgacgggagggtaatgaagctgagcccaggtctcctaggaaggagagagtgcgccggagcagcgtgggaaagaagggaagagtgtcgttaagtttacggccaacggtggattatccgggccgctgcgcgtctgggggctgcggaatgcgcgaggagaacaagggcatgcccagtgggggcggcagcgatgagggtctggccagcgccgcggcgcggggactagtggagaaggtgcgacagctcctggaagccggcgcggatcccaacggagtcaaccgtttcgggaggcgcgcgatccaggtcatgatgatgggcagcgcccgcgtggcggagctgctgctgctccacggcgcggagcccaactgcgcagaccctgccactctcacccgaccggtgcatgatgctgcccgggagggcttcctggacacgctggtggtgctgcaccgggccggggcgcggctggacgtgcgcgatgcctggggtcgtctgcccgtggacttggccgaggagcggggccaccgcgacgttgcagggtacctgcgcacagccacgggggactgacgccaggttccccagccgcccacaacgactttattttcttacccaatttcccacccccacccacctaattcgatgaaactgccaacggggagcggcggaaagcctg

SEQ ID NO: 185985 - DNA, 2749 bp, Homo Sapiens
  misc_feature (2243)..(2270): n is a, c, g, or t
ttggatcttataaacctggagaagtgatggtgaaagttcatgttgttgatctaaaggcagaatctgtagctgctcctataactgttcgtgcttacttaaatcagacagttacagaattcaaacaactgatttcaaaggccatccatttacctgctgaaacaatgagaatagtgctggaacgctgctacaatgatttgcgtcttctcagtgtctccagtaaaaccctgaaagctgaaggattttttagaagtaacaaggtgtttgttgaaagctccgagactttggattaccagatggcctttgcagactctcatttatggaaactcctggatcggcatgcaaatacaatcagattatttgttttgctacctgaacaatccccagtatcttattccaaaaggacagcataccagaaagctggaggcgattctggtaatgtggatgatgactgtgaaagagtcaaaggacctgtaggaagcctaaagtctgtggaagctattctagaagaaagcactgaaaaactcaaaagcttgtcactgcagcaacagcaggatggagataatggggacagcagcaaaagtactgagacaagtgactttgaaaacatcgaatcacctctcaatgagagggactcttcagcatcagtggataatagagaacttgaacagcatattcagacttctgatccagaaaattttcagtctgaagaacgatcagactcagatgtgaataatgacaggagtacaagttcagtggacagtgatattcttagctccagtcatagcagtgatactttgtgcaatgcagacaatgctcagatccctttggctaatggacttgactctcacagtatcacaagtagtagaagaacgaaagcaaatgaagggaaaaaagaaacatgggatacagcagaagaagactctggaactgatagtgaatatgatgagagtggcaagagtaggggagaaatgcagtacatgtatttcaaagctgaaccttatgctgcagatgaaggttctggggaaggacataaatggttgatggtgcatgttgataaaagaattactctggcagctttcaaacaacatttagagccctttgttggagttttgtcctctcacttcaaggtctttcgagtgtatgccagcaatcaagagtttgagagcgtccggctgaatgagacactttcatcattttctgatgacaataagattacaattagactggggagagcacttaaaaaaggagaatacagagttaaagtataccagcttttggtcaatgaacaagagccatgcaagtttctgctagatgctgtgtttgctaaaggaatgactgtacggcaatcaaaagaggaattaattcctcagctcagggagcaatgtggtttagagctcagtattgacaggtttcgtctaaggaaaaaaacatggaagaatcctggcactgtctttttggattatcatatttatgaagaagatattaatatttccagcaactgggaggttttccttgaagttcttgatggggtagagaagatgaagtccatgtcacagcttgcagttttgtcaagacggtggaagccttcagagatgaagttggatcccttccaggaggttgtattggaaagcagtagtgtggacgaattgcgagagaagcttagtgaaatcagtgggattcctttggatgatattgaatttgctaagggtagaggaacatttccctgtgatatttctgtccttgatattcatcaagatttagactggaatcctaaagtttctaccctgaatgtctggcctctttatatctgtgatgatggtgcggtcatattttatagggataaaacagaagaattaatggaattgacagatgagcaaagaaatgaactgatgaaaaaagaaagcagtcgactccagaagactggacatcgtgtaacatactcacctcgtaaagagaaagcactaaaaatatatctggatggagcaccaaataaagatctgactcaagactgactctgatagtgtagcattttccctgggggagttttggttttaattagatggttcactaccactgggtagtgccattttggccggacatggttggggtaacccagtgacaccagcactgattggactgccctacaccaatcagaagctcagtgcccaatgggccactgttttgactcggaatcatgttgtgcactatagtcaaatgtactgtaaagtgaaaagggatgtgcnnnnnnnnnnnnnnnnnnnnnnnnnnnngctaaccttctattagaaaaggggacaggggaatgagtaaacttcttttattgcggacaaatgtgcacatagccgctagtaaaactagcctcaaacaggatgctcatagcttaataataaaagctgtgcaaaggccatgaatgaatgaattttctgtttatttcactgatgcacacattacctcattgacaattcagaagtaaatccaacgtgtgttgactcttggaaagcagcaaaaacaggagctgaagaaaagaaattcttggaaccagccgtaacccagtaaggaattgtgaagttgtgtttttattttgtttcattttttgcagagtattaagaacattattctggaacatcagaacgtttcccttagaccgatcccagcagtggcagctcagattgctgcagtgttgtaattataactgattgtacttaagttatggatgtagagaatatgtttcattcatttattcagcatg

SEQ ID NO: 185986 - DNA, 1223 bp, Homo Sapiens
  misc_feature (322)..(353): n is a, c, g, or t
  misc_feature (874)..(907): n is a, c, g, or t
ttggcaattagtattctaaaggcagaagcagaagtagctgctttttagcaatagaattgtttcagtattttgctgctgtttaatgcgcatcttcagaaaacttcccagtggcttcaaggaatttggggatctctctggcaacaaattgtgaaacatgaaatttctgctgactttaatatatgaaacctaatcctacccctttttaacaaaaagaaactagtacatttgtgaaaattgtgttgtgttgtccattgttgctctagttctgacccagaggtagctctggagtgattttagacctactcactcagttgtgtgtagnnnnnnnnnnnnnnnnnnnnnnnnnnnnnnnnctctccttaatagaagcatcctttttaaagagaagttgccttggtccacacactaagcagaaaaccaagttatcaggacagagatatttcccaattactcctaatcaatgaagaaagtgagttggatatttttaaagcagttaactaattttttcttacctaatcttttgggagttttgcttgttgatataacctttttagttaacctgaaagattccaaaaattgttcttaagtgcttgagactggaaccaaaattaaattgtacttcataaaatcctcttatagagttactcttgccctagattgtaaattaagtttggcattattgtcagactggatggagggtgaagtaaaatagtatgaacaattaagaggctctccccctcttgtctttaagccatattctcctacatgtattttataagaaaaatgttaagtcaaattttagtggctctttaattcctgacctcttcatttctccttttcagtataacctcccctatgctcatgcccacacagnnnnnnnnnnnnnnnnnnnnnnnnnnnnnnnnnngtctttccaaactgtttaagtatttaaacatctgagccaaagcagatagaagttattgtataattgttaatcactttgcaaataggggctatcaaattacctatattggcattgctggattataaactctatatctgtaatataaagtgtttgagttgttaattgggctgttatgatcagtagttgattttgagaaagctctatgagctctaagtaactgcatggttttttgtttaatgtaatataggagacccttcacattcccaaggaatatattccaaaacatttttgtgaatatctaagtttgtgaaactac

SEQ ID NO: 185987 - DNA, 1750 bp, Homo Sapiens
  misc_feature (306)..(337): n is a, c, g, or t
  misc_feature (1426)..(1437): n is a, c, g, or t
ttggcagaagcagaagtagctgctttttagcaatagaattgtttcagtattttgctgctgtttaatgcgcatcttcagaaaacttcccagtggcttcaaggaatttggggatctctctggcaacaaattgtgaaacatgaaatttctgctgactttaatatatgaaacctaatcctacccccttttttaacaaaaagaaactagtacatttgtgaaaattgtgttgtgttgtccattgttgctctagttctgacccagaggtagctctggagtgattttagacctactcactcagttgtgtgtagnnnnnnnnnnnnnnnnnnnnnnnnnnnnnnnnctctccttaatagaagcatcctttttaaagagaagttgccttggtccacacactaagcagaaaaccaagttatcaggacagagatatttcccagttactcctaatcaatgaagaaagtgagttggatatttttaaagcagttaactaattttttcttacctaatcttttgggagttttgcttgttgatataacctttttagttaacctgaaagattccaaaaattgttcttaagtgcttgagactggaaccaaaattaaattgtacttcataaaatcctcttatagagttactcttgccctagattgtaaattaagtttggcattattgtcagactggatggagggtgaagtaaaatagtatgaacaattaagaggctctccccctcttgtctttaagccatattctcctacatgtattttataagaaaatgttaagtcaaattttagtggctctttaattcctgacctcttcattctccttttcagtataacctcccctatgctcatgcccacacagacaaaaaacaaaacgaaatacacacagaaaaaagtctttccaaactgtttaagtatttaaacatctgagccaaagcagatagaagttattgtataattgttaatcactttgcaaataggggctatcagattacctatattggcattgctggattataaactctatatctgtaatataaagtgtttgagtttttaattgggctgttatgatcagtagttgattttgagaaagctctatgagctctaagtaactgcatggttttttgtttaatgtaatataggagacccttcacattcccaaggaatatattccaaaacatttttgtgaatatctaagtttgtgaaactactagggcatgatacagtaaggtgtaattacagaatttacgaaatgtaaatgacctctacagagttttatggaatacctggtactaacgtaggcagctgcaaaaccacactgagttacagctgtcagccctcctcattcctaaataacttgccttacatatcagccctcccacttctgaagttcaaattagtgcctcggaaatgtagaatttattatttgtcannnnnnnnnnnnagcatagattgagaacagttgaactcttaaatcctcagatgccaggggtctgctctagcatcagtaagtatttagcagaaactaactccgtaatgaatggaattcaattccacacatggtttgttcaagcacacttaataagtagcctattttttaaatgtctttttaaaatgtaaatatttggatgaagtttttctttgttttgatatattcgtttgctacaccaaactatgttttcagaattcatcttttgaacaacttggtttcagaatatgtaaattgactttaagatcttgtgtatcaaacctatccc

SEQ ID NO: 185988 - DNA, 1537 bp, Homo Sapiens
  misc_feature (84)..(116): n is a, c, g, or t
  misc_feature (628)..(668): n is a, c, g, or t
  misc_feature (1206)..(1218): n is a, c, g, or t
actttgtacaaaaaagttggctagttctgacccaaaaggtagctctggagtgattttagacctactcactcagttgtgtgtagnnnnnnnnnnnnnnnnnnnnnnnnnnnnnnnnnctctccttaatagaagcatcctttttaaagagaagttgccttggtccacacactaagcagaaaaccaagttatcaggacagagatatttcccagttactcctaatcaatgaagaaagtgagttggatatttttaaagcagttaactaattttttcttacctaatcttttgggagttttgcttgttgatataacctttttagttaacctgaaagattccaaaaattgttcttaagtgcttgagactggaaccaaaattaaattgtacttcataaaatcctcttatagagttactcttgccctagattgtaaattaagtttggcattattgtcagactggatggagggtgaagtaaaatagtatgaacaattaagaggctctccccctcttgtctttaagccatattctcctacatgtattttataagaaaatgttaagtcaaattttagtggctctttaattcctgacctcttcattctccttttcagtataacctcccctatgctcatgccnnnnnnnnnnnnnnnnnnnnnnnnnnnnnnnnnnnnnnnnngtctttccaaactgtttaagtatttaaacatctgagccaaagcagatagaagttattgtataattgttaatcactttgcaaataggggctatcagattacctatattggcattgctggattataaactctatatctgtaatataaagtgtttgagtttttaattgggctgttatgatcagtagttgattttgagaaagctctatgagctctaagtaactgcatggttttttgtttaatgtaatataggagacccttcacattcccaaggaatatattccaaaacatttttgtgaatatctaagtttgtgaaactactagggcatgatacagtaaggtgtaattacagaatttacgaaatgtaaatgacctctacagagttttatggaatacctggtactaacgtaggcagctgcaaaaccacactgagttacagctgtcagccctcctcattcctaaataacttgccttacatatcagccctcccacttctgaagttcaaattagtgcctcggaaatgtagaatttattatttgtcannnnnnnnnnnnnagcatagattgagaacagttgaactcttaaatcctcagatgccaggggtctgctctagcatcagtaagtatttagcagaaactaactccgtaatgaatggaattcaattccacacatggtttgttcaagcacacttaataagtagcctattttttaaatgtctttttaaaatgtaaatatttggatgaagtttttctttgttttgatatattcatttgctacaccaactatgttttcagaattcatcttttgaacaacttggtttcagaatatgtaaaatgactttaaggatcttgtgtatcaaacctatcctcggatg

SEQ ID NO: 185989 - DNA, 1258 bp, Homo Sapiens
  misc_feature (477)..(485): n is a, c, g, or t
  misc_feature (1088)..(1119): n is a, c, g, or t
actttgtacaaaaaagttggggatgggttagatggagaaacaatctttatgtatatgttccttgctggtcttgggcttctggttattgttggccttcatcaactcctagaatctagaaagcgtaagagacccatacagaaagtagaaatgggtacatcaagtcagaatgatgttgacatgagttggattcctcaggaaacattgaatcaaatcaataaagcttcaccaagaaggttgcccaggaaacgggcacagaagagatcagtgggatctgatgagtaaatgttcctttgtgcaacaattcggtctttacttaacctgccctaatatttttcggcctgatgggaattagtgcagagaagccatgtcaccatagaaggcaactcctacttgtgtgtggactgagcaatcagagtctgtggcgataatattgctgaaaatgcactgcattcatttttctaaagtaacaaatttggnnnnnnnnnaaaccattaaaatctatgtgtgtgcgtgtgtatgtatgtgagcagttggtcttaccagaatcattgttgaactacctgaaacaagtctttagaatactaaatataatgctgttgtctcttcctttttgacattttctgattttttcccccaaaactcagttaatatttacccactatgattattgatgtcctgccttgaacagttttaaagaaaacaatttttggaatagctcaaatttcaattgatggcacaaatcagcattttgttgttgttactgtattacaattagtattctaaaggcagaagcagaagtagctgctttttagcaatagaattgtttcagtattttgctgctgtttaatgcgcatcttcagaaaacttcccagtggcttcaaggaatttggggatctctctggcaacaaattgtgaaacatgaaatttctgctgactttaatatatgaaacctaatcctacccccttttttaacaaaaagaaactagtacatttgtgaaaattgtgttgtgttgtccattgttgctctagttctgacccagaggtagctctggagtgattttagacctactcactcagttgtgtgtagnnnnnnnnnnnnnnnnnnnnnnnnnnnnnnnnctgctccttaatagaagcatcctttttaaagagaagttgccttggtccacacactaagcagaaaaccaagttatcagggacagagatatttcccagttactcctaatcatgaagaaagtgagttgggatatttttaagc

SEQ ID NO: 185990 - DNA, 1956 bp, Homo Sapiens
  misc_feature (867)..(875): n is a, c, g, or t
  misc_feature (1478)..(1509): n is a, c, g, or t
tgtaccaaaaaagttggggaagaagatgtgtctggtgaacctgaagcttcaccgagtgcagatacaactatactgtttgtaaaaggagaagattttccagcaaataacattgtgaagttcctggtaggctttaccaacaagggtacagaagattttattgttgaatccttagatgcctcattccgttatcctcaggactaccagttttatatccagaatttcacagctcttcctctgaacactgtagtgccaccccagagacaggcaacttttgagtactctttcattcctgcagagcccatgggcggacgaccatttggtttggtcatcaatctgaactacaaagatttgaacggcaatgtattccaagatgcagtcttcaatcaaacagttacagttattgaaagagaggatgggttagatggagaaacaatctttatgtatatgttccttgctggtcttgggcttctggttattgttggccttcatcaactcctagaatctagaaagcgtaagagacccatacagaaagtagaaatgggtacatcaagtcagaatgatgttgacatgagttggattcctcaggaaacattgaatcaaatcaataaagcttcaccaagaaggttgcccaggaaacgggcacagaagagatcagtgggatctgatgagtaaatgttcctttgtgcaacaattcggtctttacttaacctgccctaatatttttcggcctgatgggaattagtgcagagaagccatgtcaccatagaaggcaactcctacttgtgtgtggactgagcaatcagagtctgtggcgataatattgctgaaaatgcactgcattcatttttctaaagtaacaaatttggnnnnnnnnnaaaccattaaaatctatgtgtgtgcgtgtgtatgtatgtgagcagttggtcttaccagaatcattgttgaactacctgaaacaagtctttagaatactaaatataatgctgttgtctcttcctttttgacattttctgattttttcccccaaaactcagttaatatttacccactatgattattgatgtcctgccttgaacagttttaaagaaaacaatttttggaatagctcaaatttcaattgatggcacaaatcagcattttgttgttgttactgtattacaattagtattctaaaggcagaagcagaagtagctgctttttagcaatagaattgtttcagtattttgctgctgtttaatgcgcatcttcagaaaacttcccagtggcttcaaggaatttggggatctctctggcaacaaattgtgaaacatgaaatttctgctgactttaatatatgaaacctaatcctacccccttttttaacaaaaagaaactagtacatttgtgaaaattgtgttgtgttgtccattgttgctctagttctgacccagaggtagctctggagtgattttagacctactcactcagttgtgtgtagnnnnnnnnnnnnnnnnnnnnnnnnnnnnnnnnctctccttaatagaagcatcctttttaaagagaagttgccttggtccacacactaagcagaaaaccaagttatcaggacagagatatttcccagttactcctaatcaatgaagaaagtgagttggatatttttaaagcagttaactaattttttcttacctaatcttttgggagttttgcttgttgatataacctttttagttaacctgaaagattccaaaaattgttcttaagtgcttgagactggaaccaaaattaaattgtacttcataaaatcctcttatagagttactcttgccctagattgtaaattaagtttggcattattgtcagactggatggagggtgaagtaaaatagtatgaacaattaagaggctctctccctcttgtctttaagccatattctcctacatgtattttataagaaaatgttaagtcaaatttta

SEQ ID NO: 185991 - DNA, 1658 bp, Homo Sapiens
ttgggctggagtgaaggtggctacgagttttccagatttaggagacttcagaaaggtggggcagatagaatggagatggcaaagatctctttgggcatatatgggcctggcgaagtaatggaataatttctaattttcggagaagccctcatgccgggatggcagaagatgagcctgatgctaagagccccaagactgggggaagggcccccccaggtggtgctgaggctggggaacctaccacccttcttcagaggctccgaggtaccatttccaaggccgtgcagaacaaagtagaggggatcctgcaagatgtacagaaattttctgacaatgacaagctgtatctctaccttcagctcccctcaggacccaccactggagacaaaagctcagagccaagtacactgagcaatgaggagtacatgtatgcctataggtggatccgcaaccacctggaagagcacactgacacctgtctgccaaagcaaagtgtttatgatgcctatcggaagtactgtgagagtcttgcctgttgccgcccactcagcacagccaactttggcaagatcatcagagagatcttccctgacatcaaagctcgaaggcttggtggccggggccagtccaaatattgctacagtggcataaggaggaagaccttggtgtctatgccacccctgcctggacttgacctaaagggttctgagagtccagaaatgggcccagaagtaaccccagcacctcgagatgaactggtggaggcagcgtgtgccctgacctgtgactgggcagagcggatcctgaaacggtccttcagttccatcgttgaggtcgcccgcttcctgctacagcagcatctcatctctgcccgatctgcacatgcccatgtgcttaaggccatggggcttgctgaagaggacgaacatgcacctcgggaacggtcatctaaaccaaagaatggtttagagaacccagagggtggagcccacaagaagccagagagactggcccagcctcctaaggatctggaagcccgaactggggccggtcctctcgcacgtggagagcggaagaagagtgtagttgagagctcggccccaggagccaataacctgcaggttaatgccctagtggctcggctgcctctgctccttccccgggcccctcgctcactaattccgccaatcccagtctctccacctattctggcccccaggctttcttcaggtgccctgaaagtggctacactgcctctgtctagtagggccggggcacccccagcagctgtgcccatcattaacatgatcttaccaactgttcctgctttgcctggacctggacctgggcctgggcgagctccacctgggggactcactcagccccggggcacagagaacagagaggtaggcataggtggtgaccaaggaccacatgacaagggtgtcaagaggacagctgaagtacctgtgagtgaggcagtgggcaggctccaccagctaaagcagcaaagcaagatatagaggatacagcaagtgatgccaaaagaaacgggggcgctctcgaaaaaagtcacgtggaagtggggaaaggaattctacctctctcaagtcagcagctgccatggaatctgcccagtcctcaaggttaccatggga

SEQ ID NO: 185992 - DNA, 1373 bp, Homo Sapiens
actttgtacaaaaaagttggcccatgtcctggtgggacccctgctggcagcagtggcggcagccctggtgaagaccccaggagaacagagcccaggtactgcagcggcctcggtgcaggtacagctcaggatccctgcccggtttctcagctggagaaaaggcccagggttagtgaagcatccagaggcctggagcttggacatggaagacccagagttgcagccaagacccatgagaggctgctcccccagggcccgcctgagctgcccagtgagtctccccctccggagctgccccctccggaagctgcgcctcctgtgttgccagcctcctccctgcagccgccatgccactgtgggaagcccctgcagcaggagctgcacagcctcggtgctgcccttgcggagaagctggatcggctcgccacagcgctggcaggcctggctcaggaagtggccaccatgaggacccaggtgaatcggctggggaggcgcccccaaggccctgggccaatgggccaagcttcctggatgtggaccctcccacggggacctcgctgggctcatggccctggtcacagacatctgccctactggaggcagaagggacccacgaggcctaaaccaaagatcctgcgtggccagggagagagctgcagggctggtgacctgcaaggactctccagagggaccgctcgccgggcacgtccgctgcctccagacgctcccccggcagaacctcctgggctccactgcagctcttcccagcagctgctgtcctctacacccagctgccatgctgcgccgcctgcacaccccctcctcgcacataccgggggccaccagagcccccttccccctttagtgcctgctgccttacccctgcagggagcctctcctcctgcagccagtgcagatgcagacgtgccgacctcaggagtggcaccagacgggatcccagagcggcccaaggagccgagcagcctgctgggaggagtgcagagggccctccaggaagaactgtggggtggggagcacagggacccgagatggggggcgcattgatggcattcctcttctccacatctgctcgttcttgccgagggtgcagtggtggcgtggaagccctgtcaccccaccccaggccaccctctcccagaggacgccatctcccttactgttgctgggagcctcgccctttgtcccaactgggtagagcccccaggtgctgtttgctcaggaggctgctgtgggggtgccttcctcagcctctggccctcttggctcagattcaatcaaatgttgcttccctctcctgtctttcccactggagccgcccaagcttgtagtgggtggtgtgcataggccacgtg

SEQ ID NO: 185993 - DNA, 969 bp, Homo Sapiens
actttgtacaaaaaagttggcccggatccaccgtgcctctgcggcctgcgtgcccggagtccccgcctgtgtcgtctctgtcgccgtccccgtctcctgccaggcgcggagccctgcgagccgcgggtgggccccaggcgcgcagacatgggctgctccgccaaagcgcgctgggctgccggggcgctgggcgtcgcggggctactgtgcgctgtgctgggcgctgtcatgatcgtgatggtgccgtcgctcatcaagcagcaggtccttaagaacgtgcgcatcgaccccagtagcctgtccttcaacatgtggaaggagatccctatccccttctatctctccgtctacttctttgacgtcatgaaccccagcgagatcctgaagggcgagaagccgcaggtgcgggagcgcgggccctacgtgtacagggagttcaggcacaaaagcaacatcaccttcaacaacaacgacaccgtgtccttcctcgagtaccgcaccttccagttccagccctccaagtcccacggctcggagagcgactacatcgtcatgcccaacatcctggtcttgggtgcggcggtgatgatggagaataagcccatgaccctgaagctcatcatgaccttggcattcaccaccctcggcgaacgtgccttcatgaaccgcactgtgggtgagatcatgtggggctacaaggacccccttgtgaatctcatcaacaagtactttccaggcatgttccccttcaaggacaagttcggattatttgctgagctcaacaactccgactctgggctcttcacggtgttcacgggggtccagaacatcagcagatccacctcgtggacaagtggaacgggctgagcaagatgacttctggcattccgatcagtgcaacatgatcaatggaacttctgggcaaatgtggcccgcccttcatgactcctgagtcctcgctggagttct

SEQ ID NO: 185994 - DNA, 1058 bp, Homo Sapiens
ttgggttctttttttgagggatccttgaccctgggaagtctggagcaccctgagaagggggcaccatgtgtgcctttgcccacgtgtcctgaggggctgcttgtctgggagggagggagagaacattcagcagcaggtgcttttttatggccttttcttaaaataacctaagggggacacatccatcttgcagagaagtttacagaactccccttgaaaactgctgctgaggctcctgttaaattttctgtggcatcttttatgccttggtaaaaactgcagtgtctttggacctgagagtggctactccgtggttttgtgacctgtaagcgtggggttcaggggtgtgtggccctgcagggtcccacgcctccctgagcactgactggaagtttcactggctggtggctgtcccttctcccatcagggtccccagcaaagttaactacacagaggacccaggggaaacgagctgtgtagccactgacttgctcgcgcggccgtggcctctgaggggcactcgccggttaagacagggtgggagtagtgctttccagttcagactctaacttctcccaaagtgtcctaagaaaatactggatcggctcatagatttatgctccttatgatgccctaacttggaaggttgttctagggacaggccgggcagtgtccccacacacaccttagagtcgaaggccccagggccccgctgtcacttgcccaaaagatcccttccggcaggtaagggactaccaatgcttacgtcaaaacagcaaaatcggctttgcagtgcactttggggagcagatattaacttatttttgtgttggacagtaatgaaatcttgtgatttttaatcgctttgataatacttccaaattttatgatttttctgaaggaaataatgcaaacattttaaatatgtttctccccctttccaaaaactgttaaactaatgatcaagtaacactaactttgaatgtctctacaatacccgttgataatcagtggagccaaggctttggggtagcggccctgagcttgcagggtttctc

SEQ ID NO: 185995 - DNA, 1916 bp, Homo Sapiens
ccgcatgggccatctggaaactgctgctggagctggaaacacctctttctctggtctggggaatgatacaggttcaaagagcctgatgcggatccagtcggctgccttctggctggccatcagcgtctccaggtagtcgcggcccaggtagtagggcggccgctcgttgatcctctgtgggagccgctccagcagccccacgggcacgtaccggcacaggaaggacagccactcgagcagaaagcgccgggtcttctccacgccctgcgtgtccgagccccagtgctccaggccgtagttggtgaagtcccgcaggatgtccaggcgctcggacgacgagatgtcccagtgccgctgctccttgatctccgtgaagagccacggcttgagcagggcgccacgggcaatcatgatcccggtgacaccagtctgcatggcgcggttggcatcctcaaatgacaagatgtccccatttccgaacaggggcatggggctggcggcctgcacgcactcctcgatgtactgccagtcggctagcttggtgtagcgctgctcccgagagcggccgtggagcgtgacgagtgccacgccccagtcccgcagctcgggcagcaggcggtgcgccaggttcacacgctcctggacgcctgtgcggatcttcacagtcagcggcacatccagcacctggttcatgccacggacgatctgctggaacttggtggagcgattcatgagggcacagcccccacccttcttgtacacgaggtcgatggggcagccgacgttgatgtccacaaagtccacctccacggtgcggctcagcagctcggcacacttggtcatggtgtcggggaaggcgccctccagctggacgccaaagatgtcctcacactggtggcgtttgagtagggcccactcggacatctggccctgcagcaggttggtgcagacggccatctctccacatgtcacatccgccccgaagcgcttgcagatccgtcggaagggcaggttcccacacgtggtgaggggggccaggtaaagtttgccacggatgtccagccgcttcttctcacagggccgcagcctgaccacgtcctcatccgtcaggggcccgcaggtccgcacggggctgctgggaggggtgctagtgcccggccctgcggggacctgctgggcaccacagttttcctgcctgggagcgccctcggctgccgtgccctcggggacagcggcagcgggtgtggggccctggctgaaccggcgcagggcctgctcagctcgctcgaagcggacctcgcgcttccgcagctgctgctgcagggctttgtccaggccgttgcggatggacgggggctgggtcccgcgggccgccaactcctcctgcaccaggttctgtccctcgggcctcaggtgggccccagcgaagcggcaggtcacgccgtaggggcaccggccgaaggtctcgaagagcacgcagcgggggcccaggtcggccggcttggtctccaggtagcgccccacgtcgtgcagaaagcggcagcgatcaccgaagaaacacttagcagccgactcctggattagggagggacacagcctgttcttgtcgtagttcgtgggcttcacatggggccggcccttgttttgtccccgggccctcttctgagtctgtagctgctccccgggctctgctgcctcctccgtctgcccgtccgccgtctgtccatcctccagtcggatccgcttagcctcaggctcagccagctcattgccagcagggtctcctacctcggtttcccggcaagtcttctcctgccctttggcttccaggaattggtgaaactgctccttggtggtgaggtattgacgcttaatgggcgccactcctcgttccaaagctccggctcccgagccaa

SEQ ID NO: 185996 - DNA, 1206 bp, Homo Sapiens
ttggcacagattcaggaggaatttggctttcacactggactcagataccttcttcagtgtgttggaaatcactggcttcacacaggcccaactccagctggtcagggcagagtgatcgtaactaaaggtcagtggggaatagatccgattcagtgcttttgccttatgcatttcagcatcctggctccccagggtggcaggagctgagggagggccacacactggcaagatttcaagaccactctctgcactgaagaggtaaaatttgcactgcaagtcacatccctgaggccagaggtcagtaccctttggtatttcgattagaagaagctgcaaaagaaaggcagcccattttaccattgccagccaggccggggacacaggagccggtgtgtgcactctgcctcctcaccttgcacccagagcaagaggactgggtgctgggctgcagaggccggtcagtggagcccctagcacgtgtgaactcaggcttttcattgggcccggctccacttctaggccatgttttgactcatttggtaaccattgcctgtaagcagcacagaattggtgccatggattatcttttccatgttgatggaattcattctgttggaatcctttggccagatgtcacttcagccagggtgtgcatcatcattggttctttttcacaggctgagcctcctgaaaacccatgaacgctggggctggggaagtgaaccctgaggtggggaccctctcttcccatcaaatcatccagctcagtgtggggcgtggcaggggggtaaatgaagccagccaatgtgttaacctgtctctgtcaacctaagaatgttggccttactgacacacctttgctccatgttcaagaccagaagtagctgggatttgtttgcaaattgggtaattagtttaaaaatctgtgattacatttttaaatgaaattttcaaagtggcctagattgaggtgattcagataggtttgcgaatataccattttatattgttgagaaagaacaaaaagggaatttccagatgtcctagaaatcctagcaacagatttctctggttgtcagtttccctggagaacgcgccagataggaatctccaatcagttgtttttctcttcgcttcaagcccttacacaaaagccatgaagagatgttcacctacccggtattttaaatgttctgtaaattatta

SEQ ID NO: 185997 - DNA, 1362 bp, Homo Sapiens
  misc_feature (124)..(154): n is a, c, g, or t
ttggcaattactgctactttggaaataaccataataactaaaatatagaagaataatcaaaactgagcttttctaagaattgaaagcaaaactttttgttccttgaacgacattttaaaactcnnnnnnnnnnnnnnnnnnnnnnnnnnnnnnncacgtgtgcgcatgtgtggtttaaattcagccctcatggagaccataaagcaaatgtgggtttaaatctcaaattcaacaagaaaaatgaggaggtacctggatatactaagaaagttggaagtgaatggatgtattcatctgcagcagaacaacttctggcagagtacttagagagagctccagaactatttagttatatagccaaaaatagccaagaggatgtgttctatgaagatgacatttggcctggagaaaatgagaatggtgctgaaaaagttcaagaaattattacttggctaaaaggacatcctgtcagtactttatctcgttcttcttgtgatttacaaattctggatgcagctattgttgagaaaattgaggaagaagtcgaaaagtgcaagcaaagaaagaataataagaaggtgcgagtaacagtgaaaccccatttgctatacagacctttagaacagcaacatggagtcattcctgatcgggatgcagaattttgtctttttgaccgtgttgtaaatgtgagagaaaacttctcagttccagttggccttcgaggcaccatcataggaataaaaggagctaatagagaagccaatgtactatttgaagtattatttgatgaagaatttcctggagggttaacaataagatgctcacctggtagaggttatcgactgccaacaagtgccttggtgaacctttctcatgggagtcgctctgaaactggaaatcagaagttgacagccatcgtaaaaccacaaccagctgtacatcaacatagctcaagttcatcagtttcctctgggcatttgggagccctcaaccattcccctcaatcactttttgttcctactcaagtacctactaaagatgatgatgaattctgcaacatttggcagtccttacagggatctggaaagatgcaatactttcagccaactatacaagagaagggtgcagttctacctcaagaaataagccaagtaaatcaacatcataaatctggctttaatgacaacagtgttaaatatcagcaaagaaaacatgaccctcacagaaaatttaaagaagagtgtaagagtcctaaagctgagtgttggtcccaaaaaatgtccaataagcagcctaactctggaattgagaactttttagcatctttgaatatctccaaagaaaatgaagtacagtcatctc

SEQ ID NO: 185998 - DNA, 2123 bp, Homo Sapiens
  misc_feature (1339)..(1357): n is a, c, g, or t
  misc_feature (1823)..(1831): n is a, c, g, or t
ctttgtacaaaaaagttggagagtgaagacatttccacctggacacctgaccatgtgcctgccctgagcagcgaggcccaccaggcatctctgttgtgggcagcagggccaggtcctggtctgtggaccctcggcagttggcaggctccctctgcagtggggtctgggcctcggccccaccatgtcgagcctcggcggtggctcccaggatgccggcggcagtagcagcagcagcaccaatggcagcggtggcagtggcagcagtggcccaaaggcaggagcagcagacaagagtgcagtggtggctgccgccgcaccagcctcagtggcagatgacacaccaccccccgagcgtcggaacaagagcggtatcatcagtgagcccctcaacaagagcctgcgccgctcccgcccgctctcccactactcttcttttggcagcagtggtggtagtggcggtggcagcatgatgggcggagagtctgctgacaaggccactgcggctgcagccgctgcctccctgttggccaatgggcatgacctggcggcggccatggcggtggacaaaagcaaccctacctcaaagcacaaaagtggtgctgtggccagcctgctgagcaaggcagagcgggccacggagctggcagccgagggacagctgacgctgcagcagtttgcgcagtccacagagatgctgaagcgcgtggtgcaggagcatctcccgctgatgagcgaggcgggtgctggcctgcctgacatggaggctgtggcaggtgccgaagccctcaatggccagtccgacttcccctacctgggcgctttccccatcaacccaggcctcttcattatgaccccggcaggtgtgttcctggccgagagcgcgctgcacatggcgggcctggctgagtaccccatgcagggagagctggcctctgccatcagctccggcaagaagaagcggaaacgctgcggcatgtgcgcgccctgccggcggcgcatcaactgcgagcagtgcagcagttgtaggaatcgaaagactggccatcagatttgcaaattcagaaaatgtgaggaactcaaaaagaagccttccgctgctctggagaaggtgatgcttccgacgggagccgccttccggtggtttcagtgacggcggcggaacccaaagctgccctctccgtgcaatgtcactgctcgtgtggtctccagcaagggattcgggcgaagacaaacggatgcacccgtctttagaaccaaaaatattctctcacagatttcattcctgtttttatatatatattttttgttgtcgttttaacatctccacgtccctagcatnnnnnnnnnnnnnnnnnnntttaaactgctttttcggaagaacaacaacaaaaaagaggtaaagacgaatctataaagtaccgagacttcctgggcaaagaatggacaatcagtttccttcctgtgtcgatgtcgatgttgtctgtgcaggagatgcagtttttgtgtagagaatgtaaattttctgtaaccttttgaaatctagttactaataagcactactgtaatttagcacagtttaactccaccctcatttaaacttcctttgattctttccgaccatgaaatagtgcatagtttgcctggagaatccactcacgttcataaagagaatgttgatggcgccgtgtagaagccgctctgtatccatccacgcgtgcagagctgccagcagggagctcacagaaggggagggagcaccaggccagctgagctgcacccacagtcccgagactgggatcccccaccccaacagtgattttggnnnnnnnnntgaaagttctgttcgtttatccattgcgatctggggagccccatctcgatatttccaatcctggctacttttcttagagaaaataagtcctttttttctggccttgctaatggcaacagaagaaagggcttctttgcttggtcccctgctggtgggggtgggtccccagggggccccctgcggcctgggcccccctgcccacggccagcttcctgctgatgaacatgctgtttgtattgttttaggaaaccaggctgttttgtgaataaaacgaatgcatgtttgtgtcacg

SEQ ID NO: 185999 - DNA, 688 bp, Homo Sapiens
gaacaccgatcatgtgcttcttggatctggtgactgttctctccctgttttcctttctttttgggtgtttgaggagcatggcttagcttgagacacacacagacactgtgtacttcagtgaagggcttaatatacaatttccaaacctgacgactcttcttcttgtaatggctgcccttttcctacctgaggccgtcttagagaaaggggccagtctcctctaatgctcagatttcccatagttggcttttgctgtgtctcctgcctcaggcagtgtcatttctgggagcaggtggttgtagtccaggcccctccccagcagggtctgcccaggctccttcgagcccctttccccgcctcctctcagcctgtccggatgacagtgttcgcctcctgtttagactgtacactcttcaggggtaggggtgccgtcagttcttcaatcagctggcacacacttgtatagtgaaatgtttacatgtgggaaaactccgccttacacaaactacccaaagtacaatcgtgtctctctctaaccggaatgctacagagagaaatggaaccttagatttgcaacaaagtctgtaaactggtctgttttgcccaagtgaaactggatgactaaaggagctgaagaacgcccccaaaagccgaattgtggtgggttattttattttgcctgtggcca

SEQ ID NO: 186000 - DNA, 1448 bp, Homo Sapiens
ttggatcctcatgagttaagaaacatatttctacagtatgccagtactgaggttgatggagagcgttacatgaccccagaagactttgttcagcgctatcttggactgtataatgatccaaatagtaacccaaagatcgtgcagctcttggcaggagtagctgatcaaaccaaggatgggttgatctcctatcaagagtttttggcatttgaatctgttttatgtgctccagattccatgttcatagtggctttccagttgtttgacaagagtggaaatggagaggtgacatttgaaaatgtcaaagaaatttttggacagactattattcatcatcatatcccttttaactgggattgtgaatttatccgactgcattttgggcataaccggaagaagcatcttaactacacagaattcacgcagtttctccaggagctgcaattggaacatgcaagacaagcctttgcactcaaagacaaaagcaaaagtggcatgatttctggtctggatttcagtgacatcatggttaccattagatctcacatgcttactccttttgtggaggagaacttagtttcagcagctggaggaagtatctcacaccaggttagcttctcctacttcaatgcatttaactcgttactgaataacatggagcttgttcgtaagatatatagcactctagctggcacaaggaaagatgttgaagtcacaaaggaggaatttgcccagagtgccatacgctatggacaagtcacaccactagaaattgatattctatatcagcttgcagacttatataatgcttcagggcgcttgactttggcagatattgagagaatagccccattggctgagggggccttaccttacaacctggcagaacttcagagacagcagtctcctgggttaggcaggcctatctggctccagattgccgagtctgcttacagattcactctgggctcagttgctggaggtctgataccacaacttataggggttgctccagaaaaggccattaaactgactgttaatgattttgttcgggacaaatttaccagaagagatggctctgttccacttccagcagaagttcttgctggaggctgtgctggaggctctcaggtcatttttaccaacccattggagatagtgaagattcgtctgcaagtagctggagagatcaccacgggacccagagtcagcgccctgaatgtgctccgggacttgggaatttttggtctgtataagggtgccaaagcgtgtttcctccgagacattcccttctctgcaatctattttcctgtttatgctcattgcaaactacttctggctgatgaaaatggacacgtgggaggtttaaatcttcttgcagctggagccatggcagtgtcccagctgcatctctggtgacccctgctgatgtcatcagacaagactgc

SEQ ID NO: 186001 - DNA, 1828 bp, Homo Sapiens
ccaactttgtacaaaaaagttgggtgctaagttccttataagagataatggtgctctgcctatgccagcttggcacccgaagatgtgtgagtggacgtgaggctgagtattaccttagtatttttctctgggtctttggaaaaccatagtcaatttttagaacatattgctttcattccccataaactcttcacacatgataactgtttaagctttgaaaacacatactgaagtattgtgagcttaaaaaaactttttaaatatttgcatagttttgaggtgaatttgtttccttacagatctctcctaatcattgagatgtatatttcaaaagaggaaattttacatgttgtccaaaacagccttgctagtaactggtgaattttggtattaactattattaaagtctttaaacgacacaggtacctaaagatcaccttaatgtggcaatttgtgatggtgtagctagctgattgtgaaaactgttcctttaaagtcgcttcttgcatgttcggtgttagtcatccagctcaggcttgtgttgcagctgacaatctaggaaagacggccttagagagtggtgcaggccccacactgacggactgccttagaaacccgacttcctctagactttgaaccgccagacttttctcttgtttagaaaacaaacttatatttaatgtacttactacttaaaactccagacagagatataatgtagaaggcaaatattggccaattttttcctctttttaagtggaagacaaatgaacgggatttttaaagtgcttttaaagtgcatgaatggttaataaatcagtatgaattgtaagccttcatcttacatccaagtccttagttggttagggtttcttttctttcttttttaaagagtgtcaattaccttttgaacctgtgaaaatttgatagttgttaacagtctgatggtcctaattctttcttttcattctagaaatgaatgtggttgtaatcatgttcctaattcttgggacaacctgcaagacagtgagacagtttaaaaattacctttcatgttgaaaaagtctgaaacagagaacccaatgatatttaaaataaatgctacataaaactctttttaaaattttgattttaacttaattaaaacaatgtcataaatatgctttttgattttgttactgcttttaatattaaagtaatagaatattgaagcaatattgtctagcactctgctggacattaagtccgcgggaggagaagtgaacaggaatcgattctttgtcttttaactgcccttagttaggagatgttaaaatacttggcacctctggttatatgtatgttatgtgtgttctcccccctaaaatttctaagcacatttattcacttttaaaatgaatctttaaaagattatagttagtagttatagttaatattctatttacttggaaaaatgtgaataaatggatcttcaaaagattcattttaaaaatgaataaatgtataataggctataggtgatcttacttgcgtattaggtaggaggcacatatttataccatttcatatgtaatatctttgtcattgtgtttcatcgaagatcaattgctagcaacttgaagggtatttatacttgggtcacttgaactcagctgactaaattgtaagaacgagagcaagcaagatggctgttattggaagccataacttccagaagataattctgcacaattcgtaagttaaaaaaaatctgtagggtcttccactatcctttttcagttgataatgctgttctgggcacacactttgtaaatggaatgttatggta

SEQ ID NO: 186002 - DNA, 1639 bp, Homo Sapiens
  misc_feature (466)..(501): n is a, c, g, or t
  misc_feature (1146)..(1156): n is a, c, g, or t
ttggcactgccttaaatgtcttgaatgttgcagtcaagtgtctgtcatgtgttgatatccacacagaattaggccctaatgagagccttagaccctcaaccatgcccccttcgttggcatcacagggccttatttggaagagcgggcaaagaggatggaaatcataaaatatttcatgggaatcgaacctagggatagtgctccacttctgacgatggagtgaagacacttggcagacttgagccagacacttcacctagtagttcctgaaactgtgagcaccactgcactaagccagtgcggagctgttagggacgggcccagctcctgcaccacggacacagaatgtctggagagggccagcaggccctctgagggttctggaatctgtgcaccttatttgaccacactccaaaattctgtttttattttaacccttgaatctgctttatgtacataatcaaannnnnnnnnnnnnnnnnnnnnnnnnnnnnnnnnnnnttttaatcatctacatgtaaatgaagcaatagaattctaacataaggccaagaaatgagacgaatgtttggggtttatgttttttaaggtaaatacgggtattgtttttaattattaccatgtattaaattgtgggctttgaaacctaatgaaacctgttagccacttctctgtgccatatacttcccatgttaccaaaatacccccaactctttagccaaaagagaaccctgacctcctgagtttccatgctcctttctgtaccaggtttaaatgtagtcttctggagaagtatttttgacattgagctctgggacaggacaccttgggtttgtggactgcagcccactatgatgttattacttctctggccaggcctccagtggaagtgcacaggcactcccaatgttgttaatgctctgtcttccatttgttctggaatcctacgtgttggtctgtggttccatgcattagctgtttgtaaataatgcatttgcatactgaaaaaggaatgccacctgccacagttgatggtgaggaagctcctttgacgtggtgcaattttgatgagatgtctctggggacacgaggatgccctaatgatgctgacttgtcatggttgcagcatttgaacttttggtgttnnnnnnnnnnncctgtaagtctgtaacctggcaacattttacaaccctgtatttttaaagatggctttctaataaaaaatccagaaccacacagccctatggtcaaacaatcctacgtttgtgcctctgcttttaaaggtgctgtgctggacagttggcatgccagggttcgagaagagtgaatggcttgacgtacttgcagttaattttgcaaaattggctggctgcctctgttcctactgtactgtaactttgatcatgtctgttcctgttccattctcccaggagcttctctgcagactgacacaccctcccccaccccgggtagtggagatgctggtgtctgggtagtcatggatttctgctggacatttgaatgtgataaacaatccagcattacttaggaaatgctacatgcggaatgtgcacgtttccaggggcgagtattgtcaatcaaaaggtttgcaatgatttccttcctgccaaaaataaac

SEQ ID NO: 186003 - DNA, 766 bp, Homo Sapiens
  misc_feature (379)..(432): n is a, c, g, or t
ttggctttcctcctggacagatccacagttatacacagaaacaaacacacacgcacgtagagaagtgattcacaaacacttaaagacataaatcacaggtgcaaagccatacctgggctcaaaaacctccaagagaacgcagcctcagacccacccaggggccaggggccaggctgtttgcgagaccagcccaggcgggacccaggcttgcacgggcaggtacacgacattcttgggcatacgcagcccgcctggccggagctgtgggagtcctcagccccaagacccagcaggcgtctgaggcctgcccactaaggaggaggagtcattgctgccatcattatcatcccctccccagccacagtctgaggagcccctnnnnnnnnnnnnnnnnnnnnnnnnnnnnnnnnnnnnnnnnnnnnnnnnnnnnnnggagatacctccaaagccggtacgcctgttcccagagttcgatgactctgactacgatgaggtcccagaggaggggccgggggccccagccagagtgatgaccaagaaggaggagcccccaccgagccgagtcccacgggccgtgcgcgtggccagtctgctgagcgagggagaggaactgtctggggacgaccaaggggatgaggaagaggatgaccacgcctatgagggcgtccccaatggcggatggcataccagcagcctgagcttgtccttgcccagcacaatagctgcgccacaccccatggacagaccgcctgggggctccaccccc

SEQ ID NO: 186004 - DNA, 2328 bp, Homo Sapiens
  misc_feature (2028)..(2037): n is a, c, g, or t
  misc_feature (2117)..(2152): n is a, c, g, or t
ttggccatcctcccacatcttgccattaccagtctgtgtagcacttaacctcctgccaccactgccaggcttgctcctccgttctctcccagagcaagtcagtctgagcagctccattagtccaaaacagagctttgctgcatgacttcagcctggcctctggatatttggtggaaatatattctaaattgaacaagccaggctgtccagggtggcaagaggatttttgacctggatttatacagggaccaaagactgaatgctcagcctctgtgcttagactttcatggtccttaggatagaagtgagtctctagccctgctacaccagagagctgaagagggatgtggtctggttccatccatacttgctggcatcctttgttaagccttctgagggcagtcttctttgaggtagaccttggaggcctgacatcgaagacctgtgtgttttattttcataaaagtatatatccttggtgtaaagtgtcttcttttaatataacactagtaaaaatgacatggtatgaccagcactgagtgctatagaaccacacatgtgtacatgttctggatgccaaatgagactgtgtgtaaatgactaagtgtagataactagaaattagataggggtcatcaggcgtttcggtatacctataaccagcactcggaattcctgacactgtttacttgatttaggaaagtttatgcctgctgcttctctgcctctttgaggtactcccagccgtcttactacagtcctgtaaatttaagtgcaatatatagaaacatatggatatatacagattatatatagggtgtaactataaagcaggtagactacttttttgcatcttggggaagtgagctcattactttaggttcaaattatgccaagaattttagatgtgatcagctggcttaagccaactcatgtcatgataaagctggattttcaagtccatgttttcttactccaactcttagagactcattgttccttaggtttgttagagttgagattttttttctccctgtcatctttgtactctctcatgtttgcatgtcttacattttgttgccggagaacaaggaagtccatctgtaaggagtttcctaaacggagaattaaaacctagtatttaacactaaccattctcctatgtatatactaatttatctgggaatgtaatactttattaaatgaagaaaatgatgctttcttcatttaatattttccacatcctggaaaaactataaactgacacagaatagattgaaatcttaactggggctaaacaaaaccctttccattggcagaatctccttttttcagggccataatgacatgatgtaaaaatttgctttaaaccattcatgcccttaaatagctagattttaaagcataataagcatattaacatttttaagcaaaagatacgttaacagtgacctttggttatccacagtagcaagagtaaagcacagatcattgaaatccatagataatcagtgaatcaactttcctaccaaacaatagattcatttacatttctttttcctccctatcctttcctgtaagcacctgtttttccatggaatggggttaatgagtaggtagaaaaggaaaaggaacaatcagtaggagctgacaaccagtgaccatataagcagctgattgcctgtaattagtcaggctgaacaattagagttgaatgctgaaattaggaaccacaggtggtaatcctgagtagatgtaactcttcagcgtcatctcctgccctgagctccaggccatctctctaaccaccaaagaactcttagtacctacgggaaggaaaagctgtgtgcgacacagaggaaactccattatttgaacacatttctttggctcttgacaaatacttgcttttcctctaatcttgcaagagctatggctcttctattttccaatcacacagcttggcatgtaggaaaggttgaatgatcctctaagactgtgttggtcttcgtattctgtaaaacccannnnnnnnnngtggtcttacagatgtttagaaagtggcacaggttactgaattgtctacctgccagcattctgatatagcacaaaaagcnnnnnnnnnnnnnnnnnnnnnnnnnnnnnnnnnnnnctggcattgagctctagggtggatgagggtttatggtcctctgatcataagctccattctaaaactggtcactgttagctgaaattgctttggttccccaaatgccttggaactctagacgcacccgcagggcctgagtaggcttcatagagttctagacttccgtgtgcgttgcc

SEQ ID NO: 186005 - DNA, 1327 bp, Homo Sapiens
ttggcagcttactaagccagatgtgatcctccggttggagaagggagaagagccctggctggtggagagagaaattcaccaagagacccatcctgattcagagactgcatttgaaatcaaatcatcagtttccagcaggagcatttttaaagataagcaatcctgtgacattaaaatggaaggaatggcaaggaatgatctctggtatttgtcattagaagaagtctggaaatgtagagaccagttagacaagtatcaggaaaacccagagagacatttgaggcaagtggcattcacccaaaagaaagtacttactcaggagagagtctctgaaagtggtaaatatgggggaaactgtcttcttcctgctcagctagtactgagagagtatttccataaacgtgactcacatactaaaagtttaaaacatgatttagttcttaatggtcatcaggacagttgtgcaagtaacagtaatgaatgtggtcaaactttctgtcaaaacattcaccttattcagtttgcaagaactcacacaggtgataaatcctacaaatgccctgataatgacaactctcttactcatggttcatctcttggtatatcaaagggcatacatagagagaaaccctatgaatgtaaggaatgtggaaaattcttcagctggcgctctaatcttactaggcatcagcttattcatactggagaaaaaccctatgagtgtaaagaatgtggaaagtctttcagccggagttctcacctcattggacatcaaaagacccatactggtgaggaaccctatgaatgtaaagaatgtggaaaatccttcagctggttctctcaccttgttactcatcagagaactcatacaggagacaaactgtacacatgtaatcagtgtgggaaatcttttgttcatagctctaggcttattagacaccagaggacacatactggagagaaaccctatgaatgtcctgaatgtgggaaatctttcagacagagcacacatctcattctgcatcagagaacccatgtgagagtgaggccctatgaatgcaatgaatgtggaaagtcttacagccagagatctcaccttgttgtgcatcatagaattcacactggactaaaaccttttgagtgtaaggattgtggaaaatgttttagtcgaagctctcacctttattcacatcaaagaactcacactggagagaaaccatatgagtgtcatgattgtggaaaatctttcagccagagttctgcccttattgtgcatcagaggatacacactggagagaaaccatatgaatgctgtcagtgtgggaaa

SEQ ID NO: 186006 - DNA, 2279 bp, Homo Sapiens
  misc_feature (391)..(422): n is a, c, g, or t
  misc_feature (679)..(718): n is a, c, g, or t
  misc_feature (1701)..(1713): n is a, c, g, or t
ttctgaactgtagaaatacccaactggtaacagttggccagaagtgtactgccttcaaatattttcataaatcttgtctttttcattttttctaaagtaaatacaccttgccccacccaattaaataaatctgattacatggctagcataatatctaaatatacaggatttattagtgatatttcatcatgggaaagtgggggagaggggcgtggatccaccaaacctcacaaattctgtatcacaatcctagtgctcttggatgttttaccactagttcttccaagataaaaatggcaatctcttaatcatccaaacaactcaaagcagttttagctaatgttaaactcattctaatccagtgatacctaaagcaaagcccaaacccagnnnnnnnnnnnnnnnnnnnnnnnnnnnnnnnnggaattcttaagctgtttcactacctgttgtatcatcatctcaaaaatggttctgccatgttgagttgactcccatagtcaaaaacaatgttttctttaacaattcaagtaaccaaaattgtacatgaataaatttataggtcatttttgcagaactggattaagaaaaaataaaatgtaatacattttctagtaaaacttctagtaaaggggtattggatgaattaattttgatttaataattgcctcacaatctnnnnnnnnnnnnnnnnnnnnnnnnnnnnnnnnnnnnnnnntgtaaggaaactggggtaaaagaacatgatgatgagagaaaagaagcgcatagaagccagtgattcttatctttcagaggaattatttcacaatactgatagtactgggaattgttaaaagtacattcctcatgtgaacctaaagtcagcaatggttctgccattttgatgttgtttataaaacagggtgtgaacctaacaaccacaacttcagtgttaacctactaaaatgctagaacttgattttctaagtccacatcccactgccagcaacaggatgaagcattagcactggcaccatgcagttaagagatgtgctttatattcgtgccaggagagagaaaattcatgtgtggaagataatccacaaccctgaaattttaccagtaattatttcagcacatataactgaaaataaaaaatggcagaaggactaaagaagaaaaaggaattctcttcttaggctatacttaaggctgtttatacaatgctaagataactgcaagacttctccaacttttagagcagtagtatttaagaatattgcacacaattctgtgtcaaagataaccctcagtttctaactttcagtcacagagacaataaagcaggagcccagtttcagacttcagtcaaaagaacattaaaaccatttcaatcactttaatcaagaaatggattaagtacaaaagtatttcataacttgaggaatcaactctaagaactcagctgtgtgtttttatatgtaaagaatgaatatataaatctttattctttcctaaatttattaattttatgacaattttatggttgctaaaagcaggcataaaaatttagagaggaaatctgtggagttgttactattatggaaggacttgttttcactgaaaacaatttgaaatatcttctgtactcagcgtgtgtaagaagattctaggcaacatcactgacaaatgtcaggaagaaatggtatgccctatttnnnnnnnnnnnnngtaaaactaatatggaagattggcatttaaggggaccaaactatttatacagttgagttctgttaagtcattgattcctaaaaaaataaaagatctttctatgattttaacaatccattaagcttttagtgcaaaatcacattgatttcccttgggaaggtcctggatttttgcttctcattgggggtggtgcacgctgtaatggtggtggctgcataccaccagccactggctgatacattcctctcatatcaatctgctggtagttagaaggattcatgatcaaatttgggggctttggcatcatgaggtgacccagtgttgcttgttgataagtcatttgttgctgttgctgctgattgtactgctgctggagccttctgttcataagtattcgctgaacacagctgattaacatctgttgttttgtcaatacatcattgtagattgcttctcttcgtttaacatcaagctcctggctggcttgtctacttaatgctaacgcctgtacttgccaacttttttgtacaaagttgccttttatagaaaagcattgctcatcaatt

SEQ ID NO: 186007 - DNA, 1800 bp, Homo Sapiens
  misc_feature (1500)..(1513): n is a, c, g, or t
actttgtacaaaaaagttggctctggacttgattgaagattttcttgaattagctagtagggagaagacagaagataaagataaaccccttatttataaaggtgaggggaagtggcttcgaaacattgactattaccgtttagatggttccactactgcacagtcaaggaagaagtgggctgaagaatttaatgatgaaactaatgtgagaggacgattatttatcatttctactaaagcaggatctctaggaattaatctggtagctgctaatcgagtaattatattcgacgcttcttggaatccatcttatgacatccagagtatattcagagtttatcgctttggacaaactaagcctgtttatgtatataggttcttagctcagggaaccatggaagataagatttatgatcggcaagtaactaagcagtcactgtcttttcgagttgttgatcagcagcaggtggagcgtcattttactatgaatgagcttactgaactttatacttttgagccagacttattagatgaccctaattcagaaaagaagaagaagagggatactcccatgctgccaaaggataccatacttgcagagctccttcagatacataaagaacacattgtaggataccatgaacatgattctcttttggaccacaaagaagaagaagagttgactgaagaagaaagaaaagcagcttgggctgagtatgaagcagagaagaagggactgaccatgcgtttcaacataccaactgggaccaatttaccccctgtcagtttcaactctcaaactccttatattcctttcaatttgggagccctgtcagcaatgagtaatcaacagctggaggacctcattaatcaaggaagagaaaaagttgtagaagcaacaaacagtgtgacagcagtgaggattcaacctcttgaggatataatttcagctgtatggaaggagaacatgaatctctcagaggcccaagtacaggcgttagcattaagtagacaagccagccaggagcttgatgttaaacgaagagaagcaatctacaatgatgtattgacaaaacaacagatgttaatcagctgtgttcagcgaatacttatgaacagaaggctccagcagcagtacaatcagcagcaacagcaacaaatgacttatcaacaagcaacactgggtcacctcatgatgccaaagcccccaaatttgatcatgaatccttctaactaccagcagattgatatgagaggaatgtatcagccagtggctggtggtatgcagccaccaccattacagcgtgcaccacccccaatgagaagcaaaaatccaggaccttcccaagggaaatcaatgtgattttgcactaaaagcttaatggattgttaaaatcatagaaagatcttttatttttttaggaatcaatgacttaacagaactcaactgtataaatagtttggtccccttaaatgccaatcttccatattagttttacnnnnnnnnnnnnnnaaatagggcataccatttcttcctgacatttgtcagtgatgttgcctagaatcttcttacacacgctgagtacagaagatatttcaaattgttttcagtgaaaacaagtccttccataatagtaacaactccacagatttcctctctaaatttttatgcctgcttttagcaaccataaaattgtcataaaattaataaatttaggaaagaataaagatttatatattcattctttacatataaaaacacacagctgagttcttagagttgattcctcaagttatgaa

SEQ ID NO: 186008 - DNA, 1197 bp, Homo Sapiens
  misc_feature (940)..(951): n is a, c, g, or t
gagcaatgctttttccataatggccaactttgtacaaaaaagttggcagatacataaacgaacacattgtaggataccatgaacatgattctcttttggaccacaaagaagaagaagagttgactgaagaagaaagaaaagcagcttgggctgagtatgaagcagagaagaagggactgaccatgcgtttcaacataccaactgggaccaatttaccccctgtcagtttcaactctcaaactccttatattcctttcaatttgggagccctgtcagcaatgagtaatcaacagctggaggacctcattaatcaaggaagagaaaaagttgtagaagcaacaaacagtgtgacagcagtgaggattcaacctcttgaggatataatttcagctgtatggaaggagaacatgaatctctcagaggcccaagtacaggcgttagcattaagtagacaagccagccaggagcttgatgttaaacgaagagaagcaatctacaatgatgtattgacaaaacaacagatgttaatcagctgtgttcagcgaatacttatgaacagaaggctccagcagcagtacaatcagcagcaacagcaacaaatgacttatcaacaagcaacactgggtcacctcatgatgccaaagcccccaaatttgatcatgaatccttctaactaccagcagattgatatgagaggaatgtatcagccagtggctggtggtatgcagccaccaccattacagcgtgcaccacccccaatgagaagcaaaaatccaggaccttcccaagggaaatcaatgtgattttgcactaaaagcttaatggattgttaaaatcatagaaagatcttttatttttttaggaatcaatgacttaacagaactcaactgtataaatagtttggtccccttaaatgccaatcttccatattagttttacnnnnnnnnnnnnaaatagggcataccatttcttcctgacatttgtcagtgatgttgcctagaatcttcttacacacgctgagtacagaagatatttcaaattgttttcagtgaaaacaagtccttccataatagtaacaactccacagatttcctctctaaatttttatgcctgcttttagcaaccataaaattgtcataaaattaataaatttaggaaagaataaagatttatatattcattctttacatataaaaa

SEQ ID NO: 186009 - DNA, 1267 bp, Homo Sapiens
  misc_feature (557)..(584): n is a, c, g, or t
  misc_feature (847)..(907): n is a, c, g, or t
gatttcccaattaacccttgtaagtattattcttaaagttatagtttcatccatggtaaaaagatatagaaagttgcctaaaattttcacatctatgtctttgagtaaataattagaccatggtgaaaattcccaggtctagtaaatcaggtttaaaatattctgaacttgtagaaataccaactggtaacagttggccagagtgtactgccttcaaatatttctcataaatcttgtctttttcattttttctaaagtaaatacacacctgccccacccaattaaataaatctgattacatggctagcataatatctaaatatacaggatttattagtgatatttcatcatgggaaagtgggggagaggggcgtggatccaccaaacctcacaaattctgtatcacaatcctagtgctcttggatgttttaccactagttcttccaagataaaaatggcaatctcttaatcatccaaacaactcaaagcagttttagctaatgttaaactcattctaatccagtgatacctaaagcaaagcccaaacccagttttcnnnnnnnnnnnnnnnnnnnnnnnnnnnnggaattcttaagctgtttcactacctgttgtatcatcatctcaaaaatggttctgccatgttgagttgactcccatagtcaaaaacaatgttttctttaacaattcaagtaaccaaaattgtacatgaataaatttataggtcatttttgcagaactggattaagaaaaaaataaaatgtaatacattttctagtaaaacttctagtaaaggggtattggatgaattaattttgatttaataattgcctcacaatctaaactnnnnnnnnnnnnnnnnnnnnnnnnnnnnnnnnnnnnnnnnnnnnnnnnnnnnnnnnnnnnntgatgatgagagaaaagaagcgcatagaagccagtgattcttatctttcaaaggaattatttcacaatactgatagtactgggaattgttaaaagtacattcctcatgtgaacctaaagtcagcaatggttctgccattttgatgttgtttataaaacagggtgtgaacctaacaaccacaacttcagtgttaacctactaaaatgctagaacttgattttctaagtccacatcccactgccagcaacaggatgaagcattagcactggcaccatgcagttaagagatgtgctttatattcgtgccaggagagagaaaattcatgtgtggaagataatcctactttaccagggaaatttt

SEQ ID NO: 186010 - DNA, 1369 bp, Homo Sapiens
  misc_feature (270)..(298): n is a, c, g, or t
agcaatgcttttttataatgccaactttgtacaaaaaagttggaattcatccaatacccctttactagaagttttactagaaaatgtattacattttattttttcttaatccagttctgcaaaaatgacctataaatttattcatgtacaattttggttacttgaattgttaaagaaaacattgtttttgactatgggagtcaactcaacatggcagaaccatttttgagatgatgatacaacaggtagtgaaacagcttaagaattccnnnnnnnnnnnnnnnnnnnnnnnnnnnnngaaaactgggtttgggctttgctttaggtatcactggattaaaatgagtttaacattagctaaaactgctttgagttgtttggatgattaaaagattgccatttttatcttggaagaactagtggtaaaacatccaagagcactaggattgtgatacagaatttgtgaggtttggtggatccacgcccctctcccccactttcccatgatgaaatatcactaataaatcctgtatatttagatattatgctagccatgtaatcagatttatttaattgggtggggcaggtgtgtatttactttagaaaaaatgaaaaagacaagatttatgagaaatatttgaaggcagtacactctggccaactgttaccagttggtatttctacaagttcagaatattttaaacctgatttactagacctgggaattttcaacatggtctaattatttactcaaagacatagatgtgaaaattttaggcaaccttctaaatctttttcaccatggatgaaactataacttaaagaataatacttagaagggttaattggaaatcagagtttgaaataaaacttggaccactttgtatacactcttctcacttgacattttagctatataatatgtactttgagtataacatcaagctttaacaaatatttaaagacaaaaaaatcacgtcagtaaaatactaaaaggctcatttttatatttgttttagatgttttaaatagttgcaatggattaaaaatgatgatttaaaatgttgcttgtaatacagttttgcctgctaaattctccacattttgtaacctgttttatttctttgggtgtaaagcgtttttgcttagtattgtgatattgtatatgttttgtcccagttgtatagtaatgtttcagtccatcatccagctttggctgctgaaatcatacagctgtgaagacttgcctttgtttctgttagactgcttttcagttctgtattgagtatcttaagtactgtagaaaagatgtcacttcttcctttaaagctgttttgtaatatatataaggactggaattgtgttttta

SEQ ID NO: 186011 - DNA, 1877 bp, Homo Sapiens
ttggcttcccggctcccttcgcctccaggatgcgctgagccctacaacacccccagcggccgccggctcccccacgaggtgtgaatgacagaggtggtgccatccagcgcgctcagcgaggtcagcctgcgcctcctctgccacgatgacatagacactgtgaagcacctgtgtggcgactggttccccatcgagtacccagactcatggtatcgtgatatcacatccaacaagaagttcttttcccttgctgcaacctacagaggtgccattgtgggaatgatagtagctgaaattaagaacaggaccaaaatacataaagaggatggagatattctagcatccaacttctctgttgacacacaagtcgcgtacatcctaagtctgggcgtcgtgaaagagttcaggaagcacggcataggttccctcttacttgaaagtttaaaggatcacatatcaaccaccgcccaggaccactgcaaagccatttacctgcatgtcctcaccaccaacaacacagcaataaacttctatgaaaacagagacttcaagcagcaccactatctcccctattactactccattcgaggggtcctcaaagatggcttcacctatgtcctctacatcaacggcggccaccctccctggacgattttggactacatccagcacctgggctctgcactagccagcctgagcccctgctccattccgcacagagtctaccgccaggcccacagcctgctctgcagcttcctgccatggtcgggcatctcttccaagagtggcatcgagtacagccggaccatgtgatgtcggctgggcagccgccaccaggccccacccttcagccgcccgcagagcccgccttcctgtccatctgaccccttctgttttctgcaaggagctgccagccatctaactgggctcgtcggcctgccccagctgcaggcccggtgctacacgggctcgggaacagaacatcgtgggcatgcgcagagcatgcccatccgtggcaggctcttcagctcccctccctgcttctggaaacctctgcctgctgccctggccctgcccccctgcgcatgcaccatccccagggctgacccagtgtggctgcattcactgggaggggcctgccctcactgggcctctcccactccgctgcctgttcttgcagctccttcctggaaagctggaggggactttctcctgcaagggaggaacgcaagtattatggacacacttgaccgtaaaggcacaggagcctcggaacaagggggcgcaataaagggaatggcccgtccccttccagaaccagcccaaagaagcctggggggtgaggagtggcccccactcctccatgaggggctgatgaggggtgggcagcctgggggaggctttcctcgcaagcacagagctctgaggctcagccccctggcacaggcggtcacgcatcaggacggttcctactcctcagcaccttccgtgcagttaccagtgccctgggaggtcacactgcccgtcggaccttggcatgctccattcagctgacctgctgaggacaggcatcgccgagactccttgggtcctccccgccctccctcatgctgccacaagctgctgctccaaggcctggccacatgcagacaggaggaagctgagctcgacattaggcctcaaggctgccatctgtcttgtagggcctggccttgtgggcagggggcagtcctgtgccttgtgggccctcagcctctgagggcagagatgctgtcagtgccgcaggtgcatcacatacttctagcatcctctccaccctgcattccaaatgctgcttgctgcctgccctgccctccgatgcaggggtggggtggggg

SEQ ID NO: 186012 - DNA, 930 bp, Homo Sapiens
ttggggaaaaggtagatgtacacatttgcatttactccctcaggtcctctgccctgacacagtatatttcacctgttctccttctagctcttgctccccttatggacagcactattattgtgtgtcttgatagatgtccccctacccccagaactggcagacagtgttggaatgtgggcgttgatagtgggccaggcttcgcagaatgtctaaaaagggaatgtgtacatgaagttttttgggggaagaggagctagagcaagttaatctgcttgtttctctagaatcatttaaaggtaacctctgaattgggaagggaggttgtagttggcagggagttttccatttaataggcttaatttcctaagcctgactgaagaaatactgtctttcctttttctgcagctgaaagtagtgatggcatccacataattttgaagtgatgtcttatatagactgaactgtattcagtaccaaatagtcacgcttaaaagtgtgtgaagactgaatccaagaagtcttgggattggattttaccatatgaaatgtttcatattgaaaacacaagatgacctttctaatgagctgtatgagaggtgaatctcctcactgtcactgccatagccaagcatcctcatgagagtgagcacatcggcacagcatgcatccagctctggaggccacggtgcaggcatagctgcctgctgctctggcagaggccagtaaatacagttcctagaagcagcctttgctgtctttttacactgtatgcggtttggaaatgaatgtagaaacttactgtgggcatttacctttctgtgccagtttggcttttattgcctgaaccttatgctgacctggagaggagatgggggacagtgctgttgtggggccagcagtgaatctgtatgcggagagttgtgttgtgct

SEQ ID NO: 186013 - DNA, 1527 bp, Homo Sapiens
ttggctcccggaggtccgttctgtctgtcagccgctttggtacgctgcatcgggatcgaagtgacggaccgtgaaggcgcgagagtcaggtctgagggtcgggggcagagccgcccgcgaggccggcctggggatagcggtgctcgggttccccccgggtcgcccgcagctcccggtccagctccgcccacagactcggatggcgaccgcactgagggacccggcttcgggaagtgtgacctttgaagatgtggccgtgtacttctcctgggaggaatgggatctccttgatgaggctcagaaacacctgtacttcgatgtgatgctggagaactttgcacttacgtcctccctgggttgttggtgtggagtggaacatgaggaaacaccttctgaacagagaatttctggagaaagagtgccacagttcaggacttccaaagaaggttcatcttcccagaatgccgactcctgtgaaatatgttgcctggtcttgagagatattttgcacttggctgaacaccaaggaacaaactgcgggcagaaactacacacatgtggaaaacaattctacatcagtgcaaatcttcaacagcaccagaggcagcacattacagaggcacctttcagaagttatgtggacactgcctcgtttacacagagttgcatagtccatgtgtcggagaaaccctttacctgcagggagatcaggaaagacttcctggccaacatgaggtttctccatcaagacgccactcaaacaggggagaagccaaataacagtaacaagtgtgcggtggccttttacagtggaaaaagtcatcacaactggggaaaatgcagtaaagcctttagccacatagacacacttgttcaggaccagagaatcctcactagagaaggactttttgagtgcagtaaatgtgggaaagcatgtacgcgaagatgtaacctcattcagcaccagaaagtccacagtgaagaaaggccttatgaatgcaatgaatgtggaaaattctttacctactactccagtttcattatacatcagagagttcatactggagaaaggccttatgcgtgccctgaatgtgggaaatcgtttagtcagatatacagcctcaatagccataggaaagttcacactggagaaaggccttatgaatgtggggaatgtgggaaatcttttagccaaaggtccaacctcatgcagcatcgcagagttcacactggagaaaggccttatgaatgcagcgaatgtgggaaatcttttagccaaaactttagcctgatctaccaccagagagttcacactggagaaagacctcatgagtgcaatgaatgtggaaaatcctttagccgaagctccagcctcattcaccaccgggagacttcacactggagaaagacccctatgagtgcagtaaatgtgggaagtcatttaagcaaagctccaggcttcagttcacatcgggaaagtccacacagggggaaaggcccttatgtgtgtgggggaatgtggggaaa

SEQ ID NO: 186014 - DNA, 1258 bp, Homo Sapiens
cgatgtgagctgggaagggggcaagtgtccgggacacccacacccctgtattctcctccgaaccccttcatgcccaaatcccggaaactccagcgtgtctccagccgtgttggtaccattttcagatttcatcttcctaaactggaaatgtcaatgagaggaaattaacacccccaagagctgcagtgagcaaatgcattgagcttgggtcaggacaattccatttggggaccagagatggacggtcactcagcctatggagatgacagacaaccttctgtgccttcatcaagctggttgtgtacccaccatgtccctggcgacaggatgggaaagaaaaagccctaattaaggatcgtcagaaaccacagttggaggaggacggcagagacagtttccctccccgctataccaacacccttccttcgaggtcctcgctcctgagggaccctggactgtcacagagattaatgaccccttatcttctttggatgtgaaaggaaatcactggttaaagcttgatcgagagacattatcagctctttaaggattgcaggagaataggctactttattttctgaaaaggagggagttcctgctacccatcgtgggaggccaccatcaggactgcgaagatggtgaccctgcggaagaggaccctgaaagtgctcaccttcctcgtgctcttcatcttcctcacctccttcttcctgaactactcccacaccatggtggccaccacctggttccccaagcagatggtcctggagctctccgagaacctgaagagactgatcaagcacaggccttgcacctgcacccactgcatcgggcagcgcaagctctcggcctggttcgatgagaggttcaaccagaccatgcagccgctgctgactgcccagaacgcgctcttggaggacgacacctaccgatggtggctgaggctccagcgggagaagaagcccaataacttgaatgacaccatcaaggagctgttcagagtggtgcctgggaatgtggaccctatgctggagaagaggtcggtgggctgccggcgctgcgccgttgtgggcaactcgggcaacctgagggagtcttcttatgggcctgagatagacagtcacgactttgtcctcagatgaacaagcgcccacggcaaggtttgaagctgatgttgggaccaagaccacccaccatctggtgtaccctgagagctatccgggagctgggagataatgtcagcatgatcctggtgccc

SEQ ID NO: 186015 - DNA, 866 bp, Homo Sapiens
ttggcgacaggatgggaaagaaaaagccctaattaaggatcgtcagaaaccacagttggaggaggacggcagagacagtttccctccccgctataccaacacccttccttcgaggtcctcgctcctgagggaccctggactgtcacagagattaatgaccccttatcttctttggatgtgaaaggaaatcactggttaaagcttgatcgagagacattatcagctctttaaggattgcagaagaataggctactttattttctgaaaaggtaaatatatgcaagcaaagccaacatgccacgaatggcgttggtctaccacacagccgtgtctgggacacagttgggggtcatcccccagcaggagtgaagtcgagcttagcggcccttgtgtcctcccttggaattcctgccatcccttttgattgagcctccacctctgggatttttcttccatttttctcctctcttaggagggagttcctgctacccatcgtgggaggccaccatcaggactgcgaagatggtgaccctgcggaagaggaccctgaaagtgctcaccttcctcgtgctcttcatcttcctcacctccttcttcctgaactactcccacaccatggtggccaccacctggttccccaagcagatggtcctggagctctccgagaacctgaagagactgatcaagcacaggccttgcacctgcacccactgcatcgggcagcgcaagctctcggcctggttcgatgagaggttcaaccagaccatgcagccgctgctgactgcccagaacgcgctcttggaggacgacacctaccgatggtggctgagctccagcgggagaagaagcccaataacttgaatgac

SEQ ID NO: 186016 - DNA, 955 bp, Homo Sapiens
ttggcaataaaagagtttctgcagcatctgtagctttattgaacaccagcaagaatggcatatcagtaacagggggtatcacagaagagcagtttcagacacatcagcagcagttagttcagatgcaaaggcagcaacttgcccagcttcagcagaaacagcaatctcagcattcctcgcaacagacacatccaaaagcacagggctcaagcacctctgactgtatgtctaaaacacttgactcagccagcgcccactttgctgcatctgcagtggtcagtgcacctgttccaagtcgcagtgaggtagccaaggaacagaacactggccacaacaacataaacggtgttgtccagccttcaggaacctctaaaacattatactccaccaatatggctttatcatccagcccagggatttcagctgtacagcttgtaaggacagttggccacaccactacaaaccacttaatcccagcattgtgcacaagcagtcctcagacacttcccatgaacaattcctgcctgacaaatgcagtgcacctcaataatgtcagtgttgtttctccagtcaatgtgcatatcaatacacggacttcagcaccatcgccaacagccttaaaacttgccacagttgctgccagtatggacagagtgccaaaggttactcccagcagtgccatcagcagcatagcaagagagaaccacgaaccagaaagattgggcttaaatggaatagcagagacaacagtagctatggaagtgacataacctaaaacacgtggctctgacctgtgctgatggtgtgcagtcattcatattccagctgaatgcaaaaggcaacactctgtggatcacagagtgtaacatggacctaaatggactatagtatattggatgttaaatccatatatgatgtatattttgtaaaattgggaaaatcactaccttgtaaa

SEQ ID NO: 186017 - DNA, 781 bp, Homo Sapiens
tgtacaaaaaagttgggaaagagtttgcataaatttttaccagctttgaagatggattaacttttgactttgagctttaaacttttaagtcagacatttcaggactaatttgattttgtagatatcattgtaagaactttatttgaaagactgaataaagggatttgatttgttttcatcatttaagcacagtcttgtgatgatgagaacataagtgtgattcttttctgtattttgaggtccctaatccaaagcccattttgctaggattttttctgctatcagatgtgttttcactctaaacctagtcttttatgacatgaattgattacttcctgttaattttctatcctcccttactatcctccttttttgttttcagtattcagtatttcagtattctagagtagattttgatataaaagaaaataattcttacatcatcttttgcaacaaattttgttttctgaattgataataaatttaaaaagttgattcctattttcacatatgttcatatgcccctatgtttgggggtatcactcagttttcccttttttgtgtaaagatgttttgtaaaacaaaattgtctcaaagtgattatattatatatataaaaagtaacagattttaacaaaggttaaaagattcttggggtaacagattcttctggggcttggaaatcttccatttctcttgagggttttttttaatgagtgttaaatatgttaaaatttttatttctacctcatgtgtttttttaattattacttgaagtttt

SEQ ID NO: 186018 - DNA, 1368 bp, Homo Sapiens
  misc_feature (107)..(123): n is a, c, g, or t
  misc_feature (373)..(393): n is a, c, g, or t
  misc_feature (411)..(673): n is a, c, g, or t
tacaaaaaagttggattgcattaagttatgatgagacgaattgttgttaaaaattatagcaaaaagaaatgtaaacttggttaaaatcctttcactctttgtattgnnnnnnnnnnnnnnnnnattccttaaatgtaaaatgactacctaattttttgatgtaaatacattaaattcaaagagaaaaaaaatcagctgatgtagcagtatatcttttccttgatggttaaatattgatctagtatttatattgctgaattattttctgtggaggaccagataagcagtaagtatgtcttatcctatatgttttgcaacataaaaatattgctaattgaaaagaattaggcaattatgtgtgttgctgggttgnnnnnnnnnnnnnnnnnnnnngagacggagtcttgcccnnnnnnnnnnnnnnnnnnnnnnnnnnnnnnnnnnnnnnnnnnnnnnnnnnnnnnnnnnnnnnnnnnnnnnnnnnnnnnnnnnnnnnnnnnnnnnnnnnnnnnnnnnnnnnnnnnnnnnnnnnnnnnnnnnnnnnnnnnnnnnnnnnnnnnnnnnnnnnnnnnnnnnnnnnnnnnnnnnnnnnnnnnnnnnnnnnnnnnnnnnnnnnnnnnnnnnnnnnnnnnnnnnnnnnnnnnnnnnnnnnnnnnnnnnnnnnnnnnnnnnncaaaattgaggtattttttgccctacgttttaaggactagacttttgaagtattttatagtctagaggtctcaagtaatatatatgtgtttaatatttttagagccaattgataccacaattagataggagtagtgagaataatatggaattacttggtttgaagtagttaaaaattggatatggttatatctgagctgtagtcatattatctcaagaaaaataatacgaggatttaacataagatttgttctattaatgcccaaatttggctttcctctactatcccccatagagaaccactaacaagtggatgtctaatattcctctggtgagttgaaggcaggagaagttgagaatcattagtttcaatgagtatccaggtgacctatcctggccctctactcagaaaccggcaatttgtcttcactctgagattcattaaattgctgttgtataactgatggttattatgaacacctgacctgtgagacatatggaaagataaattttggtcttacaggaaatcttgaggagagtcaaaagagaaatgggagatgtctcttgagaggtgatcagagaagtttatgctcactgtctgatgcaaatgtctggtcttttgttagtaaataacaggaaaatcatttcctttttgttaaaataagtatttacaagcataccttgtgtattggtggg

SEQ ID NO: 186019 - DNA, 1397 bp, Homo Sapiens
  misc_feature (888)..(933): n is a, c, g, or t
tctttccatcccagtcaagccagaaagatgcccagggggagtagggaggtgtgggggagggaggtgtagcggaagcagatatggagagggaggcagagctacagggagcgagccactggaaggataggttcatcccggtgacttcatggctgtgaccacaaatggggtagggaacaggacccaggaagcccctcatcccctagcacgtgggtcttctccattaggcacattcagtccactcttgcattctttcttcccaccctgactgctcagagaaatgtaccccacctccctagccctctgtgcttcaagtcttcctttgacccccttcgctctcccacagcagggctctcagctgccagccaaccaagcagatggtgcaacaaccagacctaaaggaaggacctggggaagaagagaaagggagcctggcaagtctgagctttgggagtgggtctggacctcgtgaccattactccatctgctaccccacgcttccttaggctcccaccctctggctagcttgagaggaaggacgatggtcaaggtacatgtctcttctcctctgactctgggaatgagatttttctactcccacaggcttgaactctccttataggagtgtctccacatgccaaaatcagaggaagtcagaataaaacctcccaaggctgaaaactagagctggcacgtagtacatggtcagtaaatgtttttaggtggctggatgagtgaaggaatgagtgagtgagtgaatccaggatcgatctggaaacacaccagggctcagacctcttgggctaagtgccagtctcagtcctcttgggctgtgtaacaccaaagagaacaccccaggctctggcttaccccaagggcacacccatgctnnnnnnnnnnnnnnnnnnnnnnnnnnnnnnnnnnnnnnnnnnnnnntttgagggaaacttctgggccgcaggcagagacaggactcagactcagactccactctgggtcagctctgcagcctccagagcacaggagtagcaggggacgctgagtccctggcctgctggcaggcctcactctcgaaagctgtcagccagctggtggcagtccagctccccctttggctccaggccccccggaagcttcacccccgtcttccggtccacacaccagcacttgccacgctgcccatccagagctgggtgacactgcttggggtggaagttgccgttgcggtcgcagttggggatggggatgatgtagaggtcctcgtgggtgcggctctgtgaagcggccagccgctccagcgcccggtgcagctcgctctggcaggagccctggggcacaggccgggcatcctcccggggcgccccattgaccttcatcttgcccccactggtgctccccaa

SEQ ID NO: 186020 - DNA, 967 bp, Homo Sapiens
ggggcaggcactctgaaattcccgttttggagaggaatttgttacatttcaggatggatgcctccacgtaaaatcttggaatgagttccctgatggaggcaatctgaaaaaccaatttaggcatgtttccttggccgtgtcatttgcattctctggagaaaagtgatctggtaagacgctgcggctatccacacacatggaaaagatgcgctcgtacacgagctttccaaatgtatcaagtatgtcggtgataaggacaaatttgcttgggtagaactgaataacactggtgtctgaaagaagctttgaacactggatgactatttttagagccttcactttctggtctgaggcccaggcatccttcagcgattggttgagctcctctatgcggttcacgtaatcctgctgagtcaagttcaacagctccttttgggaaccctcctcaaagtcatccagctcctccagccgggtccgcaccttctctgacattgccaatgtggcagtcccagctttgcctttttcagatcccataaacagattaatagacagcttttcggtagtggtgtaccgggcaaggatttctccccgtttgttggtccaaggctcaaaatccgatcctacaacggagttatcatctctatcacgtttccttctggagctgtccatggcagctgccaaggctgcggggtcagcagtggctgcaaacatggagagggggtcagtcccatcgaggacgctgctcagcgggtccaccacggagctggaggaggaggaggacgtggaagaagtgcttcctttccggttcactttctttgtctttgactctgtgacagttatgggtttcagagggtgatagtccccaaactccaatggtacagcctccagtcggcatgatgcaaattcagctttgtagttcctattcctggagtgccaaggaaagacggccatcttcccagtcacccaa

SEQ ID NO: 186021 - DNA, 2208 bp, Homo Sapiens
  misc_feature (1581)..(1631): n is a, c, g, or t
  misc_feature (2045)..(2079): n is a, c, g, or t
acaaaaaagttggcgtcgctcctgcgctggagctctaggccggcgtctctccgcgagccgcgggtcaagtgccagtggctaagggtgcgcgagtagccgccacccgttcggcgttggctctggcgtcggggtcgttgtgtcgtgacaaccgctgcggtagccgtttccgaggcagcagttgcggccgctttagccctgagcgggatctgcggctgcctgcgagtctctgctgtgccgacccttctcttcgcggaccccacgccaagcagcgaccctgagccgacagccggagcgcccggcaatggcggcctcgacggcctcgcaccggcccatcaaggggatcttgaagaacaagacctctacgacttcctctatggtggcgtcggccgaacagccccgcgggaatgtcgacgaggagctgagcaaaaaatcccagaagtgggatgaaatgaacatcttggcgacgtatcatccagcagacaaagactatggtttaatgaaaatagatgaaccaagcactccttaccatagtatgatgggggatgatgaagatgcctgtagtgacaccgaggccactgaagccatggcgccagacatcttagccaggaaattagctgcagctgaaggcttggagccaaagtatcggattcaggaacaagaaagcagtggagaggaggatagtgacctctcacctgaagaacgagaaaaaaagcgacaatttgaaatgaaaaggaagcttcactacaatgaaggactcaatatcaaactagccagacaattaatttcaaaagacctacatgatgatgatgaagatgaagaaatgttagagactgcagatggagaaagcatgaatacggaagaatcaaatcaaggatctactccaagtgaccaacagcaaaacaaattacgaagttcatagacgagatttgttcaacactgcaattgtttgttagatgtaaaccctgtgactatagtacgttgcttcttgttcttcacaattcatgacttaagtaccaaaatgcataccagttattatatattgccaagaattaaatgataaacttagagactgattagactgaaaatgcctaatcgatatatatattcttgtgcctagtactttaccacaaatacagtgtaatatcatcagtccaaaactgcattacttttgtaaaaacactggttaatttgtataagatattatagagctttttatgctttagaagttaaacaatatctttgggggggaactaatttattttcatcacttgaaatgtggtagctcttacaaagtttattgatttgatttttttaaaaatcaaaagccaattgaacaacaggatatatagactgataaatatttaggctgaatagtattttaacacttgtcttcaacttgatttgtctgtttaattgaaaagaattataagagttactgttgcattttctgacctactatttttaaaattcctgttgagtttctttgtgtttacaaggaaaggactgaactttttctcatcaaaactagcttttttccccacaaataaattatcaggttaaactttcaccaatgtctgctcnnnnnnnnnnnnnnnnnnnnnnnnnnnnnnnnnnnnnnnnnnnnnnnnnnnggtacactgggcagacttcagagcagttttttaaaaaaataaatattctaatgtagctatctcgccattccctttaaatacctgtcttaacctcctgcttttctttcctactcctttccacacatacgcacacaatcttctaccttttaaaggatcattaagactgtcaccacattaggagctctttctctcactcttctgtcatttgctgctatgttgaaattcttattttgaccatcaatgcctatgaattcttctaatacgtgaagaaaatagtttgagtagcagcagtgctataggtgggaaatacagtttagctgctgaatttctatacctctctgatttacagattgctaattaaatggctattattagtttggattaattagacttaagaaaacaactaactgaggnnnnnnnnnnnnnnnnnnnnnnnnnnnnnnnnnnngcatgagagttgtatgtaaccagtgatatgattattcctgaatgtacagacagaaatagccctgggacattgttaaatattccctgctttaaaggacctacaataatgtgtactatgacaaacgtgctt

SEQ ID NO: 186022 - DNA, 1544 bp, Homo Sapiens
  misc_feature (267)..(285): n is a, c, g, or t
  misc_feature (1013)..(1024): n is a, c, g, or t
taatggccaactttgtacaaaaaagttggggagctctttctctcactcttctgtcatttgctgctatgttgaaattcttattttgaccatcaatgcctatgaattcttctaatacgtgaagaaaatagtttgagtagcagcagtgctataggtgggaaatacagtttagctgctgaatttctatacctctctgatttacagattgctaattaaatggctattattagtttggattaattcgacttaagaaaacaactaactgagggnnnnnnnnnnnnnnnnnnngagggttttctttgcatgagaattgtatgtaaccagtgatatgattattcctgaatgtacagacagaagtaagcctggacattgttaaatagtccctgctttaagggactacgataatgtgtactatgacaaacgtgctttattcttctaacgcagtaagaattaggtggaattttttccttcaaccaagtgcaggaaagccctgtgtgtcttggtttagttatggtttcatttctagccatacaattgatgaattgtgtacaacttttgttagtaccaaaataatctgttatatgaacagacttctaaaataacgtctgtatattttatatatagatacatatatgaaagaaggcttttattgaacagcttatcttccacttgcaggtttatggaaacagcagtatttgaaaataaataaaaagtgggagaattccttgctgttagaagaatgtggccattattttgattttttgaatgagatatataatcaaagtactgctgaactgtgagtgcagtattctaaacatttcagctaggaataccactgatttagaaacaaaactgtttgtctctggtttctgaatttaaaatgttgggattacctgtttaaatctgtcttgggggatgtagagattaagtctgtacatgtgcgtgcacatatattcatgcaccctctgattttggttttcttgtttctgagttcttagaaagtacccacatactcnnnnnnnnnnnngtagaagtagctgtcatagagtgaagaaaaggataagactttaaacagttgattctttttgtgttttctacaaactattttttgaaatttaaatcacaaactcattttctggtttttagaaagtagatgatgatttcagaggagtaaggcatgccaagcagcatgctcagtggggttttaggctgtcacatgcagctgagaaaaggtatgttcaagtcataagtaggtaattgatagggtatgaactagtcaaaatatgaaccattatgattcaagttagattttcctctggagagacagatctgaatgttcagttctagccaaggtagattttactttcaactttttaatcagtatcactttctgtgcttaactatttggtgttaccttgtctgttttcatttgtctaaaattctgcagagatgactaaaatttgacataatggtgtaaatggattgttagggtaactttcagttgaaggattaaagcaagatgccattttccccatgactttggtttg

SEQ ID NO: 186023 - DNA, 953 bp, Homo Sapiens
gagcaatgctttctttaaaaggccaactttgtacaaaaaagttggcgcgagccgcgggtcaagtgccagtggctaagggtgcgcgagtagccgccacccgttcggcgttggctctggcgtcggggtcgttgtgtcgtgacaaccgctgcggtagccgtttccgaggcagcagttgcggccgctttagccctgagcgggatctgcggctgcctgcgagtctctgctgtgccgacccttctcttcgcggaccccacgccaagcagcgaccctgagccgacagccggagcgcccggcaatggcggcctcgacggcctcgcaccggcccatcaaggggatcttgaagaacaagacctctacgacttcctctatggtggcgtcggccgaacagccccgcgggaatgtcgacgaggagctgagcaaaaaatcccagaagtgggatgaaatgaacatcttggcgacgtatcatccagcagacaaagactatggtttaatgaaaatagatgaaccaagcactccttaccatagtatgatgggggatgatgaagatgcctgtagtgacaccgaggccactgaagccatggcgccagacatcttagccaggaaattagctgcagctgaaggcttggagccaaagtatcggattcaggaacaagaaagcagtggagaggaggatagtgacctctcacctgaagaacgagaaaaaaagcgacaatttgaaatgaaaaggaagcttcactacaatgaaggactcaatatcaaactagccagacaattaatttcaaaagacctacatgatgatgatgaagatgaagaaatgttagagactgcagatggagaaagcatgaatacggaagaatcaaatcaaggatctactcccagtgaccaacagcaaaacaaattacgaagttcatagacgagatttgttcaacactgcaattgtttgttagatgtaa

SEQ ID NO: 186024 - DNA, 2200 bp, Homo Sapiens
  misc_feature (695)..(745): n is a, c, g, or t
  misc_feature (1160)..(1178): n is a, c, g, or t
  misc_feature (1906)..(1918): n is a, c, g, or t
actttgtacaaaaaagttggcgaagttcataccacgaaatttgttcaacactgcaattgtttgttagatgtaaaccctgtgactatagtacgttgcttcttgttcttcacaattcatgacttaagtaccaaaatgcataccagttattatatattgccaagaattaaatgataaacttagagactgattagactgaaaatgcctaatcgatatatatattcttgtgcctagtactttaccacaaatacagtgtaatatcatcagtccaaaactgcattacttttgtaaaaacactggttaatttgtataagatattatagagctttttatgctttagaagttaaacaatatctttgggggggaactaatttattttcatcacttgaaatgtggtagctcttacaaagtttattgatttgatttttttaaaaatcaaaagccaattgaacaacaggatatatagactgataaatatttaggctgaatagtattttaacacttgtcttcaacttgatttgtctgtttaattgaaaagaattataagagttactgttgcattttctgacctactatttttaaaattcctgttgagtttctttgtgtttacaaggaaaggactgaactttttctcatcaaaactagcttttttccccacaaataaattatcaggttaaactttcaccaatgtctgctcnnnnnnnnnnnnnnnnnnnnnnnnnnnnnnnnnnnnnnnnnnnnnnnnnnnggtacactgggcagacttcagagcagttttttaaaaaaataaatattctaatgtagctatctcgccattccctttaaatacctgtcttaacctcctgcttttctttcctactcctttccacacatacgcacacaatcttctaccttttaaaggatcattaagactgtcaccacattaggagctctttctctcactcttctgtcatttgctgctatgttgaaattcttattttgaccatcaatgcctatgaattcttctaatacgtgaagaaaatagtttgagtagcagcagtgctataggtgggaaatacagtttagctgctgaatttctatacctctctgatttacagattgctaattaaatggctattattagtttggattaattagacttaagaaaacaactaactgagggnnnnnnnnnnnnnnnnnnngagggttttctttgcatgagagttgtatgtaaccagtgatatgattattcctgaatgtacagacagaagtaagcctggacattgttaaatagtccctgctttaagggactacgataatgtgtactatgacaaacgtgctttattcttctaacgcagtaagaattaggtggaattttttccttcaaccaagtgcaggaaagccctgtgtgtcttggtttagttatggtttcatttctagccatacaattgatgaattgtgtacaacttttgttagtaccaaaataatctgttatatgaacagacttctaaaataacgtctgtatattttatatatagatacatatatgaaagaaggcttttattgaacagcttatcttccacttgcaggtttatggaaacagcagtatttgaaaataaataaaaagtgggagaattccttgctgttagaagaatgtggccattattttgattttttgaatgagatatataatcaaagtactgctgaactgtgagtgcagtattctaaacatttcagctaggaataccactgatttagaaacaaaactgtttgtctctggtttctgaatttaaaatgttgggattacctgtttaaatctgtcttgggggatgtagagattaagtctgtacatgtgcgtgcacatatattcatgcaccctctgattttggttttcttgtttctgagttcttagaaagtacccacatactcnnnnnnnnnnnnngtagaagtagctgtcatagagtgaagaaaaggataagactttaaacagttgattctttttgtgttttctacaaactattttttgaaatttaaatcacaaactcattttctggtttttagaaagtagatgatgatttcagaggaataaagcatgccaagcagcatgctcagtggggttttaaagctgtcacatgcagctgaaaaaagggtatgttcaagtctaagtaagtaaattgatagggtatgactagtcaaatatgaacccttatgattccaagttaga

SEQ ID NO: 186025 - DNA, 1243 bp, Homo Sapiens
  misc_feature (258)..(270): n is a, c, g, or t
aaactaaacattaacataagaaaaaagaccaacagcatctttaagaaacttgaacgtcctctcggctctagcgtgtaaacggtaggtctctaacctcaacgcacagcgggcactggaagcggtgattgtccaaaggccgattgtccacgatctcaaaaggagatctggtatttttgtgatttggttctcattaaattcctataccaagtaaaatgccagttcccatggcctaaattttattttatatatatatatgcnnnnnnnnnnnnnctgagagcaaccttactcagacttcacatttatcttagtacagcattaaaaaagatttaatagatgggttcaaaagccagaggcatgtagctcttgaacctaccctagtaaccatacttcacaagatacattaaaagtccactaacacctaacctaacgcacacaaaacccacgcctgtttaccttctgcaagtcgcatcggtccgcaatcccacagattaaagcaagttttccctttatacgcaaagttttagccaggtaagctattgtatgattaaaagcaaactttataaactaaataatcttaggaatagtggccacttacttttatatttcagggatatgagagaatagttcatgaattttcagaaaaatgaatgtgtgggatcaacagctctggtctaacatttgcggggggggaagggtcagggatgagagtttttctccccatccaaattaggtctgttgagtcttacttgcagtaccggcgcagtacatgaacatgtcaacatacatatgtggcagaaacacacatcaaggaacatgacggcattcacttttgtttctgaagacagacagagactgggcttcaaaagacaccgtcttctattatgagtcaaacttcttacaaatgagaacagaggcctatgcttttctctttaaaaaaggagcctcgaatgcgatgcacagccgacctgcagattagtgttaactctgggagctcgggagcgtgcaccaccaccagtgtcaccgagcgcacccgcacagcagctaaccagtcaggcagcagaacgagtggcggcagtttgccggggcgtgcagacacacgacatgtttcccatcttggagactatctactgttcggcttttctaaaatgtcagattattcctgagtgtatatccacagggtaaaggaggaaaagaccgtaagagaaactatagtttctctccaacttttttgtacaaagttggc

SEQ ID NO: 186026 - DNA, 1686 bp, Homo Sapiens
  misc_feature (347)..(360): n is a, c, g, or t
tttcaaatacttttgcctttcatgatgctgttttttccttaggagccacgggtgacttctgaacttcaattattcatcaaaatcacaaaactaaaacaataacataagaaaaaagaccaacagcatctttaagaaacttgaacgtcctctcggctctagcgtgtaaacggtaggtctctaacctcaacgcacagcgggcactggaagcggtgattgtccaaaggcctgattgtccacgatctcaaaaggagatctggtatttttgtgatttggttctcattaaattcctataccaagtaaaatgccagttcccatggcctaaattttattttatatatatatatgcnnnnnnnnnnnnnnctgagagcaaccttactcagacttcacatttatcttagtacagcattaaaaaagatttaatagatgggttcaaaagccagaggcatgtagctcttgaacctaccctagtaaccatacttcacaagatacattaaaagtccactaacacctaacctaacgcacacaaaacccacgcctgtttaccttctgcaagtcgcatcggtccgcaatcccacagattaaagcaagttttccctttatacgcaaagttttagccaggtaagctattgtatgattaaaagcaaactttataaactaaataatcttaggaatagtggccacttacttttatatttcagggatatgagagaatagttcatgaattttcagaaaaatgaatgtgtgggatcaacagctctggtctaacatttgcggggggggaagggtcagggatgagagtttttctccccatccaaattaggtctgttgagtcttacttgcagtaccggcgcagtacatgaacatgtcaacatacatatgtggcagaaacacacatcaaggaacatgacggcattcacttttgtttctgaagacagagactgggcttcaaaagacactgtcttctattatgagtcaaacttcttacaaatgagaacagaggcctatgcttttctctttaaaaaaggagcctcgaatgcgatgcacagccgacctgcagattagtgttaactctgggagctcgggagcgtgcaccaccaccagcgtcaccgagcgcacccgcacagcagctaaccagtcaggcagcagaacgagtggcggcagtttgccggggcgtgcagacacacgacatgtttcccatcttggagactatctactgttcggcttttctaaaatgtcagattattcctgagtgtatatccacagggtaaaggaggaaaagaccgtaagagaaactatagttttgggagaaatcagcgttgttgacacccaatagaaaacctatttacttcaaagtgcatgtaattcatttacccggtagctcataaacgctccctagccctgcatagttttcgagtgagtgtgagtgattcatagttttttatatatatacatacatagaaaagaggatcccaaatatcctgcagaggaaggaatgcttagaaagcctcttttcttctaagtgctacggctgtgtgtttatgtgtttgtaaaaatacaaagtaaatgctcaaataatgttgaagtgatttaaaaactcaaatactcatatatttacattggagagtaagaaaaaaaacagtccttagctcacacattgcccttccaagggagaggatcctgaaccaa

SEQ ID NO: 186027 - DNA, 1566 bp, Homo Sapiens
  misc_feature (1337)..(1345): n is a, c, g, or t
gggaggagggtgctgttttataaggccaactttgtacatgaaagttggtgacattgaaaacaccatggaggagtctgggtggaagttggtgcacggcgacgtcttcaggcccccccagtaccccatgatcctcagctccctgctgggctcaggcattcagctgttctgtatgatcctcatcgtcatctttgtagccatgcttgggatgctgtcgccctccagccggggagctctcatgaccacagcctgcttcctcttcatgttcatgggggtgtttggcggattttctgctggccgtctgtaccgcactttaaaaggccatcggtggaagaaaggagccttctgtacggcaactctgtaccctggtgtggtttttggcatctgcttcgtattgaattgcttcatttggggaaagcactcatcaggagcggtgccctttcccaccatggtggctctgctgtgcatgtggttcgggatctccctgcccctcgtctacttgggctactacttcggcttccgaaagcagccatatgacaaccctgtgcgcaccaaccagattccccggcagatccccgagcagcggtggtacatgaaccgatttgtgggcatcctcatggctgggatcttgcccttcggcgccatgttcatcgagctcttcttcatcttcagtgctatctgggagaatcagttctattacctctttggcttcctgttccttgttttcatcatcctggtggtatcctgttcacaaatcagcatcgtcatggtgtacttccagctgtgtgcagaggattaccgctggtggtggagaaatttcctagtctccgggggctctgcattctacgtcctggtttatgccatcttttatttcgttaacaagctggacatcgtggagttcatcccctctctcctctactttggctacacggccctcatggtcttgtccttctggctgctaacgggtaccatcggcttctatgcagcctacatgtttgttcgcaagatctatgctgctgtgaagatagactgattggagtggaccacggccaagcttgctccgtcctcggacaggaagccaccctgcgtgggggactgcaggcacgcaaaataaaataactcctgctcgtttggaatgtaactcctggcacagtgttcctggatcctggggctgcgtggggggcgggagggcctgtagataatcttgcgtttttcgtcatcttattccagttctgtgggggatgagtttttttgtgggttgctttttcttcagtgctaagaaagttccctccaacaggaactctctgacctgtttattcaggtgtatttctggtttggannnnnnnnnccttctttgttttaacaaatggatccaggatggataaatccaccgagataaaggttttggtcactgtctccacctcagttcctcagggctgttggccaccctatgactaactggaagaggacacgccagagcttcagtgaggtttccgagcctctccctgcccatcctcaccactgagccacgacaaagcacagctccagctcggacagcaccctcagtgc

SEQ ID NO: 186028 - DNA, 1012 bp, Homo Sapiens
tttgtacaaaaaagttggctccaaccgaaacagcgatgacaagaagaaggaaaaagatgtgcagtttgaacacggctaccggctcggcttcacagatgtcaacaagatctacctgcacaaccacctctcattcatcctttactatcatcgggaggacatggaagaggaccaggagcacacgtaccgtgtcgtccgcttcgaggtgattccccagagcatcaggctggaggacctcaaagcagatgagaagagttcgtgcactctgcctgagggtaccaactcctcgccccaagaaattgaccccaccaaggagaatcagctgtacttcacctactctgtccactgggaggaaagtgatatcaaatgggcctctcgctgggacacttacctgaccatgagtgacgtccagatccactggttttctatcattaactccgttgttgtggtcttcttcctgtcaggtatcctgagcatgattatcattcggaccctccggaaggacattgccaactacaacaaggaggatgacattgaagacaccatggaggagtctgggtggaagttggtgcacggcgacgtcttcaggcccccccagtaccccatgatcctcagctccctgctgggctcaggcattcagctgttctgtatgatcctcatcgtcatctttgtagccatgcttgggatgctgtcgccctccagccggggagctctcatgaccacagcctgcttcctcttcatgttcatgggggtgtttggcggattttctgctggccgtctgtaccgcactttaaaaggccatcggtggaagaaaggagccttctgtacggcaactctgtaccctggtgtggtttttggcatctgcttcgtattgaattgcttcatttggggaaagcactcatcaggagccggtgccctttcccaccatggtggctctgctgtgcatgtggttcgggatctccctgcccctcgtctacttgggctactacttcggcttccgaaagcagccatatga

SEQ ID NO: 186029 - DNA, 1498 bp, Homo Sapiens
ttggtgcacctccgggccggcggttgctgagctgacccggacggcgagggagcgggagcccgagcccgaccactccggctgccgcggggtgcggcgcagccaccgccatgtcgctgctgcagtcggcgctcgacttcttggcgggtccaggctccctgggcggtgcttccggccgcgaccagagtgacttcgtggggcagacgggggaactgggcgagctgcggctgcgggtgcggcgggtcctggccgaaggagggtttgcatttgtgtatgaagctcaagatgtggggagtggcagagagtatgcattaaagaggctattatccaatgaagaggaaaagaacagagccatcattcaagaagtttgcttcatgaaaaagctttccggccacccgaacattgtccagttttgttctgcagcgtctataggaaaagaggagtcagacacggggcaggctgagttcctcttgctcacagagctctgtaaagggcagctggtggaatttttgaagaaaatggaatctcgaggccccctttcgtgcgacacggttctgaagatcttctaccagacgtgccgcgccgtgcagcacatgcaccggcagaagccgcccatcatccacagggacctcaaggttgagaacttgttgcttagtaaccaagggaccattaagctgtgtgactttggcagtgccacgaccatctcgcactaccctgactacagctggagcgcccagaggcgagccctggtggaggaagagatcacgaggaatacaacaccaatgtatagaacaccagaaatcatagacttgtattccaacttcccgatcggcgagaagcaggatatctgggccctgggctgcatcttgtacctgctgtgcttccggcagcacccttttgaggatggagcgaaacttcgaatagtcaatgggaagtactcgatccccccgcacgacacgcagtacacggtcttccacagcctcatccgcgccatgctgcaggtgaacccggaggagcggctgtccatcgccgaggtggtgcaccagctgcaggagatcgcggccgcccgcaacgtgaaccccaagtctcccatcacagagctcctggagcagaatggaggctacgggagcgccacactgtcccgagggccaccccctcccgtgggccccgctggcagtggctacagtggaggcctggcgctggcggagtacgaccagccgtatggcggcttcctggacattctgcggggtgggacagagcggctcttcaccaacctcaaggacacctcctccaaggtcatccagtccgtcgctaattatgcaaagggtgacctggacatatcttacatcacatccagaattgcagtgatgtcattcccagcagaaggtgtggagtcagcgctcaaaaacaacatcgaagatgtgcggttgttcctggactccaagcacccagggcactatgccgtctacaacctgtccccgaggacctaccggcccctcca

SEQ ID NO: 186030 - DNA, 1625 bp, Homo Sapiens
  misc_feature (87)..(148): n is a, c, g, or t
tacaaaaaagttgggccggcagcaactcggcgcccgcggtccatggaccggaacctcgggccgacggacgggaacccgggccgcgannnnnnnnnnnnnnnnnnnnnnnnnnnnnnnnnnnnnnnnnnnnnnnnnnnnnnnnnnnnnnaggccctgcaccgccgccgccaggctagcggagctgccccgggaagctgggtgacgggttcgcggctgccgccggactgcggcctactccgccgcctctcagtgctattgtccctgggcctggccttgagcgggtccactggggaaggccgtgtgcgccggctccgcggaagatgccggaccaagccctacagcagatgctggacagaagttgctgggtttgttttgctactgatgaagatgatagaacagctgaatgggtgagaccatgcaggtgcagaggatctacaaaatgggttcaccaggcctgtctacaacgctgggtggatgaaaagcaaagaggaaacagtacagccagagtggcatgggtcctcagtgcaatgctgaatacctaatagtttttccaaaattgggtccagtggtttacgtcttggatcttgcagatagactgatctcaaaagcctgtccatttgctgcagcaggaataatggtcggctctatctattggacagctgtgacttatggagcagtgacagtgatgcaggttgtaggtcataaagaaggtctggatgttatggagagagctgatcctttattccttttaattggacttcctactattcctgtcatgctgatattaggcaagatgattcgctgggaggactatgtgcttagactgtggcgcaaatactcgaataaactacaaattttaaatagtatatttccagggataggttgtcctgttcctcgaattccagctgaggccaatcctttagcagatcatgtctctgctactcgaatcttgtgtggagcccttgtctttcctactattgctacaatagttggtaaattgatgttcagtagtgttaactctaatttacaaaggacaatcttgggtggaattgcgtttgttgccataaaaggagcatttaaagtttacttcaaacagcagcaatatttacgacaggcacaccgcaaaattctgaattatccagaacaagaagaagcataaaactgacttctggttgttctgcagttctctcatccttatgaatctgttgtgttgttttgattccatcattaatgcacttgtggagacttgtgataagctgctgctcctatattttttaagaaatataataaagcacttagggcaggggaaatcatctcggtaatcatggaacctaaggatgtgatttgttttcattgtttgtatgtactacttttatggcagtcatatgaaccattatcttagcatggtaaacctgggttttgttcatattttctccagacagaaatgcaaagatcaaactgtgcaaatattaaaaaaatgcacatgctgttttattcaaatgcctcttttgtacatgttcatgtttagtgttttctcagaatcagcaactcaaggtactatgaggatttttctcactgacataatttgattacatactaaataagaagatatgttaatatgagga

SEQ ID NO: 186031 - DNA, 1687 bp, Homo Sapiens
  misc_feature (1216)..(1261): n is a, c, g, or t
ttggtgataaacagtttgctgtttggtcatatagcctccagtggaatgctgagttggtcacgatccctttggcctttcttgctcccaacagtggcagtctgcacatagtgccctagcattcttctttgtatatcagagtatatgtagaactacatggaagaaagactagtcagaaaggataatggagaaggcatctgtgtcccctgttacctgtagtaacagcgtatagtctgtctctctccctatctcatctcctagtagaaaaagaaaactgtttcatttgcagtcatctgaattagtttagcatcaaagcctacgtcttttgtgatctaaataaaattatttttattactctgtttctctaaatctgcattataaaaagctaattttcctttttattttagggtggaattgcgtttgttgccataaaaggagcatttaaagtttacttcaaacagcagcaatatttacgacaggcacaccgcaaaattctgaattatccagaacaagaagaagcataaaactgacttctggttgttctgcagttctctcatccttatgaatctgttgtgttgttttgattccatcattaatgcacttgtggagacttgtgataagctgctgctcctatattttttaagaaatataataaagcacttagggcaggggaaatcatctcggtaatcatggaacctaaggatgtgatttgttttcattgtttgtatgtactacttttatggcagtcatatgaaccattatcttagcatggtaaacctgggttttgttcatattttctccagacagaaatgcaaagatcaaactgtgcaaatattaaaaaaatgcacatgctgttttattcaaatgcctcttttgtacatgttcatgtttagtgttttctcagaatcagcaactcaaggtactatgaggatttttctcactgacataatttgattacatactaaataagaggatatgttaatatgaggaaatgtaaattaaattagttataaataaataaccaaaaatgtatgtaaacattcaaatgattatctgaacaaatgagattttgtggtgttttctttaacccatgtgatgtcctccaaaatgtgtagggtaaaaattcacagggcttccagatcactttttcaatattaaattttatttacataatgttgacatctcatacttcatgaagtaattttgactcatgcagtcnnnnnnnnnnnnnnnnnnnnnnnnnnnnnnnnnnnnnnnnnnnnnnttcagtgtttcatcaggtccttccatctctgggagttttttcaacccatatttctagaaattacagctgccagtttatagtagtttgagcagaggatgatttgcaaaaataaaaataaagttattttactctcctcttgcattgattcagttattgagatattcgttgatcacctcctatttcccaggcactgtgcagagtgctgtaggacatagtggtgaacaagacagacttggtccaagctcttacagagttgacagtctagtttcagcacatagaaaaccagcagtgaataaaccaaggtgaggccttgagctctttgtttttatattaatgaggagaaaagtatgaaaacaagaagtcttaagtaaatattgaggtcattgttttgggcttaagttattatagaatcaacactaatgtttt

SEQ ID NO: 186032 - DNA, 1619 bp, Homo Sapiens
ctttgtacaaaaaagttgggtttatagtactattatagaagcagaggatgatttgcaaaaataaaaataaagttattttactctcctcttgcattgattcagttattgagatattcgttgatcacctcctatttcccaggcactgtgcagagtgctgtaggacatagtggtgaacaagacagacttggtccaagctcttacagagttgacagtctagtttcagcacatagaaaaccagcagtgaataaaccaaggtgaggccttgagctctttgtttttatattaatgaggagaaaagtatgaaaacaagaagtcttaagtaaatattgaggtcattgtttttggcttaagtttattatagaaaatcaacactaatgtttttagattttaattgtcctattcatgaggctagcaccttaatcactgtttagttttgtattcatttttaaaagcaattattgaagccattttcaataaattggccattttaatgttcagcaacctgaatggttatttttgttaattaaaattaaatttttaagagatattttcaaaaccctatttattttcttgttcacagtaatgcatgtcaataataaatgtttccccttactgataagcggccactttaggagtgtagcaaatatagattgagctatgttagtttgcaataatatatgttaactttagtaattaaagactggtttctatagtatgaatgtcttaattttgagttatatgatgtttatttgaatgactgttgaacattcaaatttgtattatttggagatgaagatttgactaacagtgagccttattaagaacactactacagttctgaaggggaaatataacatctatggttatatattttaaaaacttagattataggctgtaattataaaatatattggcttttgttttcaatgtgaaagatacattaaatggacacatatcttgcaaaattttgttgtatagaacagtttttaggcagcctttactaaagttatgcaaacacacagttccccatttactacattaatgcccttgacagggagtagctgcttggttttataggtattagggctcatgaaggccggggaacaactctaatccttttggggcaggagggagggttttttttagggttgcggggagggaactgcaagtgcctgaggaccagagtggcctctagccccgaattgaacacttttaaacctaaagagccttattattattagctcgagaaataccacatgccagtcttcccaggaaggtgacctgcctgaccatgaagcaacaaaagagcataggcagacttaaagttggatagacctgggttcaaatcatagttcagctttcaataactgtatgtatgattttggctaaaggatttgactttctctcaactgcagttttcttaatctttgaaatgcaaataatgtttatctcagaagactatttctaggattaactgagagattaaaggaacagcagcacttagctcaaaatcgcccctacaaagcagtagttgtttcttaattgctaagtaatctgtttgcactctaagaaagtaaatggagaggtaaaagaaaagcattggggacaaatgaaagaga

SEQ ID NO: 186033 - DNA, 1950 bp, Homo Sapiens
ttgggcccaagttcagcatgcctggcttcaaaggagagggcccagatgtggatgtgaacctgcccaaggctgacattgatgtctcaggacccaaagtggacgttgatgttcctgatgtgaatatcgaaggtccagatgcgaaactaaagggccccaagttcaagatgcctgagatgagcatcaaagcccccaagatctccatgcctgatattgacttaaacctgaaaggacccaaagtgaagggcgatgtggatgttacccttcctaaagtggaaggtgacctcaagggcccagaagctgacatcaagggcccaaaagtggacatcaacacccctgatgtggatgttcatggcccagactggcacctgaagatgcccaaggtgaaaatgcccaaattcagcatgcctggcttcaaaggagaaggtccagatgtggatgtgagcctgcccaaggccgacatcgatgtctcgggacccaaggtggacgttgatattccagatgtgaatatcgaaggtccagacgcaaaactgaagggccccaagttcaagatgcctgaaataaatatcaaagctcccaagatctccatacctgatgttgacctggatttgaaaggacccaaagtaaaaggagattttgatgtgtctgtccctaaggttgaagggactttgaaaggcccagaagtagatcttaaaggtccacgtctggatttcgaaggccctgatgccaaactcagtggcccatctttgaagatgccatcgctggagatatctgctcctaaagtaactgctcctgatgttgatttgcatctcaaggcaccaaaaattggattttcaggtccgaagttagaaggtggtgaagtggacctcaagggacccaaagttgaagctccaagcttagatgtacacatggacagcccagatattaacatcgaagggccagatgttaaaatccccaaatttaagaaacccaagtttggatttggggcaaaaagccccaaagctgacatcaagtcaccttcactggatgtcactgttcctgaggcagagctgaaccttgagactcctgaaattagtgttggtggcaagggcaagaaaagtaagtttaaaatgcctaaaattcatatgagtggtcctaagattaaggccaaaaaacagggatttgacctgaatgttcctgggggtgaaattgatgccagcctcaaggctccggatgtagatgtcaacatcgcagggccggatgctgcactcaaagtcgacgtgaaatcgcccaaaaccaagaaaacgatgtttggaaaaatgtacttcccagatgtagagtttgacattaaatcacctaaatttaaagctgaggcccctctccctagccccaaactggagggtgaactccaggcacctgatctggaactttctttgccagcgattcacgtcgaaggtcttgacatcaaggcgaaggctcccaaggtcaagatgccagatgtggacatctcagtgccaaaaatagagggtgacctgaaaggccccaaagtgcaggcaaacttgggtgcacctgacatcaacatcgaaggcctagatgctaaagtcaaaacaccgtccttcggcatttctgcccctcaagtctccatccctgatgtgaatgtaaacttgaaaggaccaaagataaagggtgatgtccccagcgtgggactggaaggaccagatgtagatctgcaaggtccagaagcaaaaattaagttccccaagttttccatgcccaagatcggcatcccaggtgtgaaaatggagggtgggggagccgaggtccatgcccagctaccctctcttgaaggagacttgagaggaccagatgttaagctcgaaggcccgatgtttctctaaaggggccaggagtagacttgccttcagtgaacctctctatgccaaaagtctctgggcctgaccttgatctgaactt

SEQ ID NO: 186034 - DNA, 1181 bp, Homo Sapiens
tttgtacaaaaaagttggcaggtttttgccgtacaggtagaggcagtgcctcttacagtgcacacccccagcacccccatcctgccctaaattccacctggcgtggggatgccttgcccagggctggcggcaggtgggccggggcccgggtcgggagccaggagccacagctcaggggcgccttgtgacgtgtcattgcagtgggccgaggccctgaacgtgttccagcaggcggccgactggatcggcctggagtcgcgcaagtccctgtggggccagttctggtcggcacaccagcgcttcttcaagtatctgtgcatcgcagccaaggtgcgccggctggtggagctggcccgagaggagctggcgcgagacaagtgcgtggtcatcgggctgcagtccacgggcgaggcgcgcacgcgggaggtgctgggggagaacgatgggcacctcaactgcttcgtctcggccgctgaaggcgtgttcctgtcgctaattcagaagcactttccgtccaccaagagaaagcgggacagaggagcgggcagcaagcggaaacggcgacctcggggacgcggggccaaagccccccggctggcgtgcgagacagcgggcgtcatccgcatcagtgacgacagcagcacggagtcggaccctggcctggacagcgacttcaactcctcccccgagtccctggtggatgacgacgttgtcatcgttgatgcagtcgggctccccagtgacgaccggggacccctgtgcctcctgcagagagacccgcatggccccggggtcctggagcgggtggagcggctgaagcaggatctgctggacaaagtgcggcggctgggccgggaactgccagtcaacaccctggacgagctcatcgaccagctgggcggcccccagcgggtggcggagatgaccggcaggaaaggccgcgtggtgtccaggcccgacgggacggtggccttcgagtcgcgggcagagcagggtctgtccatcgaccacgtgaacctcagggagaagcagcgcttcatgagcggcgagaagctcgtggccatcatctcggaggcctccagctcgggtgtctccctccaagccgaccgccgtgtccagaaccagcggcgccgcgtgcacatgaccttggagctgccgtggagcgccgacctgcgccatcc

SEQ ID NO: 186035 - DNA, 1031 bp, Homo Sapiens
ttggcttggaataaaattttcagatagaaccattcccactgataagcatgttgacctcctgatcaataagtatggattgtctgctcacccagttgctcctcagatgtttgggtatgctggaaaagaacatatggaaaaatatggaacaaaaattgaacactttgcaaaaattggatggaaaaatcataaacattcagttaataacccgtattcccagttccaagatgaatacagtttagatgaagtgatggcatctaaagaagtttttgattttttgactatcttacaatgttgtcccacttcagatggtgctgcagcagcaattttggccagtgaagcatttgtacagaagtatggcctgcaatccaaagctgtggaaattttggcacaagaaatgatgactgatttgccaagctcgtttgaagaaaaaagcattattaaaatggttggctttgatatgagtaaagaagctgcaagaaaatgctatgagaaatctggcctgacaccaaatgatattgacgtaatagaacttcacgattgcttttctaccaacgaactccttacttatgaagcactgggactctgtccagaaggacaaggtgcaacgctggttgatagaggagataatacatatggaggaaagtgggtcataaatcctagtggtggactgatttcaaagggacacccactaggcgctacaggtcttgctcagtgtgcagaactctgctggcagctgagaggggaagccggaaagaggcaagttcctggtgcaaaggtggctctgcagcataatttaggcattggaggagctgtggttgtaacactctacaagatgggttttccggaagccgccagttcttttagaactcatcaaattgaagctgttccaaccagctctgcaagtgatggatttaaggcaaatcttgtttttaaggagattgagaagaaacttgaagaggaaggggaacagtttgtgaagaaaatcggtggtatttttgccttcaagtgaaagatggccctgggggtaaaga

SEQ ID NO: 186036 - DNA, 1578 bp, Homo Sapiens
ttggctatgaaatattattctagttgcacagatacgggagctaagacttgtttcccattctcacaagtgttagctttgtggaaatgggaaacagacctctggaatctcttatacttagcccagcggtgggttggagatggcacggaattaaagatttgggaagagactgactcaccgtcacacccctcacttttgtgctatagtggatcaatcttcctgtcctacaactgacaaaggatcccctaaagacccctggaaggctggaccatggcacaagaactgccttcatccatcaccgggagcaagtgtggaagagatgcatcaacatttggcgtgatgtgggcctttttggggtgctaaatgaaattgcaaactcagaagaagaggtgtttgagtgggtgaagacggcatccggctgggccctggcactctgtcgatgggcctcttccctccatgggtccctgttcccccatctgtctctcaggagcgaagatctgatcgctgaatttgcccaagtcacaaattggtccagctgctgcttgcgtgtctttgcatggcacccccacaccaacaagtttgcagtggccctgctagatgactcagtccgtgtgtataatgccagcagcaccatagtcccctccctgaagcaccggctgcagcgaaatgtggcgtctctggcctggaagccccttagtgcctctgtcttggctgtggcctgccagagctgcattcttatctggaccctggaccctacctccttgtctacccgaccctcttctggctgtgcccaagtgctgtctcaccctgggcatacacctgttaccagcttggcctgggcccccagtggggggcggctgctctcagcttcacccgtggatgctgctatccgggtatgggatgtctcaacagagacctgtgtcccccttccctggtttcgaggaggtggggtgaccaacctgctctggtccccagacggcagcaaaatcctggctaccactccttcagctgtctttcgagtctgggaggcccagatgtggacttgtgagaggtggcctactctatcagggcgctgtcagactggctgctggagcccagatggcagccgactgctgttcactgtattgggagagccactgatttactccctgtcttttccagaacgttgtggtgagggaaaggggtgcgttggaggtgcaaagtcagcaacgattgtggcagatctgtctgagacaacaatacagacaccagatggtgaggagaggcttgggggagaggctcactccatggtctgggaccccagtggggaacgtctggctgtgcttatgaaaggaaagccaagggtacaggatggtaaaccagtcatcctcctttttcgcactcgaaacagccctgtgtttgagctccttccctgtggcattatccagggggagccaggagcccagccccagctcatcactttccatcctttccttcaacaaaggggccctgctcagtgtgggctggtccacaggccgaattgcccacatcccgctgtactttgtcaatgcccattttcacgttttagccccatgcttgggc

SEQ ID NO: 186037 - DNA, 1504 bp, Homo Sapiens
ctttgtacaaaaaagttggatatattgcatcttcctctggctctacagcgattaagaagaaacaacaagatgtgcttggtttcctagaagccaacaaaataggatttgaagaaaaagatattgcagccaatgaagagaatcggaagtggatgagagaaaatgtacctgaaaatagtcgaccagccacaggttaccccctgccacctcagattttcaatgaaagccagtatcgcggggactatgatgccttctttgaagccagagaaaataatgcagtgtatgccttcttaggcttgacagccccacctggttcaaaggaagcagaagtgcaagcaaagcagcaagcatgaaccttaagcactgtgctttaagcatcctgaaaaatgagtctccattgcttttataaaatagcagaattagctttgcttcaaaagaaataggcttaatgttgaaataatagattagttgggttttcacatgcaaacattcaaaatgaatacaaaattaaaatttgaacattatggtgattatggtgaggagaatgggatattaacataaaattatattaataagtagatatcgtagaaatagtgttgttacctgccaagccatcctgtatacaccaatgattttacaaagaaaacacccttccctccttctgccattactatggcaacttaagtgtatctgcagctctacattaaaaaggagaaagagaaataacctgtctctcattcctaagttgcctcattaattttcatgaacaagaatatgtacctttttgatgctatattactgcgattaaaaagttcttgcaggtaatgtttatgatatgttaaacgttgtaatttcttatcgtaattataacattcccattcttttgtagatgaaacttctacatattgaaccacagattttctgagcttctaaatgtagcctttcattgcacatttcagtgatcagaatagatatccttttacacgcacaaaagcaatagattcattcagtggacaagttccttgtttaactacacagctatgatggaatgatatatccaagttccttgcctcagtgaaatatgcatatgtatatcatgaaagtgggatgccaagtaagcttaaaatggcattctctagcaaagagattagacttttaaataactcttataaaacaggttggcgatcatttcccaagattggtttcccttgagtttttgctaaaacaaatcttagtagttttgcccgtttaaaacaactcacaatcgtaaatgctactattcctaagatatcttacctttttatttcagtttagccatgtattgtatgagtgtattagtctaagcagtgagaatcttttctatgcctctattccagcaaaaagtaaaagtatcaaataaaaagggcaacttttaaaatattaagccctgaagactttctaaaaagacaagaaacatgggcctaaataaccaacatagatttacatagtaagtttcacactaccttat

SEQ ID NO: 186038 - DNA, 1451 bp, Homo Sapiens
  misc_feature (177)..(189): n is a, c, g, or t
tttgtacaaaaaagttggccccggcctgccggggacaaccacgttgatttccaagccgatccctgcccccatgggggcctgaggggcggaacgcagttccttacacttgaggggagggcaccatgcccttgccctcagaaaagccagaaagctggggtgttttggggaggaagtctnnnnnnnnnnnnnccagattgggggcttcagggaagatgcctcctccctccttccctctctgcccgcccctgggtctgtccccggtggacacccctcagggctctgacaggcactgctccaaggcagccatgcggtagtggctggccgtctcctcgcccgcctgcagcctcatggcctcccggcacagccggttggcccgcgccagctccaccaggacaccctgataggcggccaccatctcgggcttgacagagttggggctgacactgcctagcagctggagcagctcctgcggccagcgggagcgcagggcagcgggggccagccagggcagcagaggcacacagccggtgaaggcctgcatgcccaggaaccagagctcctgcaggtcggcccagatgccctcatactcaggggacagggctagcactgcctggtctgagcccggggtggcccgcgccacgtgggactgtgataggaagaggatggcagctgcgaagaaccctcgggatgctggtgttccctgaagagctggagaggtgctaaggagccgggccatgaggagccccagggtggccacattagcagccagaagcagccttccctgttgctgcactagtgctggtagcgacgtcatgagggtgttcattagagatgtgaagcaggcgtcacgcttgatcagccccggtgcggtgaccacgaggttgaggaagatgtggcagcaggtctgcaggccaatctccacgctgtcaggcagcaccgaggtgtcgtggccaggggatgtgagttcccactgctgcaggaaatacttgcacagaagcgagggggccccttccttgatcaggatctcccggggcccatcttcaacggtcaggtggcaccagccaggcaggaggagccggagagcgtctcctggccaggtgggccctggggtggtgggggagatggccaggttggccacctgctgggaaaggtcattggcctcctcggcctcctcgtagagggtcttggcatagcggacgaggaagggcagcagctggcacacctccttacgcaaggatgaggtctcctcggccagccaggcacccaggatccgcaccgaggcaaacacaaagggctccttctgcttctctgaccccacctgcagcaggtagtggataacagcccctatggcctccttcatgacgctcacgagctgcaccttctgtggctccttaagcagtgactgctcacagcgagtgcattcctggatccccaactccatgagggcccaa

SEQ ID NO: 186039 - DNA, 1397 bp, Homo Sapiens
  misc_feature (68)..(109): n is a, c, g, or t
ttggggaattgtttgagtcttccctttgtggagaccttttaaatgaagtacaggcaagtgagcacacnnnnnnnnnnnnnnnnnnnnnnnnnnnnnnnnnnnnnnnnnncaacaagcatgactcatcaagatctgaagagcgcaagtcacacaaaatccccaaattagaaccagaggaacaaaatagaccaaatgagagggttgacactgtatcagaaaaaccaagggaagaaccagtactaaaagaggaagccccagttcagccaatactatcttctgttccaacaacggaagtgtccactggtgttaagtttcaggttggcgatcttgtgtggtccaaggtgggaacctatccttggtggccttgtatggtttcaagtgatccccagcttgaggttcatactaaaattaacacaagaggtgcccgagaatatcatgtccagttttttagcaaccagccagagagggcgtgggttcatgaaaaacgggtacgagagtataaaggtcataaacagtatgaagaattactggctgaggcaaccaaacaagccagcaatcactctgagaaacaaaagattcggaaaccccgacctcagagagaatgtgctcagtgggatattggcattgcccatgcagagaaagcattgaaaatgactcgagaagaaagaatagaacagtatacttttatttacattgataaacagcctgaagaggctttatcccaagcaaaaaagagtgttgcctccaaaaccgaagttaaaaaaacccgacgaccaagatctgtgctgaatactcagccagaacagaccaatgcaggggaggtggcctcctcactctcaagtactgaaattcggagacatagccagaggcggcacacaagtgcggaagaggaagagccaccgcctgttaaaatagcctggaaaactgcggcagcaaggaaatccttaccagcttccattacgatgcacaaagggagcctggatttgcagaagtgtaacatgtctccagttgtgaaaattgaacaagtgtttgctcttcagaatgctacaggggatgggaaatttatcgatcaatttgtttattcaacaaagggaattggtaacaaaacagaaataagtgtcagggggcaagacaggcttataatttctacaccaaaccagagaaatgaaaagccaacgcagagtgtatcatctcctgaagcaacatctggttctacaggctcagtagaaaagaagcaacagagaagatcaattagaactcgttctgaatcagagaaatccactgaggttgtgccaaagaagaagatcaaaaaggagcaggttgaaacagttcctcacgctacagtgaagactggattacagaaagggtcggcggaccggggagtgcagggctctgtc

SEQ ID NO: 186040 - DNA, 1197 bp, Homo Sapiens
tggcatgagccactcttcccccagccctggatgcctgaatttaaggaactggcaaatccagcagtggagggggttttgtgctgctggatggggagacgttcgaggtgaaggggacatgggagagacctgggggtgctgcaccgttgggctatgacttctggtaccagcctcgacacaatgtcatgatcagcactgagtgggcagctcccaatgtcttacgagatggcttcaaccccgctgatgtggaggctggactgtacgggagccacttatatgtatgggactggcagcgccatgagattgtgcagaccctgtctctaaaagatgggcttattcccttggagatccgcttcctgcacaacccagacgctgcccaaggctttgtgggctgcgcactcagctccaccatccagcgcttctacaagaacgagggaggtacatggtcagtggagaaggtgatccaggtgccccccaagaaagtgaagggctggctgctgcccgaaatgccaggcctgatcaccgacatcctgctctccctggacgaccgcttcctctacttcagcaactggctgcatggggacctgaggcagtatgacatctctgacccacagagaccccgcctcacaggacagctcttcctcggaggcagcattgttaagggaggccctgtgcaagtgctggaggacgaggaactaaagtcccagccagagcccctagtggtcaagggaaaacgggtggctggaggccctcagatgatccagctcagcctggatgggaagcgcctctacatcaccacgtcgctgtacagtgcctgggacaagcagttttaccctgatctcatcagggaaggctctgtgatgctgcaggttgatgtagacacagtaaaaggagggctgaagttgaaccccaacttcctggtggacttcgggaaggagccccttggcccagcccttgcccatgagctccgctaccctgggggcgattgtagctctgacatctggatttgaactccaccctcatcacccacactccctattttgggccctcacttccttggggacctggcttcattctgctctctcttggcacccgacccttggcagcatgtaccacacagccaagctgagactgtggcaatgtgttgagtcatatacattttactgaccactgttgcttgttgctcactgtgctgctttt

SEQ ID NO: 186041 - DNA, 879 bp, Homo Sapiens
tctacgaccagtgggactgttgccaagatggttccgccactcaccagggtcggcaaaggccctgtctgcacagtggtgccagagaccaggggactgagaccctgccgccttcacagtggctccgtctgtcttcatggctgtcagaagcagcgagtctgccttgatgaagtggggctgcagcaggaccgggacctgctggatctgcgaggtcacagtggtcgttacaggggctgccgtgggggcagctgtgactgtcagtagctgctgggggaccacactctggacctgggtgtgcaaggagacgggcgggacccctggcggggaagccagtggcaggccaggcagcggctgctgggtgttcccgggagggcttcctgtagagaagcctcccggagggctggggtagcctaacacaggggtggagctgaactgcggtggggctggggctgggaagctctgtggcaggagggcccctggcaggggctgtggggtgggggtctgcaggatgctcagtggcactgactcttccttgataccaggcccaggggagaaagcgggcatggacgggtacatcttcaatggagtgggtgcaggctggggaggggacaggggtgagggcgctgcctgcggcccgctcaggaaggcttcaagagaggagctcaatgtggcaggaggtggagacaagctgcctggggagctggtatcggggctggcagggtctgtgccccctgccccactcccagcatagggtgggtcaaataggccagggaagtcactgtcttggttgttgataagctgaagcatgtcttcgaaagtgcaatccatggctccgcgatctgcgcccgcccttggggcgtccaggccgttggccctacccaa

SEQ ID NO: 186042 - DNA, 1676 bp, Homo Sapiens
ttgggccagtgcatttgcatcagagcccaggcagggactgtccataggaagccacatggggcaatgactcatccaaggccagtcggtgatagagacctgaagagcaggttgaaagtgggagagggaggtctgtgtctgcagccccatgctttatttctgcaggaagccctcccgggaacacccagcagccgctgcctggcctgccactggcttccccgccaggggtcccgcccgtctccttgcacacccaggtccagagtgtggtcccccagcagctactgacagtcacagctgcccccacggcagcccctgtaacgaccactgtgacctcgcagatccagcaggtcccgggcctgctgcagccccacttcattaaggcagactcgctgcttctgacagccatgaagacagacggagccactgtgaaggcggcaggtctcagtcccctggtctctggcaccactgtgcagacagggcctttgccgaccctggtgagtggcggaaccatcttggcaacagtcccactggtcgtagatgcggagaagctgcctatcaaccggctcgcagctggcagcaaggccccggcctctgcccagagccgtggagagaagcgcacagcccacaacgccattgagaagcgctaccgctcctccatcaatgacaaaatcattgagctcaaggatctggtggtgggcactgaggcaaagctgaataaatctgctgtcttgcgcaaggccatcgactacattcgctttctgcaacacagcaaccagaaactcaagcaggagaacctaagtctgcgcactgctgtccacaaaagcaaatctctgaaggatctggtgtcggcctgtggcagtggagggaacacagacgtgctcatggagggcgtgaagactgaggtggaggacacactgaccccacccccctcggatgctggctcacctttccagagcagccccttgtcccttggcagcaggggcagtggcagcggtggcagtggcagtgactcggagcctgacagcccagtctttgaggacagcaaggcaaagccagagcagcggccgtctctgcacagccggggcatgctggaccgctcccgcctggccctgtgcacgctcgtcttcctctgcctgtcctgcaaccccttggcctccttgctgggggcccgggggcttcccagcccctcagataccaccagcgtctaccatagccctgggcgcaacgtgctgggcaccgagagcagagatggccctggctgggcccagtggctgctgcccccagtggtctggctgctcaatgggctgttggtgctcgtctccttggtgcttctctttgtctacggtgagccagtcacacggccccactcaggccccgccgtgtacttctggaggcatcgcaagcaggctgacctggacctggcccggggagactttgcccaggctgcccagcagctgtggctggccctgcgggcactgggccggcccctgcccacctcccacctggacctggcttgtagcctcctctggaacctcatccgtcacctgctgcagcgtctctgggtgggccgctggctggcaggccgggcaggggcctgcagcaggactgtgctctgcgagtggatgctagcgccagcgcccgagacgcagccctggtctaccataagctgcaccagctgc

SEQ ID NO: 186043 - DNA, 1971 bp, Homo Sapiens
  misc_feature (1600)..(1663): n is a, c, g, or t
ttggccatttcatagacagaataactgaggcctggagccacgtggggtcccacagtaaggcaaagccagagcagcggccgtctctgcacagccggggcatgctggaccgctcccgcctggccctgtgcacgctcgtcttcctctgcctgtcctgcaaccccttggcctccttgctgggggcccgggggcttcccagcccctcagataccaccagcgtctaccatagccctgggcgcaacgtgctgggcaccgagagcagagatggccctggctgggcccagtggctgctgcccccagtggtctggctgctcaatgggctgttggtgctcgtctccttggtgcttctctttgtctacggtgagccagtcacacggccccactcaggccccgccgtgtacttctggaggcatcgcaagcaggctgacctggacctggcccggggagactttgcccaggctgcccagcagctgtggctggccctgcgggcactgggccggcccctgcccacctcccacctggacctggcttgtagcctcctctggaacctcatccgtcacctgctgcagcgtctctgggtgggccgctggctggcaggccgggcagggggcctgcagcaggactgtgctctgcgagtggatgctagcgccagcgcccgagacgcagccctggtctaccataagctgcaccagctgcacaccatggggaagcacacaggcgggcacctcactgccaccaacctggcgctgagtgccctgaacctggcagagtgtgcaggggatgccgtgtctgtggcgacgctggccgagatctatgtggcggctgcattgagagtgaagaccagtctcccacgggccttgcattttctgacacgcttcttcctgagcagtgcccgccaggcctgcctggcacagagtggctcagtgcctcctgccatgcattggctctgccaccccgtgggccaccgtttcttcgtggatggggactggtccgtgctcagtaccccatgggagagcctgtacagcttggccgggaacccagtggaccccctggcccaggtgactcagctattccgggaacatctcttagagcgagcactgaactgtgtgacccagcccaaccccagccctgggtcagctgatggggacaaggaattctcggatgccctcgggtacctgcagctgctgaacagctgttctgatgctgcgggggctcctgcctacagcttctccatcagttccagcatggccaccaccaccggcgtagacccggtggccaagtggtgggcctctctgacagctgtggtgatccactggctgcggcgggatgaggaggcggctgagcggctgtgcccgctggtggagcacctgccccgggtgctgcaggagtctgagagacccctgcccagggcagctctgcactccttcaaggctgcccgggccctgctgggctgtgccaaggcagagtctggtccagccagcctgaccatctgtgagaaggccagtgggtacctgcaggacagcctggctaccacaccagccagcagctccattgacaaggccgtgcagctgttcctgtgtgacctgcttcttgtggtgcgcannnnnnnnnnnnnnnnnnnnnnnnnnnnnnnnnnnnnnnnnnnnnnnnnnnnnnnnnnnnnnnngccccaggcttccgcccttgagctgcgtggcttccaacgggacctgagcagcctgaggcggctggcacagagcttccggcccgccatgcggagggtgttcctacatgaggccacggcccggctgatggcgggggccagccccacacggacacaccagctcctcgaccgcagtctgtgcggcgggcaggccccggtggcaaaggaaccgcggtggcggagctggagccgcggcccacgcggcgggagcacgcggaggccttgctgctggcctcctgctacctgccccccggcttcctgtcggcgcccgg

SEQ ID NO: 186044 - DNA, 1019 bp, Homo Sapiens
aactcaagttgaatggtttcccactgcaatgtcttacgcatcaccaaaaaataacttgtaaaactcaagcttaccaaaaaagaaagtgttgatctttgcttgtgcccgcatgagtgaatgatctgctaagttgaggaagctggcaattctagtgaaaagtccaggtgaggccaggttctgcagcatggggcaggtccacgctgagcccaggcagacaacgtgaccagtcacggaaggaagccaaaggggcttgctgggcaccagagactgtaattagcaagggcaaggaagaaccgtaaacagcaacacaacactctcccaaggtgcccagctcaaaggcatcagtacacaaaggattcaggtgcagttaaagggcaatttggccaatagacagaaaatcagagagtcaaatctgatgcgcaatgagttgttctgagaccagtaatccacggtgctgcaatttgggtttttaaagatagaacacttgttctacggaaaagtgtatctcactttaaaaccaaccttttcacaggaaaggaaaccaaaagcaaagtccctgtggtcacccttatttattgctgaagcagaacgaaaacctgctccacgggccgggcttcctgcccaggaccgcacaggctttccagagccagcctgggcccagcgagccgcggtgaggacaggcttcgtctcctctgcactggaacacagtgggggaaacgttccctgcttatgcctatgttacttagtggaacctaaggtgtatattgctttattcttgctgaaggaggggattttactttcggtgagcactgaagcctgctggctacggccaatggtggaggagacctcgggatgaggctggcctgatgacaaaactccacccatcagtatcagcctgcagcatggcctccatctgttttcatcagctgcagtgacttataataaataatacattctatttacaggttctagtaagatctctctttgagggaagacaaaacagtgtattttgttgccaa

SEQ ID NO: 186045 - DNA, 1195 bp, Homo Sapiens
caactttgtacaaaaaagttggggcgagtgccgcgcgggccaccatggccacggacgagctggccaccaagctgagccggcggctgcagatggagggcgagggcggcggcgagaccccggagcagcccgggctgaacggggcagcggcggcggcggcgggggcacccgacgaggcggccgaggcgctgggcagcgcggactgcgagctgagcgccaagctgctgcggcgcgcagacctcaaccagggcatcggcgagccccagtcgcccagccgccgcgtcttcaacccctacaccgagttcaaggagttctccaggaagcagatcaaggacatggagaagatgttcaagcagtatgatgccgggcgggacggcttcatcgacctgatggagctaaaactcatgatggagaaacttggggcccctcagacccacctgggcctgaaaaacatgatcaaggaggtggatgaggactttgacagcaagctgagcttccgggagttcctcctgatcttccgcaaggcggcggccggggagcttcaggaggacagcgggctgtgcgtgctggcccgcctctctgagatcgacgtctccagtgagggtgtcaagggggccaagagcttctttgaggccaaggtccaggccatcaacgtgtccagccgcttcgaggaggagatcaaggcagagcaggaggaaaggaagaagcaggcggaggagatgaagcagcggaaagcggccttcaaggagctgcagtccacctttaagtagcgggggctgcagccgaccgccctgctccggccccagtgtggtgggcgagggtggcgcatgggaggccgagcctgaatccttgcctgtgtctgacgggaccactactaaaaacctaaaaatatctgtgaatggagcaagttcaggggtcttatggaggtggcccggcccctccccgctcccttccactctgcacgaggccgccacaccggcgctggctccctgcccggcccggccctccctggcaatccctgggctctcttgcacccctaactgccccctgcctgctccggcactgccccaggcccagctcctggccctaggtccctcccagccccatgtgcctgccgcctgccctccacacatccctgtcccccaacccgggaacccctgccctcctccagcaaccgcaccgcccctggggccccctg

SEQ ID NO: 186046 - DNA, 1353 bp, Homo Sapiens
ttgggcctcgagcctgcgaggagcgcgccgcccgccagctccctgcgtcccgtcccgcgtccccgcgttcccgcgtcctgcgatccgccgccatggccagtgaggagctggcgtgcaagctggagcgccggctgcggcgcgaggaggccgaggagagtggcccccagctggctcccctcggcgccccagccccggagcccaagcccgagcccgagcctcccgcccgtgcgcccacggccagcgccgacgcggagctgagcgcccagctgagccggcggctggacatcaacgagggcgctgcgcggccccggcgctgcagggtcttcaacccctacacggagttcccggagttcagccgccgcctcatcaaggacctggagagcatgttcaaactgtatgacgctgggcgggatggcttcatcgacctgatggagctgaagctgatgatggagaagctgggggccccccagacccacctgggcctgaagagcatgatcaaggaggtggatgaggacttcgatggcaagctcagcttccgggagttcctgctcattttccacaaggccgcggcaggggagctgcaggaggacagtgggctgatggcgctggcaaagctttctgagatcgatgtggccctggagggtgtcaaaggtgccaagaacttctttgaagccaaggtccaagccttgtcatcggccagtaagtttgaagcagagttgaaagctgagcaagatgagcggaagcgggaggaggaggagaggcggctccgccaggcagccttccagaaactcaaggccaacttcaatacatagtcctgctgaccttgccctctgcccacagctgtgcctcacagatgccccgagaagagatgactaggcatcttcatcactgctgtcggtcccctccctgagccagcatctccatccaccaccccgtgccagctcccgtgccagccttcattcctcccagtgtccaagcccctctgtctcctgcctctgctcctctgcccttcttatagccagaacttgtatcttctcagcaaccttcactttgtccttgtccctttaccattccccatcaaagagtagtctgctatatcaatttgtgtagatatgtctgtctttttgggttctcagagaaaatgcccattttctcggagaattctctgcactcctctctgcttcacattcaacttccctgttctcatctttggtaggattctgccagttgcttttgcatcttctgttcctgggtaatggtgggtcttaatggaggctgggtggaccactgcccgtccactcttcaacaggaggaacagcatgccaccacagtaacacacattagagaaaggac

SEQ ID NO: 186047 - DNA, 1597 bp, Homo Sapiens
ccaactttgtacaaaaagttgggtgggtctcttcgccggttcccggccccgtggatcctacttctctgtcgcccgcggttcgccgccccgctcgccgccgcgatgccagtgtttcatacgcgcacgatcgagagcatcctggagccggtggcacagcagatctcccacctggtgataatgcacgaggagggcgaggtggacggcaaagccattcctgacctcaccgcgcccgtggccgccgtgcaggcggccgtcagcaacctcgtccgggttggaaaagagactgttcaaaccactgaggatcagattttgaagagagatatgccaccagcatttattaaggttgagaatgcttgcaccaagcttgtccaggcagctcagatgcttcagtcagacccttactcagtgcctgctcgagattatctaattgatgggtcaaggggcatcctctctggaacatcagacctgctccttaccttcgatgaggctgaggtccgtaaaattattagagtttgcaaaggaattttggaatatcttacagtggcagaggtggtggagactatggaagatttggtcacttacacaaagaatcttgggccaggaatgactaagatggccaagatgattgacgagagacagcaggagctcactcaccaggagcaccgagtgatgttggtgaactcgatgaacaccgtgaaagagttgctgccagttctcatttcagctatgaagatttttgtaacaactaaaaactcaaaaaaccaaggcatagaggaagctttaaaaaatcgcaattttactgtagaaaaaatgagtgctgaaattaatgagataattcgtgtgttacaactcacctcttgggatgaagatgcctgggccagcaaggacactgaagccatgaagagagcattggcctccatagactccaaactgaaccaggccaaaggttggctccgtgaccctagtgcctccccaggggatgctggtgagcaggccatcagacagatcttagatgaagctggaaaagttggtgaactctgtgcaggcaaagaacgcagggagattctgggaacttgcaaaatgctagggcagatgactgatcaagtggctgacctccgtgccagaggacaaggatcctcaccggtggccatgcagaaagctcagcaggtatctcagggtctggatgtgctcacagcaaaagtggaaaatgcagctcgcaagctggaagccatgaccaactcaaagcagagcattgcaaagaagatcgatgctgctcagaactggcttgcagatccaaatggtggaccggaaggagaagagcagattcgaggtgctttggctgaagctcggaaaatagcagaattatgtgatgatcctaaagaaagagatgacattctacgttcccttggggaaatatctgctctgacttctaaattagcagatctacgaagacaggggaaaggagattctccagaggctcgagccttggccaaacaggtggccacggccctgcagaacctgcagaccaaaaccaaccgggctgtggccaacagcagaccggccaaagcagctgtacaccttgagggcaagattgagc

SEQ ID NO: 186048 - DNA, 1261 bp, Homo Sapiens
agtcaagtataacaaaatcaaaacaagggtttctccataatcaatatgatgagaattacagtgtaaagatcatttcagatttaagaaatctgcaatcaatctacagaatatcctaagacaagggagacacagttaattcacttaattatcagccgttggggtttttcaatactgttcacaggaaaaaagtaatgagttgacatacatgtaaatagaatatatttggtctatacagtaaaaaaatacaaattataaagtgagctaacaaagaatgaaatctgaatacagatttataaaactgacatgttagacaacacatacagtatttctcatgtaaaaacatctagtttcagcaaaaaataatttggttgcttttcagctgcattgtagatctgtaagctgaagatgcagatgtccaagtatcttaaaaaccataataaatgtctttctcaatgcatacaaaatgataaatgctctcatcacagtcttaagggtatttttggaagtttgttttgtcttgcttcagaaacacatttaaaatgggtaaaaatcaaatggtttcatggtacaatgaaacagtaaacagtgctcaatttactgctaatgttgaaaaaaacctagattttacagtactctggtatatatgaaaatgtttttgatttttacattgcatatttctgagtccattctcttgcatgtctgttgtatttttctttgtctgatttatagatttgtgcaatatctggtactaaggggtcatctggattaggatcacaaagtagagaacatatggacaataaaacttttgatacagtcagagctggtgaccattgtgacctcagaatatcgagacaaatacttccattactgtttatgtttggatggtaaatttttgttgtgaaagcaatctttggtggtttaaaaggataatctgtcggaaaatgtacagtgagaaagaagactccaccttgatatgcgctatcaggagtcatctcccacaggtccagctgaacagtgagcaggtggatcgcgctgtagatcactcaattctttctgaatcctcttcagcgccatgggtcagggatggcggtggggacaccggccggcaggggtcggctgcggggctcaggggcgtgggtcgtcgcgggttgggctcgctggcagctaggctggctccgcgcggtgggtccccggttagccgctccctggctcgctccgggcgccggtccctgctccgtgtgcgccggagcgcgagtgccaa

SEQ ID NO: 186049 - DNA, 1338 bp, Homo Sapiens
ttggaggtcaaggtggaaatggcagaacgagaggaacggcaacagcaggtggctgaggactacgagctcagactggcccgggagcaagcgcgagtgtgcgaactgcagagtgggaaccagcagctggaggagcagcgggtggagctggtggaaagactgcaggccatgctgcaggcccactgggatgaggccaaccagctgctcagcaccactctcccgccgcccaaccctccagctcctcctgctggaccctccagccccgggcctcaggagccggagaaggaggagaggagggtctggactatgcctcccatggccgtggccctgaagcctgtattgcagcagagccgggaagcaagggacgagctacctggagcgcctcctgttctttgcagttcctcctcagatcttagcctcctgttgggcccctcttttcagagccagcattctttccagcccctggagcccaaaccagacctcacttcatccacagctggggccttctctgcacttggggccttccatcccgatcatagggcagaaaggccattccctgaggaagatcctggacctgacggggagggcctcctaaagcaagggctgccgcctgctcagctggagggcctcaagaattttttgcaccagttgctggagacagtgccccagaacaatgagaacccttctgtcgacctgttgccccctaagtctggtcctctgactgtcccatcttgggaggaagcccctcaagtgccacgtattccaccgcctgtccacaaaaccaaagttcccttagccatggcatccagtcttttccgggtccctgagcctccctcctcccattcacaaggcagtggtcccagcagtggttccccagagagaggtggagatgggcttacattcccaaggcagctgatggaggtgtctcaactgttgcgactctaccaggctcggggctggggggctctgcctgctgaggatctcctgctctacctgaagaggctggaacacagcgggtactgatggccgaggggataatgtccccagaaggaacacagactcccgcttgggtgagatcccccggaaagagattccctcccaggctgtccctcgccgccttgctacagcccccaagactgaaaaacctcccgcacggaagaaaagtgggcaccctgccccgagtagcatgaggagccgggggggagtctggagatgagcccccctaccctctctcctctttgttctctcattgttgttattttaataaatgctcattagtctgtatcagagtctctggctcataggaatttggaaaatagaggttttgtagggaatcacttc

SEQ ID NO: 186050 - DNA, 1595 bp, Homo Sapiens
  misc_feature (99)..(149): n is a, c, g, or t
  misc_feature (1270)..(1278): n is a, c, g, or t
actttgtacaaaaaagttggaacccaaagtagatcgaggcggcgggctgcacattcccgttgttgcgttgcgtttccttcctctttcactccgcgctcnnnnnnnnnnnnnnnnnnnnnnnnnnnnnnnnnnnnnnnnnnnnnnnnnnncagttctcttcctcctgcgcacctgccctgctcggtcagtcagtcggcggccggcgcccggcttgtgctcagacctcgcgcttgcggcgcccaggcccagcggccgtagctagcgtctggcctgagaacctcggcgctccggcggcgcgggcaccacgagcggagcctcgcagcggctccagaggaggcaggcgagtgagcgagtccgaggggtggccggggcaggtggtggcgccgcgaagatggtcgccaagcaaaggatccgtatggccaacgagaagcacagcaagaacatcacccagcgcggcaacgtcgccaagacctcgagaaatgcccccgaagagaaggcgtctgtaggaccctggttattggctctcttcatttttgttgtctgtggttctgcaattttccagattattcaaagtatcaggatgggcatgtgaagtgactgaccttaagatgtttccattctcctgtgaattttaacttgaactcattcctgatgtttgataccctggttgaaaacaattcagtaaagcatcctgcctcagaatgactttcctatcatgcttcatgtgtcattccaaggtttcttcatgagtcattccaagttttctagtccataccacagtgccttgcaaaaaacaccacatgaataaagcaataaaatttgattgttaagatacagtagtggaccctacttattcagtcaattaagagtaagtttttttatgtggttattaaaacagtatgaacaattagtctaactctgcatagacagggtctagattttgttaacccaaatgtataactgcagttagcttaaattacaatttgaagtcttgtggtttttatatagctaggcactttattactcttttgaactgaaagcacactcccttataggttcatgtaactgtcctgtaataaggtgcttataaatggaacaactacacagcctagttttgccacaacctttagcatctaaaaagttttaaaagcttctaaatgtctaatataaagggagatgcttatagccacaacatctattttaccaatattgtttccattacactaccttggattttgcatgagtgagtatagtaacccaagatgccatnnnnnnnnncttgatcgttttctgacttaatcagttactgtggtttcactaaaagctaccgtggtggagtgaagtcagtcagggaaggtttgtttatgttacatttatttcaccagaactattttaatatatcaaaggggtttactatgccaaacaaaattctagggaaaaatactgctaaaaatggatgcctcatcagaacatgctgttgagtccaatgtgccataagacattttagcatgttaaatagcacttttaatagcaaaaaaaggcacatcaactgcgaagttatccttagtttgcaaatgctttttctagattaatga

SEQ ID NO: 186051 - DNA, 1650 bp, Homo Sapiens
  misc_feature (50)..(58): n is a, c, g, or t
ctttgtacaaaaaagttgggagtgagtatcctttaacccaagatgccatnnnnnnnnncttgatcgttttctgacttaatcagttactgtggtttcactaaaagctaccgtggtggagtgaagtcagtcagggaaggtttgtttatgttacatttatttcaccagaactattttaatatatcaaaggggtttactatgccaaacaaaattctagggaaaaatactgctaaaaatggatgcctcatcagaacatgctgttgagtccaatgtgccataagacattttagcatgttaaatagcacttttaatagcaaaaaaaggcacatcaactgcgaagttatccttagtttgcaaatgctttttctagattaatgatttttcaatcattagggtactagacacatcagcctaaagtggcatctggaattgaatggatttactgataatgatcagtctttagtcttccctttgttatatgactttataggttatgattgatcaaatttacgttttactaatggtaagggtgagggtcatagggcaggttttgggttttctagtactgttgaaaactgcaagtattggctatttgtatacttagccataacttggtgaaaaaaaacctgagcagtgtctatgtattaatgcgttggaaagaaagctgcttgtgtttgctttgttaattgcctcaggatatttcttttaaaataagctgttttaagaggaacagaagggaaatctgctacctagtctatacacagcgtgaacctcacagggggcttctgataccctcaaacatggagaacagtaagggagcagagtggttaaggactttcaggaacttaactattctggaataaggaatgaatcaactgaccttgggccagcaggtttttaactaaattgttacttgcctttctcacccagttaatcagtctctgtacttgtttccctttttgaaacaagtgtcttggttaactaattctgttttatggttgtgctaaattcatagcaggtgccttattctttgcttttagtcaaaccattccatatcagaattttccttggtttactatagatatttggctttaagttgttgtttgtgttttttaatgtacaatgttctgataaatttgactgttaaattgctatagctagcaatcattttacatatgtaaaattgcattccctttgtatttcatgtgtaattcaccaattaagtgcagtttatattcaggttggattatgcatgtttaggtaaacgaaagctgtgtcttacttgatttattctttaaaaataaagttccctgaatatttgatgcttttcttctaaacggaaatgattttacagttatctgagtgtaccttttatagttagtagaaaatgattttaaagaatgtttagtattgtacttaaatggtatgcagaggcacagatgtaaggtttataactggaaataggtggtaagaaaaatatatagaaagcacaatgatttgaatatttttccacttaggatttcctaatctccttgtcatccaattcaagctcaagatgaagcacaattctttgatctccctttgccagttgaattttatagatcatctaatgttgagcacagtatgagaataaatattggggttgtcaacatt

SEQ ID NO: 186052 - DNA, 1124 bp, Homo Sapiens
  misc_feature (229)..(237): n is a, c, g, or t
  misc_feature (794)..(802): n is a, c, g, or t
ttggctcccttataggttcatgtaactgtcctgtaataaggtgcttataaatggaacaactacacagcctagttttgccctacctttagcatctaaaaagttttaaaagcttctaaatgtctaatataaagggagatgcttatagccacaacatctattttaccaatattgtttccattacactaccttggattttgcatgagtgagtatagtaacccaagatgccatnnnnnnnnncttgatcgttttctgacttaatcagttactgtggtttcactaaaagctaccgtggtggagtgaagtcagtcagggaaggtttgtttatgttacatttatttcaccagaactattttaatatatcaaaggggtttactatgccaaacaaaattctagggaaaaatactgctaaaaatggatgcctcatcagaacatgctgttgagtccaatgtgccataagacattttagcatgttaaatagcacttttaatagcaaaaaaaggcacatcaactgcgaagttatccttagtttgcaaatgctttttctagattaatgatttttcaatcattagggtactagacacatcagcctaaagtggcatctggaattgaatggatttactgataatgatcagtctttagtcttccctttgttatatgactttataggttatgattgatcaaatttacgttttactaatggtaagggtgagggtcatagggcaggttttgggttttctagtactgttgaaaactgcaagtattggctatttgtatacttagccataacttggtgnnnnnnnnncctgagcagtgtctatgtattaatgcgttggaaagaaagctgcttgtgtttgctttgttaattgcctcaggatatttcttttaaaataagctgttttaagaggaacagaagggaaatctgctacctagtctatacacagcgtgaacctcacagggggcttctgataccctcaaacatggagaacagtaacgggagcagagtggttaaggactttcaggaacttaactattctggaataaggaatgaatcaactgaccttgggccagcaggtttttaactaaattgttacttgcctttctcacccagttaatcagtctctgta

SEQ ID NO: 186053 - DNA, 2295 bp, Homo Sapiens
  misc_feature (110)..(160): n is a, c, g, or t
  misc_feature (1282)..(1290): n is a, c, g, or t
  misc_feature (1846)..(1854): n is a, c, g, or t
ctttgtacaaaaaagttggcgttggcagccgaacccaaagtagatcgaggcggcgggctgcacattcccgttgttgcgttgcgtttccttcctctttcactccgcgctcnnnnnnnnnnnnnnnnnnnnnnnnnnnnnnnnnnnnnnnnnnnnnnnnnnncagttctcttcctcctgcgcacctgccccgctcggtcagtcagtcggcggccggcgcccggcttgtgctcagacctcgcgcttgcggcgcccaggcccagcggccgtagctagcgtctggcctgagaacctcggcgctccggcggcgcgggcaccacgagccgagcctcgcagcggctccagaggaggcaggcgagtgagcgagtccgaggggtggccggggcaggtggtggcgccgcgaagatggtcgccaagcaaaggatccgtatggccaacgagaagcacagcaagaacatcacccagcgcggcaacgtcgccaagacctcgagaaatgcccccgaagagaaggcgtctgtaggaccctggttattggctctcttcatttttgttgtctgtggttctgcaattttccagattattcaaagtatcaggatgggcatgtgaagtgactgaccttaagatgtttccattctcctgtgaattttaacttgaactcattcctgatgtttgataccctggttgaaaacaattcagtaaagcatcctgcctcagaatgactttcctatcatgcttcatgtgtcattccaaggtttcttcatgagtcattccaagttttctagtccataccacagtgcctttgcaaaaaacaccacatgaataaagcaataaaatttgattgttaagatacagtagtggaccctacttattcagtcaattaagagtaagtttttttatgtggttattaaaacagtatgaacaattagtctaactctgcatagacagggtctagattttgttaacccaaatgtataactgcagttagcttaaattacaatttgaagtcttgtggtttttatatagctaggcactttattactcttttgaactgaaagcacactcccttataggttcatgtaactgtcctgtaataaggtgcttataaatggaacaactacacagcctagttttgccacaacctttagcatctaaaaagttttaaaagcttctaaatgtctaatataaagggagatgcttatagccacaacatctattttaccaatattgtttccattacactaccttggattttgcatgagtgagtatagtaacccaagatgccatnnnnnnnnncttgatcgttttctgacttaatcagttactgtggtttcactaaaagctaccgtggtggagtgaagtcagtcagggaaggtttgtttatgttacatttatttcaccagaactattttaatatatcaaaggggtttactatgccaaacaaaattctagggaaaaatactgctaaaaatggatgcctcatcagaacatgctgttgagtccaatgtgccataagacattttagcatgttaaatagcacttttaatagcaaaaaaaggcacatcaactgcgaagttatccttagtttgcaaatgctttttctagattaatgatttttcaatcattagggtactagacacatcagcctaaagtggcatctggaattgaatggatttactgataatgatcagtctttagtcttccctttgttatatgactttataggttatgattgatcaaatttacgttttactaatggtaagagtgagggtcatagggcaggttttgggttttctagtactgttgaaaactgcaagtattggctatttgtatacttagccataacttggtnnnnnnnnncctgagcagtgtctatgtattaatgcgttggaaagaaagctgcttgtgtttgctttgttaattgcctcaggatatttcttttaaaataagctgttttaagaggaacagaagggaaatctgctacctagtctatacacagcatgaacctcacagggggcttctgataccctcaaacatggagaacagtaagggagcagagtggttaggactttcaggaacttaactattctggaataaggaatgaatcaactgaccttgggcagcaggtttttaactaaattgttacttgcctttctcacccagttaatcagtctctgtacttgtttccctttttgaaacaagtgtcttgggttacctaattctgttttatggttgtgctaaattcatagcaagtgccttattctttgcttttagtccaacaattccatatcagaattttcc

SEQ ID NO: 186054 - DNA, 1176 bp, Homo Sapiens
gcagagctgcgcaccctccctccaggcagggtgtgcagtcaggccatggggctcttggggtatcccccactggtcccattaagatttgcccctggctccaccgaaaaccccgtcttcccctaagttgtccttgtctctggccctgggtttcaggaactcattcttggtaaggaagcctccccactgaggtaccagctaaaggggcaaggaaagggcccctgtgtcagtgtcagtttttccggggagtgagggcaaagctagaaaccaggttaggcgacggtgccccagcactggaatgcctcaggctgggctgtccacgcctggaagtttctcccagcacaggagccgagggtggaaggccctgggtgggagacctgtactaggttcctgccatgggtagtagagagggaaagttcagagtgagaacccctatgacgaggaaccgcggtgaagaaatgaaggggatcagggaggtgaaaaggatcaactagaaggggaagaagggtgaggggctattctggagggagggtaggcgggcaaggaggggtgaagggggagctgaggagagtcaggacatttcctgaagaggaagctagacggaaagaaaggccagtgaggagaaagggagcaggtggaggccacccgagagcacgggcctgagaccagatgcccctttcctctagactcatgactgtccacggggacgcaactggcgaagtgtgagggacccaggttgataagggcaggaagaggagcagcaggaagggtgtgtggtaagtctggggtggatggtagaagaggtgggggcccagggctgctgttagggacatgctgtctagaagccgacttgggttcatgggcgagtccaggcctcagggagactggggacacacaccctgggcacttcttcctgacttaaccaaagcctcttgaacacattcacgacagaggttctgaagatgaaagggaactgtgatttcactgcatctgacggaaactctgaacccctgccctgtctccactggagaaagtggctgcgtccccaggcgagaaggccctccctcagccttggaatgagacgggggagggagaaaggctgagagcatgggcggcctatctggcttgcccagctgctgttgctgtagccagccacctccctggtaaatcctggcccaa

SEQ ID NO: 186055 - DNA, 1990 bp, Homo Sapiens
ctttgtacaaaaaagttgggatagatccaaggacaaaatcaacagagaccattttgcatacacctcagaaacccacagctaagtttcccaggactccagaaaattcagcaaagaagaagcttttaagaggtggactagcagaaagactaaatggactgcagaatcgagagagatctgctatttctttgtggagacatcaatgtatttcttaccaaaagacactttcaggtagaaaatctggtgtattaactgtgaaaattttagagctgcatgaggaatgtgccatgcaagttgccatgtgtgagcagttattggggtcaccagccaccagctcctcccaaagtgtggctcccaggcctggagctggcctgaaagttctcttcaccaaggagactgcaggctacctcaggggccgtccccaggacactgtccggatcttccctccctggcaaaaactgattattccaagtggaagttgccctgttattctgaatacttacttttgtgagaaagttgttgccaaagaagattcagaaaaaacttgtgaagtgtactgtccggacataccccttccaagaagaagcatctctttggcccagatgtttgtaattaagggtctaacaaataattcacctgaaatccaggttgtgtgtagtggtgtagccactacagggacagcctggacccatgggcacaaagaagcaaaacagcgcatcccaaccagcactcccctgagggattctctcctggatgtggtggaaagccagggagctgcctcgtggccaggagctggagtccgagtggtggtgcaaagagtgtattctcttcccagcagagacagcaccaggggtcagcagggggccagctcaggacacacagacccagctggaactcgagcctgccttctggtacaagatgcctgtggaatgttcggtgaagtgcacttggagttcaccatgtcgaaggcaagacagttggaagggaagtcttgcagcctggtgggaatgaaggttctacagaaagtcaccagaggaaggacagcggggattttcagtttgattgacaccctgtggcccagcgatacctctgaaaacacctggccgcgaccagccctgtgaagagataaaaactcatctgcctcctccagccttgtgttacatcctcacagctcatccaaatctgggacaaattgatataattgacgaagaccccatttataagctttaccagcctccagttacccgctgcttaagagacattctccagatgaatgatcttggtacccgttgcagtttctatgccacggtgatttaccaaaaaccacagctgaagagtctgctgcttctggagcaaagggagatctggctgctagtgaccgatgtcactctgcaaacgaaggaggagagagaccccaggctccccaaaaccctgctggtctatgtggcccccttgtgtgtgctgggctctgaagtcctggaggcactcgctggggctgcccctcacagcctcttcttcaaggacgctctccgtgaccagggtcggattgtttgtgctgaacgaactgtcctcttgcttcagaagccccttttgagtgtggtctctggtgcaagttcctgtgagctgcctggcccggtgatgctcgacagcctggactctgcaacacctgtcaactccatctgcagtgttcaaggcactgtggttggcgtggacgagagcactgctttctcatggcctgtgtgtgacatgtgtggcaacgggagattggaacagaggccggaagacagaggcgctttttcctgtggggactgctcccgggtggtcacatctcctgttctcaagaggcacctgcaggtcttcctggactgccgctcaagaccgcagtgcagagtgaaggtcaagctgttgcagcgcagcatttcctctctgctgagtttgccgccagtgaagatgggagctacgaagtgaagagtgtcctcggaaagaagtgggg

SEQ ID NO: 186056 - DNA, 2152 bp, Homo Sapiens
  misc_feature (348)..(383): n is a, c, g, or t
ttggctacatttcctgagagcatagaacatccacttgctcggagggttaggagcgacccacctagtacaggcaaccatgttggccttccaatatatatccctgctttttctaatggtaccaatagttactcctcttccaatggtggttccacctctagctcacctccagaatcaagacgaaagcacgactgtgtgatttgctttgagaatgaggttattgctgccctagttccatgtggccacaacctcttctgcatggaatgtgccaacaagatctgtgaaaagagaacgccatcatgtccagtttgccagacagctgttactcaggcaatccaaattcactcttannnnnnnnnnnnnnnnnnnnnnnnnnnnnnnnnnnnggactcgtaaaggcatgggtataatggtaccccccagtaaacttcctaatgatttcttatgactgttatcaggctttattgggattaggctaaagttgttagtaaacttataaaaggctgctatggtaacactaaacctaagtggtctcttgtctattagtttggtttgaattattagtactatcctgtagacccagagacatagtttatataagaattgctaaagctgaagttcaacttggctgagtgaagataatcataggttgtgtgagcctatgaaaaagtgtatacgtctaagatttcaaaacaatgggtcccaaagcctaaccactttaagagtttatggagggtacttggcattacagacgattcatacacttccagtgctgccttctttacactgccagttttgacaaaacaggtttgttttttattttacaacaacatatgcctaattctgcaggattgcaagtaactttttaatgcattgtgattacttattggtaatgatagggctgatggcagtttactagatcactggttataatttgggacaaaaactgctacatcaactttcatctcgcccagagtgctcaaggctggtatgatcagtggatcaggaatgcaattgtgaattcctgcccattgcctctcttggtgaatgtggaaatggccacctgggttttcccatatcaggaagggctttgggatggcacctatattggctgataattgaggatgcaaacattccattcattagtgtgatcgagctgttaatttttagactatagatcaaaatgtgaaacattttatgttcaatccatatttgtcttgcacattataaatatatttttattttttagtaatttaggggagggaggagggagaaagggataatgatgcccttggcataattcacaaaagcagctgtgacaacctccaatcagtttacttcatttcaaaactatttccaatcacaaggaaagatttatttaaaatatactcgtacatttcacctgtggatgtctataacttcatcctcagtatgttcccaaatctgtgctggcattgaaaggacaaaacattatactagtgggtttttctactaattattttttgaagcattattttcccaacacaaaagagcttttttctcggtataatgaaaattgaaatcctatgtgtattcaatagtaaatagacaaattttattttttatttccacttgaagagttacatttcgtataaaagtttacaaataacggtttttattttgattttttcagtataaaaaaagttgccttgatggcatattatgatgtaatgctaattgcttgtaggatagtaaatggtcagtattgaaacctaatctctagctgccgtcttgtagatatgaacgaatgttcaccaagcatgtattttgtattttgttgcattgtacactgcaactaataagccaaggaatcgacatatattaggtgcgtgtactgtttctaaaaaccacaaactaagaatgataaattatcaatatagtttagtatttgctaattttactacactcttttgttatgtatatgtagggaagtcatagggattataaattcaatttgagtaaaatttaaaaccatatattttatgataaagggcctttaacttaagatggccaaagcactgatattatatatttgctgtaaagagaattataagagttttatttttctgatattaaaagttacttaataaagacttgtttccattaacttgaaaaa

SEQ ID NO: 186057 - DNA, 3589 bp, Homo Sapiens
ttggcacccttctgaatattttgcttgcctgttccaagattgttctaatgtttaattacactagtaaaatggctcaatttttgtggtgttgcagttttcacatacttactcttttattcttgtttaaatagcgtactctacaagaaactaataattatatcttgaaattattttgtatggaagtatatttagaaaagtggtttttgagccactgtcttgttcttgataagctttttgtgtgaaaaaaagttcattcttgagtgtgcaagtccttttgccaagaattccaattattctgtaacattagagcacaatataattgtagacattctaagcatctgtccgtgtagtctaccaattgcacaaggaaggcatgttagccctccagattgaaaatgtatgtgacctcttgaactgaagttagattcccaaccattcaaaatgttggcagctgatcacatttacttctgataaaagtaatgtgtaagtaaggttaatcttctttcataatgccttatgacaagcaggtgctgcttcatgaaacgtcattgtatagcccatttcatgtatcattacattgttgctgttatttaatgagtgcattatttctctttttaagttggccttaggtatatgtcattgtggcatgcagagggttatgacgattttaaatattaggatttttagagcacataacattagctattttatggatttcaaaagtctcaaaacagttgtagattaaaactgttagttacctttcacatttccaaactatgtgcataaaatagaataaatgcagtatagaactatgctaaccaaaattaataggttaagggtattttattttaaatcctgtagtaattggggaaatgagaagattattattttatacatgagttcattaagatcagaaatacaaaatgtcctgtattttgcagttttgttaagtcttccattcgttttaggattagtctgcaagtcaaagaaagtcttgttaccttaaattatatgaaaactgtcattttaaatcttttaatatttacagttttcaaaaaccttacttggaaattgctttgaaacaaacaagctaacctttgaaacttaggaaaaaatcttgaaagttaggaaaaatatttgagaaatatgacgagcacaatctgtgtgttacacacatttagtttttatactgcatatgtggtaaatgtgtcacattttccagtaaaatgtatcagaaatcaatgccttctgaatttcaaaatgattcttagaaataagatattgtacaactctagcaaacatacaaagtacagctaaatcttaatatatttcactatgtaaaaggctgaaacttcataattatctgttccttctatctttttttgagtcaaaaagtctattaaatttttctgttgttgttccaactttggtgaaaaaggttatggcaatactttaactttgttttgttacattgtttttgttcttggaatggctcacaagcagaatttaaaaggcagattttcattaactataaatggctgaaaaaactgaatttactatctagctacagaaattatttttctatggtgtgaaactgttcccagacatccctaagaacttttacaaattattataaatttgtcacacctaggtcagcgattaaaatagtgttttgcaaatggaattttaattaactcaaaatgaattaagagtgcattttaaaaatcacaagtgagactttgatgttttggccccccagccaaaacttaatggtcataaatgaattttatctacaaaatctctttaaatttggctggttgccttgtcatatgtaatttcactattttccaaggaaatatataggaagcaattatgaaactgagaatagttttatatagaattcttttatttactgataatgcattaacatttttattgaaatgcaatggaatatgtgccaaaacacgtgaaaagcttacataaagaaaggcatcagttgtcgtttggagaaaggtacacatttttttgatggtcctaagtgatatggtattactactagaatcacagatttcttcaactgacttattttggtatattcaactacagctttctaaggataggactactttcatgtctagtaatacactgtattccccgttaattatcccttaagtcagattgtagaatttgcaagaaactaggtatagaaaaaatgtacaggcaacttttgtggttagctttataaatttagggtgcttataaaatgataaaatgaattctttaaataacctataggaatcatctgaatctgtaacatcagagactaaaactaaaagttttctttaatctgttgtttcttaagcaataaactgaaagacctttacttccataaaagattttgttatctcttttatctgccttagaaattataagtataaaagggtcaagggaacttagatataaagaatgactgtggtttataaacattactttaattgaagtaatcacatcagttaatagagaaatcaaaatatgtatggccttttctctagattagcaaaacagctttacaaagtatgaaaaaataaactaaaatgctcattgatgaggtaatactcagtctggagtacaggtaacttgggtaatgccttttaactactcttagaggagtatattatttctttatacattaaacatctatcccatagtaatgtgccacattttataaacgtaatgactttgctcaactacattacacactcaaatgtaatctaaatttaaactgattatttaaagaaaaaaagtgtgttatataatattgtgaactgtttagctttactgaaatatttaagagaaagtgcctcattactaaagtgcatttctgttttaaatttactgcataaagtttgagttatctgtacctgtctcttatgaatggtttcatatctaaataggctcttgtaagttaatttttttggaagattttcataagaatatagatatcaccaaagacattttacagtaaattaataaccatgttggagagacggttttaacagtttggaggttggaaatttttagattgcaatttaattttatatagttaggcaataaccttgattaattgctaaaatatcaccaaagaaaggctttaaactgaattttcttggtgagatcagtcaaatgcaggcttttcttgcaataatcagaacacacttcctttcaaatatgttcattgtttttcagcatcatctaacagatcttagtaaatctaaatcctcaaagatgagaaagaggtaaacacaacaaatagccttcctctgcatgaaaagtgagagaaatacatactttgaaaagaaagttcagatttttaatttgagagggtttttatttcatggaggcagtgttaactaaaattaagcttagatttagctcctgtattattcataatatgagaaattttattaaaggcagactttggtaaaagtgccaacacacttacttgtatagaaaagacttcattctatgggatttatataagtaagtgctttctctatattcaaaatatttcataaggacctgtggtttt

SEQ ID NO: 186058 - DNA, 959 bp, Homo Sapiens
gtacaaaaaagttggctgagaggcaggaggcactagggatcgtccgcaggattgggactgatacagaggccgccacggagcccgccggagccaccgttcctgctgctgccgccgctgcccgaatcggaaccgtcgggccgcagccgccggcaatgccgcgaaggaagaggaatgcaggcagtagttcagatggaaccgaagattccgatttttctacagatctcgagcacacagacagttcagaaagtgatggcacatcccgacgatctgctcgagtcacccgctcctcagccaggctaagccagagttctcaagattccagtcctgttcgaaatctgcagtcttttggcactgaggagcctgcttactctaccagaagagtgacccgtagtcagcagcagcctaccccagtgacaccgaaaaaataccctcttcggcagactcgttcatctggttcagaaactgagcaagtggttgatttttcagatagagaaactaaaaatacagctgatcatgatgagtcaccgcctcgaactccaactggaaatgcgccttcttctgagtctgacatagacatctccagccccaatgtatctcacgatgagagcattgccaaggacatgtccctgaaggactcaggcagtgatctctctcatcgccccaagcgccgtcgcttccatgaaagctacaacttcaatatgaagtgtcctacaccaggctgtaactctctaggacaccttacaggaaaacatgagagacatttctccatctcaagatgcccactgtatcataacctctcagctgacgaatgcaagtgagagcacagagccgggataagcagatagaagaaaggatgctgtctcacaggcaagatgacaacaacaggcatgcaaccaggcaccagcaccaacggagaggcagcttcgatataagaaaaagtggctgaactcagaagaaaa

SEQ ID NO: 186059 - DNA, 1500 bp, Homo Sapiens
tttgtacaaaaaagttggcagctgtattctgcaaaagctggaaaaatagaaaactttaaagaatgagaaaacactattactttagactttggggtggaatgctggataagtgatatttttcactagctttcctccgattttaaaggagccatattggattgttcttcatgatcgaattgtgagtgtcatcagcagccccagcttgacgtctgaaacagagtgggttggctatccattccgcctctttgatttcactgcctgtcatcagtcctactctgagatgagttgtagctatacgttagctcttgcacatgctgtgtggcaccattctagcatcggacaactttctctcattccaaagtttcttactgaagtacttcttcctatagtgaagaccgaattccagttgctttatgtataccatcttgttggaccatttttacaaagatttcagcaagagagaactcgttgtatgatagagattggtgtggcgttttatgacatgctgctgaatgttgaccagtgtagcacccatttaaattacatggatcccatctgtgacttcctctatcacatgaagtatatgtttactggtgacagcgtgaaagagcaagtagagaagattatctgtaacttaaaaccagctttaaaacttcgtcttcgattcatcacacacattagcaagatggagccagctgcagtgcctccacaagccatgaacagtgggtctccagcacctcagtctaatcaggtgcccgtgtctttaccagtaactcagtgaagccagactgtactgtggagaaagtagaaatatatccgtctttgagagtggactcaaaccttttaaatctgaatgcgatcacactgtagtgatatagtagaagcagtgatgatattcagattgttttattttgattcaaatgatgaatctgttgacaccttataactcccatctccctatctatatttttgtctctaagagatcaagtaagatacatgttgttcatattcataacaacttattagagctatgtaggaacatagaggtatctgtgatcaaatgacttgtcattggcactttcagtctttcctattctagccgttgtttttgtttgtattttttattattaatgacatatttagtcttcagatatattattttaaaggcaccacacatgtaaaacagttattacaaatattttatacataaatctcttggtagattttcagaataatagagatttatatcaagaaaaggaatctagattttgttgcattgtaggagcaaacaaggcttcatattctttttaaatgacttgaattttattataaatttccatagtttctatcaaggtcaactggcagttttattacctttgctatgggacttgaactttactgtataaaattagtttggaagcctgtaaggaaaataacattctgaaaatttattgaacttaaaatcatgctaaatgggttgattccccaatttcttttttt

SEQ ID NO: 186060 - DNA, 1578 bp, Homo Sapiens
  misc_feature (64)..(82): n is a, c, g, or t
ttggcaacattctgccatcaaaatatattcattttattaacttaccgattattgggaacctgcnnnnnnnnnnnnnnnnnnncacacatgctgtctgcagccactgtttggttatttttgatagtttaagagaattataaatcaagttgttctgtctactagagtcagaaattctgtgctagaatgggacttctaaaattaggtggtcctgtcactttctagagaaagacccaaattcataggtttaagtggcttgtctgacatacacatacagccagttagtaacagaattcaaaatagaatagagttcttttttttctgtcagtccgttgttctacttctctttccttttcttcatggttgagcagcttttggcaaaatgtgttccatatagcagtagttccaagagatgttaatagatgtaagaaaaaaagtgtgtgtgtgttgggggtgggggattgcatggtcaattaaaatgaaggaatgctgagtttgtttccttactgtaggacttctaagagttttgaacatgctattacacattgtgaatttataaaaggggacaaacactgtttgaccttagactgcactccccttctttattcctcagagcatctcaaaggactacagggtcctttgagaaacatggcccttgatcaagtttacaactctttgagaagacatccctaatggaaatactgaatggcagatctattactgtggtaccatgtagtgtgtaataaatcttgaagtccagaaagcaagtatatttgctgtttagagctatacttaaggtatagagattcttttccacctgtggtgtgtaaaatcagtattgtgtttaattttgcaggtttttcaaggatcaactaatgtgcaaatacagtggtgatatattgatattacattttaataatgcttttgtatggcactttatagttttcagacaccttttgtaacagccctgtgagacagacaatattatccttattgtacagatgggggggctctggaggctctgaaaagtttttggtgatattcccctaagtttataccacaaaatgatggagccagaatttagttgcagaacttctgactccaagtccagagttctttactagacatctggtttcttactagctttttgctagctttttattttacagtgaaaagtatggaagcaaatcctgataattttggcttattatcaaatatcatttattttttattgcagagacccagcagatgtaactctcattgtagccatcccaaagaaaacccttctttgccctttgcagtgccacttatttaggtaactgaagtgtatttccagtacaatttgattttgaactaagatttgatatagagttgtaattgcttacataactctttgaaaatgtatcatccctgggttctcaggtgaaggaggcaattcaaaagtaaaaaagaatattcgaatacaataaataccctctgttctcacacaaatgctgtttcttaacttgctttgacaacctactgatgtaacttctttattaatgtgaaatatttatattttgaaataaaattactagtgtt

SEQ ID NO: 186061 - DNA, 3403 bp, Homo Sapiens
gccaactttgtacaaaaaagttgggaaacatccacgtttgcaagagttcattattttaaaccttgtgatggttgggctggtgagcaggttatgggttctctataaaggtgtcttaaaaaggttgattttgttatatgagcctttgtttggattgcttcaagaggtcgctaggattcaaccaatgccttacttcaaagattttacctttccttctgatatcactgaatttttaggacagccatattttgaagcctttaagaaaaaaatgcctatagcttttgcagctaaaggaataaataaattgctaaataaactgtttttaataaatgagcagtcaccaagagccagtgaagaaaccttgcttggaatttcaaaaaaagctaaacaaatgaagatcaatgtacagaataatgtggatcttggacagccagtaaagaataagagagtcttcaaagaagagtcatcagaatttgatgtgagggctttctgcaaccagctgaaacacaaagctactcaggagaccagttttgattttaaatgttctcaatccagactaaagacaaccaagtattcttctcagaaagtgataggaactcctcatgccaaaagtattgtgcaaagattccgagaggctgagtccttcacacaactttctgaagaaatccagatggcagttgtatggtgcaggagcaaaaaactcaaggctcaggccatttttctgggtaacaaacttcttaaaagcaaccggcttaaacatctggaagctcaaggtactagtttgccaaagaaactagagtgcataaaaacgtctatttgcaaccaccttcttcgtggctcaggtatcaaaacttcaaagcatcatctgagacagagaagatcacagaataaatttttacggagacaaaggaaaccacagagaaagttgcagtcgactcttttaagggaaattcagcagttctctcaagggactcggaagagtgctacagataccagtgctaagtggagactctcacactgtactgtgcatagaactgatctctaccctaacagtaagcagctcttgaatagtggagtttcaatgcctgtcatacaaactaaggagaaaatgattcatgaaaatcttagaggcatccatgaaaatgaaactgattcgtggacggtgatgcaaataaataaaaacagtacatcaggaaccattaaggagacagatgacattgatgatatttttgctttaatgggagtttagatgttcgttcatatgtgagacttttaagtgattaacaaggctagttcagtgttctaagtagaactgctaagatctggaagtaccacctggactcacagaggagctgctttagtgcagcattgcacaggagttcatttcagttcagtctacatttaaagtagcattgtgtcatttcatcaacaagtatttctttttttggcttcaactacatgtcaggtgttaatatgaaaaatctgccacagcctacccttgagaagcagatgtaattccttgagtgaggctagtaagtctctgaaaaactgaataattttatgacttactaggcaatttaataatcgtttgcaaaaaccattgtgtcttgaggtaaatgaggagcgggggtgggagatagcaaggaaacacctgaaaggtcaatttggtcttattggctccattatacataggtccgcctctgaatactaaagtttgtagctcctgacatttatgttttcttgtttatatgttggaattgatcaacaaggtttgccactgcttgtattaccagggactggttacaaccattatttctcttcatttgcttggcttatctcatattaaagtgagtttggagttctccaaaacgttttaattttatttatttgggtaccagtgattgattctaaataaacctttttacaaaaaggcaataaggtggtttatggttacatatgaaatataataggataacaggtagatgagaaagtaaaatgaaaaaatgaggttaggagatacaaagtagacccaggaatgaggctagaacatttataatttggtgttgatgctgtcatctgataggggatgttgctcgtactgttgctctgaggggagtacatcttgagtattttcaaataatgatgtgaagtttgaggtaggtatctttccaatgttctaactttactagaattaggttattaagcttctctagtgcccttaacttttgttacatagagatttaaagaaaaagaaagtagtaccttagtatgtaccgcatccttcttttcctcagccaccctatcataacagaagttatttcccttccattctttatttggctttgttctttccctgtctgccttctccattttctcagttatctctaccagtggttctcaaactttagactttttgagaatcacctggtgggttgctaaaagatgcagattagccctttcccagagactgataaacaggggccagaaacctgcatttttaacatggagcccaagtgattttgatccaggtggcccccaaatccagttatataaacactactttagcttctctcctgaagccttaagtaaactggtttaattcttaatctgtagtcagttttcatattccttttggctttctaccaagtggtagtatccatttagtgccttaaaatacagacaataccaaggagatttcattctagacaagtctagaaatggccattaacttctaagtgtccttgtgttcaatgaatatcctttacctattgggaaatagaaggtaaattagtaagagaactggtgtatagctttgtggaccatagggcttatttgctgagagttgtctatattcatgcacccagtcccctaagtagcctcttttaatacttcatttagctgattcagaaaaaaactccctgggaattaggagatttaaggttcagtcttgcttctcctacttgtggcttcactgagctagtcagtttcctcaggcttaggtttctggatttgaagtggaattttttcaagaatgaaacttttatagctgaaataaactttggagcttatctttcattggaaaaaccagggtggttcagtgagttaaggacaatatagcatggactgggctgccagtctagcatttgtttccaaattcattcatgttcttttggagtatcttcatctcctctcattttcccatcttctgccctttactattctgggaaaatggcaaaaaagcttcacatgtgtccacaaaatgacaatttgtatgtttataaggaattcagtattctgtatcagttactttttccaaataaatccaaatatttaacatttaaaaaaatgcaatctaaagtataccaaactgtaacttacctagtaaatgagattagaaactatccaa

SEQ ID NO: 186062 - DNA, 1104 bp, Homo Sapiens
  misc_feature (171)..(252): n is a, c, g, or t
ttgggcctgtgtccctgtccttcaggcccatcagtcctggggctttttctttatcaccctcagtcttaatccatccaccagagtctagaaggccagacgggccccgcatctgtgatgagaatgtaaatgtgccagtgtggagtggccacgtgtgtgtgccagtatatggcnnnnnnnnnnnnnnnnnnnnnnnnnnnnnnnnnnnnnnnnnnnnnnnnnnnnnnnnnnnnnnnnnnnnnnnnnnnnnnnnnnaataagtcggacttattaactctgagtgccttgccagcactaacattctagagtattccaggtggttgcacatttgtccagatgaagcaaggccatataccctaaacttccatcctgggggtcagctgggctcctgggagattccagatcacacatcacactctggggactcaggaaccatgccccttccccaggcccccagcaagtctcaagaacacagctgcacaggccttgacttagagtgacagccggtgtcctggaaagcccccagcagctgccccagggacatgggaagaccacgggacctctttcactacccacgatgacctccgggggtatcctgggcaaaagggacaaagagggcaaatgagatcacctcctgcagcccaccactccagcacctgtgccgaggtctgcgtcgaagacagaatggacagtgaggacagttatgtcttgtaaaagacaagaagcttcagatgggtaccccaagaaggatgtgagaggtgggcgctttggaggtttgcccctcacccaccagctgccccatccctgaggcagcgctccatgggggtatggttttgtcactgcccagacctagcagtgacatctcattgtccccagcccagtgggcattggaggtgccaggggagtcagggttgtagccaagacgcccccgcacggggagggttgggaagggggtgcaggaagctcaacccctctgggcaccaaccctgcattgcaggttggcaccttacttccctgggatccccagagttggtccaaggagggagagtgggttctcaatactgtaaccaaagatataaatctccctaggtgtacaaatatttttta

SEQ ID NO: 186063 - DNA, 956 bp, Homo Sapiens
  misc_feature (595)..(676): n is a, c, g, or t
ccaactttgtacaaaaaagttggccagaatctaggattctctccctggctgacaggtggggagaccgaatccctccctgggaagattcttggagttactgaggtggtaaattaacttttttctgttcagccagctacccctcaaggaatcatagctctctcctcgcacttttatccacccaggagctagggaagagaccctagcctccctggctgctggctgagctagggcctagccttgagcagtgttgcctcatccagaagaaagccagtctcctccctatgatgccagtccctgcgttccctggcccgagctggtctggggccattaggcagcctaattaatgctggaggctgagccaagtacaggacacccccagcctgcagcccttgcccagggcacttggagcacacgcagccatagcaagtgcctgtgtccctgtccttcaggcccatcagtcctggggctttttctttatcaccctcagtcttaatccatccaccagagtctagaaggccagacgggccccgcatctgtgatgagaatgtaaatgtgccagtgtggagtggccacgtgtgtgtgccagtatatggcnnnnnnnnnnnnnnnnnnnnnnnnnnnnnnnnnnnnnnnnnnnnnnnnnnnnnnnnnnnnnnnnnnnnnnnnnnnnnnnnnnaataagtcggacttattaactctgagtgccttgccagcactaacattctagagtattccaggtggttgcacatttgtccagatgaagcaaggccatataccctaaacttccatcctgggggtcagctgggctcctgggagattccagatcacacatcacactctggggactcaggatccatgcctcttccccaggccctagcaagtctcaagaacacagctgcacaggccttgacttaaagtgacagccggtgtcctggaaagcccccagcagctgcccc

SEQ ID NO: 186064 - DNA, 1508 bp, Homo Sapiens
ctttgtacaaaaaagttgggctacatggacctcgatgggcttcagctaccaggtggccaatggcatggagtttctggcctccaagaactgcgtccacagagacctggcggctaggaacgtgctcatctgtgaaggcaagctggtcaagatctgtgactttggcctggctcgagacatcatgcgggactcgaattacatctccaaaggcagcacctttttgcctttgaagtggatggctccggagagcatcttcaacagcctctacaccaccctgagcgacgtgtggtccttcgggatcctgctctgggagatcttcaccttgggtggcaccccttacccagagctgcccatgaacgagcagttctacaatgccatcaaacggggttaccgcatggcccagcctgcccatgcctccgacgagatctatgagatcatgcagaagtgctgggaagagaagtttgagattcggccccccttctcccagctggtgctgcttctcgagagactgttgggcgaaggttacaaaaagaagtaccagcaggtggatgaggagtttctgaggagtgaccacccagccatccttcggtcccaggcccgcttgcctgggttccatggctccgatctcccctggacaccagctccgtcctctatactgccgtgcagcccaatgagggtgacaacgactatatcatccccctgcctgaccccaaacccgaggttgctgacgagggcccactggagggttcccccagcctagccagctccaccctgaatgaagtcaacacctcctcaaccatctcctgtgacagccccctggagccccaggacgaaccagagccagagccccagcttgagctccaggtggagccggagccagagctggaacagttgccggattcggggtgccctgcgcctcgggcggaagcagaggatagcttcctgtagggggctggcccctaccctgccctgcctgaagctccccccctgccagcacccagcatctcctggcctggcctgaccgggcttcctgtcagccaggctgcccttatcagctgtccccttctggaagctttctgctcctgacgtgttgtgccccaaaccctggggctggcttaggaggcaagaaaactgcaggggccgtgaccagccctctgcctccagggaggccaactgactctgagccagggttcccccagggaactcagttttcccatatgtaagatgggaaagttaggcttgatgacccagaatctaggattctctccctggctgacaggtggggagaccgaatccctccctgggaagattcttggagttactgaggtggtaaattaacttttttctgttcagccagctacccctcaaggaatcatagctctctcctcgcacttttatccacccaggagctagggaagagaccctagcctctctggctgctggctgagctagggcctagccttgagcagtgttgcctcatccagaagaaagccagtctcctccctatgatg

SEQ ID NO: 186065 - DNA, 1062 bp, Homo Sapiens
  misc_feature (711)..(792): n is a, c, g, or t
actttgtacaaaaaagttggcaagtacaggggccgtgaccagccctctgcctccagggaggccaactgactctgagccagggttcccccagggaactcagttttcccatatgtaagatgggaaagttaggcttgatgacccagaatctaggattctctccctggctgacaggtggggagaccgaatccctccctgggaagattcttggagttactgaggtggtaaattaacttttttctgttcagccagctacccctcaaggaatcatagctctctcctcgcacttttatccacccaggagctagggaagagaccctagcctccctggctgctggctgagctagggcctagccttgagcagtgttgcctcatccagaagaaagccagtctcctccctatgatgccagtccctgcgttccctggcccgagctggtctggggccattaggcagcctaattaatgctggaggctgagccaagtacaggacacccccagcctgcagcccttgcccagggcacttggagcacacgcagccatagcaagtgcctgtgtccctgtccttcaggcccatcagtcctggggctttttctttatcaccctcagtcttaatccatccaccaaagtctacaaagccagacgggccccgcatctgtgatgaaaatgtaaatgtgccagtgtggagtggccacgtgtgtgtgccagtatatggcnnnnnnnnnnnnnnnnnnnnnnnnnnnnnnnnnnnnnnnnnnnnnnnnnnnnnnnnnnnnnnnnnnnnnnnnnnnnnnnnnnaataagtcggacttattaactctgattgccttgccagcactaacattctatagtattccaggtggttgcacatttgtccagatgaagcaaggccatataccctaaacttccatcctgggggtcagctgggctcctgggagattccagatcacacatcacactctggggactcaagaaccatgccccttccccaggcccccagcaagtctcaagaacacagctgcacaggccttgacttacagtgacagccggtgtcctggacagcccccc

SEQ ID NO: 186066 - DNA, 1465 bp, Homo Sapiens
ttggctaacggctaatggtcgatttgaagtgggcaagaaaatctgtttgagcatctcaggccatcatcctgaaacttggcagccttcgtggagtataaggacagcattattagccatcattgggtttatgccaacaaaaggagagggagccataggttctctagattacactcctgaggaaagaagagcacttgccaaaaaatcacaagatttctgttgtgaaggatgtggctctgccatgaaggatgtcctgttgcctttaaaatctggaagcgattcaagccaagctgaccaagaagccaaagaactggctaggcaaataagctttaaggcagaagtcaattcatctggaaagactatctctgagtcagacttaaaccactctttttcactaactgatttacaagatgatatacctacaacattccagggtgctacggccagtacatcgtacggactccagaattcctcagcagcatcctttcatcaacctacccaacctgtagctaagaatacctccatgagccctcgacagcgccgggcccagcagcagagtcagagaaggttgtctacttcaccagatgtaatccagggccaccagccaagagacaaccacactgatcatggtgggtcagctgtactgattgtcatcctgactttggcattggcagctcttatattccgacgaatatatctggcaaacgaatacatatttgactttgagttataatatggttttgtgacttatgagctgtgactcaactgcttcattaaacattctgcattgggtataatctaagaattgtttacaaaaagattattttgtatttacccttcattcctttttttgatccttgtaagtttagtataaatatatctagacattcagactgtgtctagcagttacgtcctgcttaaagggactagaagtcaaagttccttgtctcactatttgatctgctttgcagggaaataacttgttttttctcatgtttcatcttctttttatgtaaatttgtaatactttcctatattgccctttgaaatttttggataaaagatgatgttttaagttccaatgagtattactagttactcaataccacttattgagtactctgtttctacgtatgtagaatgtatagggatagaagagttgaaaagggaaagcaaaactcctcaagtagcttccttaaaatgtcattcataggagatgtactggaattgctcattctgtgactttatttgtgtcctaaacattcttcagtgaaaataattttatttcagtcaaacatttatgaggaaatgagatcacatctttgtcactggatgctacttgaagagggagtactttgtaaccactttgatatgctgttatcaacaccccctgccctctgctgccataatcacacaatttaaaaagaaagaaaacagtcttccatagatttttacgaagaaagggccc

SEQ ID NO: 186067 - DNA, 1079 bp, Homo Sapiens
agcaatgcttttcctataaaagccaactttgtacaaaaaagttggcaagaaagaattttcagtggaaaaatcaatatataacttagtgctagctagcgccacagactctagtagataatattatcatcataatggctggtgaaaccatataatcacagaaaaacattgccttcagcatgttcagttcgcagcactgagggcactcttgagggtgttgttaatgaagatttaatttttaaatacaggtggttccaagctttcaaataggttatgctccaaaagtgttatttgtaagttaatttttttacaagtcaaacaatgttggaagtggtatttaggttctagatcggtccacgaaagttagcccatatgtatatcttgaatagtataggggagggtattcataaagtccttatgtggttttaactaagtgaaattatggacaagagaaataattgtaaaatcgtcttaaaggaaaatttaatttttactcctgtttatgggacattcgttctattaactgtcagacacaatttctgttttcatctgagagccagttttcctttatttctacatctaaaataagaacatattgtacactattatataatacagaattgtcttaaactttaataaattcgcattttaaaggtgtttacagattattttttatatctgtagctgaatttgttaaagtctaaaaagctcaaggactttatgaagatctcattatatgaggaaaatcataggttaccattttatactctattgccataagaaaatacactctaaaatcttgatttgaaacatattagaaaccttgattcagtgctcagtggtctcctagtaagaagtcaccgacggtagcgtcatatgagaagaaagaaatccccaccacctcaacctctgctgagattgtgtgctaggaacagccttccctccgtttcccctcagtcaaacttgagccagcctctggatcgatgtgatcttattgcatgtttccatggggtgtacctatactttaagccaatcctgctgcattcactgctaagttaaataaaaagccaagaagattttgc

SEQ ID NO: 186068 - DNA, 1539 bp, Homo Sapiens
gccaactttgtacaaaaaagttggctgattgtcatcctgactttggcattggcagctcttatattccgacgaatatatctggcaaacgaatacatatttgactttgagttataatatggttttgtgacttatgagctgtgactcaactgcttcattaaacattctgccttgggtataatctaagaattgtttacaaaaagattattttgtatttacccttcattcctttttttgatccttgtaagtttagtataaatatatctagacattcagactgtgtctagcagttacgtcctgcttaaagggactagaagtcaaagttccttgtctcactatttgatctgctttgcagggaaataacttgttttttctcatgtttcatcttctttttatgtaaatttgtaatactttcctatattgccctttgaaatttttggataaaagatgatgttttaagttccaatgagtattactagttactcaataccacttattgagtactctgtttctacgtatgtagaatgtatagggatagaagagttgaaaagggaaagcaaaactcctcaagtagcttccttaaaatgtcattcataggagatgtactggaattgctcattctgtgactttatttgtgtcctaaacattcttcagtgaaaataattttatttcagtcaaacatttatgaggaaatgagatcacatctttgtcactggatgctacttgaagagggagtactttgtaaccactttgatatgctgttatcaccaccccctgccctctgctgccataatcacacaaatttaaaaagaaagaaaacagtcttccatagatttttaaggaagaaagggcccaagccaggagatcgcttggttttcttccagaagttaaatggggggatctgaagatttgaatgtttggtctgctttgaaatgtatgtcttttgggatgtattatatgcctagctttataatcagtataaattttaattattccaggaatatgcataatattgaaatatttcatgtcctattttaatagaaaacctcagggcccaagtaacagtgatagaagttagaaaaacctttacttagaattgtccacctagtcagagcccaagaaagaattttcagtggaaaaatcaatatataacttagtgctagctagcgccacagactctagtagataatattatcatcataatggctggtgaaaccatataatcacagaaaaacattgccttcagcatgttcagttcgcagcactgagggcactcttgagggtgttgttaatgaagatttaatttttaaatacaggtggttccaagctttcaaataggttatgctccaaaagtgttatttgtaagttaatttttttacaagtcaaacaatgttggaagtggtatttaagttctagatcggtccacgaaagttagcccatatgtatatcttgaatagtatagggagggtattcataaagtccttatgtggttttaactaagtgaaattatggacagagaaataattgtaaatcggtcttaaa

SEQ ID NO: 186069 - DNA, 934 bp, Homo Sapiens
  misc_feature (369)..(385): n is a, c, g, or t
  misc_feature (713)..(735): n is a, c, g, or t
  misc_feature (811)..(825): n is a, c, g, or t
tttgtacaaaaaagttgggtaaaaaatatataccgggggtgttaatcggtgtaaatcgctgtttggatttcctgattttataacagggcggctggttaatatctcacacagtttaaaaaatcagcccctaatttctccatgtttacacttcaatctgcaggcttcttaaagtgacagtatcccttaacctgccaccagtgtccaccctccggcccccgtcttgtaaaaaggggaggagaattagccaaacactgtaagcttttaagaaaaacaaagttttaaacgaaatactgctctgtccagaggctttaaaactggtgcaattacagcaaaaagggattctgtagctttaacttgtaaaccacatcnnnnnnnnnnnnnnnnnataagcaaaaacgtgccgtttaaaccactggatctatctaaatgccgatttgagttcgcgacactatgtactgcgtttttcattcttgtatttgactatttaatcctttctacttgtcgctaaatataattgttttagtcttatggcatgatgatagcatatgtgttcaggtttatagctgttgtgtttaaaaattgaaaaaagtggaaaacatctttgtacatttaagtctgtattataataagcaaaaagattgtgtgtatgtatgtttaatataacatgacaggcactaggacgtctgcctttttaaggcagttccgttaagggnnnnnnnnnnnnnnnnnnnnnnngccatccatcctgtgcaatatgccgtgtagaatatttgtcttaaaattcaaggccacaaaaacaatgtttgggggnnnnnnnnnnnnnnntcatgccagctaatcatgtcaagttcactgcctgtcagattgttgatatataccttctgtaaataactttttttgagaaggaaataaaatcagctggaactgaacccta

SEQ ID NO: 186070 - DNA, 1546 bp, Homo Sapiens
  misc_feature (365)..(471): n is a, c, g, or t
  misc_feature (573)..(586): n is a, c, g, or t
  misc_feature (982)..(998): n is a, c, g, or t
  misc_feature (1326)..(1348): n is a, c, g, or t
  misc_feature (1424)..(1438): n is a, c, g, or t
tgtacaaaaaagttggcttttaaagatttctgtataagactgttgagcagtttttaaaatagtgtaggataatataaaaagcagatagatggcgctatgtttgattcctacaacgaaattatcaccagctttttttcattcttaactctttaaaggattcaaacgcaactcaaatctgtgctggactttaaaaaaacaattcaggaccaaattttttctcagtgtgtgtgtttattccttataggtgtaaatgagaagacgtgtttttttccttcaccgatgctccatcctcgtatttctttttccttgtaaatgtaatcagatgccattttatatgtggacgtatttatactggccaaacatannnnnnnnnnnnnnnnnnnnnnnnnnnnnnnnnnnnnnnnnnnnnnnnnnnnnnnnnnnnnnnnnnnnnnnnnnnnnnnnnnnnnnnnnnnnnnnnnnnnnnnnnnngggagttgttgttacccacgccattttacgtctccttcactgaagggctagagttttaacttttaattttttatatttaaatgtaaacttttgacacttttnnnnnnnnnnnnnngacaagagagatgaaaacgtttgattattttctcagtgtatttttgtaaaaaatatataaagggggtgttaatcggtgtaaatcgctgtttggatttcctgattttataacagggcggctggttaatatctcacacagtttaaaaaatcagcccctaatttctccatgtttacacttcaatctgcaggcttcttaaagtgacagtatcccttaacctgccaccagtgtccaccctccggcccccgtcttgtaaaaaggggaggagaattagccaaacactgtaagcttttaagaaaaacaaagttttaaacgaaatactgctctgtccagaggctttaaaactggtgcaattacagcaaaaagggattctgtagctttaacttgtaaaccacatcnnnnnnnnnnnnnnnnnataagcaaaaacgtgccgtttaaaccactggatctatctaaatgccgatttgagttcgcgacactatgtactgcgtttttcattcttgtatttgactatttaatcctttttacttgtcgctaaatataattgttttagtcttatggcatgatgatagcatatgtgttcaggtttatagctgttgtgtttaaaaattgaaaaaagtggaaaacatctttgtacatttaagtctgtattataataagcaaaaagattgtgtgtaagtatgtttaatataacatgacaggcactaggacgtttgcctttttaaggcagttccgttaagggnnnnnnnnnnnnnnnnnnnnnnngccatccatcctgtgcaatatgccgtgtagaatatttgtcttaaaattcaaggccacaaaaacaatgtttgggggnnnnnnnnnnnnnnntcatgccagctaatcatgtcaagttcactgcctgtcagattgttgatatataccttctgtaaataactttttttgagaaggaaataaaatcagctggaactgaaccct

SEQ ID NO: 186071 - DNA, 1291 bp, Homo Sapiens
ttggctctctcatctcattctcccaggctggcatgggaccatttatttatggctcttgtcgaataagcagcagttgaataaatgagttgatacatttttataaatgattacatcttttttcttttctccctctatacatatagctttggagtttaacctttctgccaatccagaggcaagcacaatattccagaggaactctcaaacagatgctttggagtttaacccttctgccaatccagaggcaagcacaatattccagaggaactctcaaacagatgttgtagaaataagaagaagcaactgtacaaaccattgtgaccttggagatacctcatcatatcacacaaagagatgcagatagatctttgagcatacctgatgaacagttacactcatttgcggtttccaccgtgcacattacgaagaaaagaaatggaggtgggagtttaaataactattcctcctccattccatcgactcccagcaccagccaggaggaccctcagttcagtgttcctcccactgccaacacacccacccccgtttgcaagcggtccgtgcgctggtccaacctgtttacatctgagaaagggagtgacccagacaaagagaggaaagccccggagaatcatgctgacaccatcgggagcggcagagccatccccattaaacagggcatgctcttaaagcgaagtgggaaatggctgaagacatggaaaaagaaatacgtcaccctgtgttccaatggtgtgctcacctattattcaagcttaggtgattatatgaagaatattcataaaaaagagattgaccttcagacatctaccatcaaagtcccaggaaagtggccatccctagccacattggcctgcacacccatctccagctctaaaagcgatggcctatccaaggacatggacaccgggctgggtgactccatatgcttcagccccagtatctccagcaccaccatccccaagctcaacccgcccccctctcctcatgccaataaaaagaaacacctaaagaagaaaagcaccaacaactttatgattgtgtctgccactggccaaacgtggcactttgaagccacgacatatgaggagcgggatgcatgggtccaagccatccagagccagatcctggccagcctgcagtcatgcgagagcagtaaaagcaagtcccagctgaccagccagagcaagggccatggccctgcagtcgatccaaaacatgcgtgggaacgcccactgtgtggactgtgagacccagaatcctaagtgggcca

SEQ ID NO: 186072 - DNA, 1354 bp, Homo Sapiens
ttggctttttcttttctccctctatacatatagctttggagtttaacctttctgccaatccagaggcaagcacaatattccagaggaactctcaaacagatgctttggagtttaactcttctgccaatccagaggcaagcacaatattccagaggaactctcaaacagatgttgtagaaataagaagaagcaactgtacaaaccatgtatctactgagcgtttcagtcaacaatacagctcgtgttcgacaatattccttgatgacagcacagccatccagcattatcttacaatgacaataatatctgtgaccttggagatacctcatcatatcacacaaagagatgcagatagatctttgagcatacctgatgaacagttacactcatttgcggtttccaccgtgcacattatgaagaaaagaaatggaggtgtgggtttaaataactattcctcctccattccatcgactcccagcaccagccaggaggaccctcagttcagtgttcctcccactgccaacacacccacccccgtttgcaagcggtccatgcgctggtccaacctgtttacatctgagaaagggagtgacccagacaaagagaggaaagccccggagaatcatgctgacaccatcgggagcggcagagccatccccattaaacagggcatgctcttaaagcgaagtgggaaatggctgaagacatggaaaaagaaatacgtcaccctgtgttccaatggtgtgctcacctattattcaagcttaggtgattatatgaagaatattcataaaaaagagattgaccttcagacatctaccatcaaagtcccaggaaagtggccatccctagccacatcggcctgcacacccatctccagctctaaaagcaatggcctatccaaggacatggacaccgggctgggtgactccatatgcttcagccccagtatctccagcaccaccagccccaagctcaacccgcccccatctcctcatgccaataaaaagaaacacctaaagaagaaaagcaccaacaactttatgattgtgtctgccactggccaaacgtggcactttgaagccacgacatatgaggagcgggatgcctgggtccaagccatccagagccagatcgtggccagcctgcagtcatgcgagagcagtaaaagcaagtcccagctgaccagccagagcgaggccatggccctgcagtcgatccaaaacatgcgtgggaacgcccactgtgtggactgtgagacccagaatcctaagtgggcccagtttgaacttgggagtcctcatgtgtattgaatgctcagaatccaccacagtcttggcacccgcctttcccg

SEQ ID NO: 186073 - DNA, 3025 bp, Homo Sapiens
  misc_feature (430)..(742): n is a, c, g, or t
  misc_feature (746)..(774): n is a, c, g, or t
  misc_feature (1162)..(1251): n is a, c, g, or t
ttggcttgataatatgtttggttatttttgttttcattgcttttagtgtcagagatggctttggattccccgttctgtgtgctgctgtctggctcctgaacccagctgtagaggtgtgtgtcaatcccaactggtgaagtactgagaagaagctacacaaaaggcagcaaagtattagtaagtgtacctctgacattttaaccacctctgacttttccatggaatggacaagtagtagtctctgtcagagctacattttaaaggagaaaaagaaacgtgaagtcatgaactgtttatttatgctgttatttttgtgtttactcacctcatttatattgacttgtaaattagtaatttctgaactattatttatcaattcattgcctacatgtcagcaaacaaattttcttcttaataaagaatccagttnnnnnnnnnnnnnnnnnnnnnnnnnnnnnnnnnnnnnnnnnnnnnnnnnnnnnnnnnnnnnnnnnnnnnnnnnnnnnnnnnnnnnnnnnnnnnnnnnnnnnnnnnnnnnnnnnnnnnnnnnnnnnnnnnnnnnnnnnnnnnnnnnnnnnnnnnnnnnnnnnnnnnnnnnnnnnnnnnnnnnnnnnnnnnnnnnnnnnnnnnnnnnnnnnnnnnnnnnnnnnnnnnnnnnnnnnnnnnnnnnnnnnnnnnnnnnnnnnnnnnnnnnnnnnnnnnnnnnnnnnnnnnnnnnnnnnnnnnnnnnnnnnnnnnnnnnggtnnnnnnnnnnnnnnnnnnnnnnnnnnnnncgcatgggacgaaggtttcatgggtagaaaagcatataacaaggaaatctgttattatttatatattgtaatcaccaacagaaacgcgtcttctaacggcatatttccttgcattttggttctcatatttttgtaaaaaacaaagaaatgaaaacaaagtgcccttatggtactgttctgaactagaagatttgaatttcagggccactaggagagtttcctctgccccccttttaaaaaatgtcttcaggcctaacaaatgttaacatctattgttatgaattttttttccttccacagtgtgaccttggagatacctcatcatatcacacaaagagatgcagatagatctttgagcatacctgatgaacagttacactcatttgcnnnnnnnnnnnnnnnnnnnnnnnnnnnnnnnnnnnnnnnnnnnnnnnnnnnnnnnnnnnnnnnnnnnnnnnnnnnnnnnnnnnnnnnnnngtttccaccgtgcacattatgaagaaaagaaatggaggtgggagtttaaataactattcctcctccattccaccgactcccagcaccagccaggaggaccctcagttcagtgttcctcccactgccaacacacccacgcccgtttgcaagcggtccatgcgctggtccaacctgtttacatctgagaaagggagtcacccagacaaagagaggaaagccccggagaatcatgctgacaccatcgggagcggcagagccatccccattaaacagggcatgctcttaaagcgaagtgggaaatggctgaagacatggaaaaagaaatacgtcaccctgtgttccaatggcgtgctcacctattattcaagcttaggtgattatatgaagaatattcataaaaaagagattgaccttcggacatctaccatcaaagtcccaggaaagtggccatccctagccacatcggcctgtgcacccatctccagctctaaaagcaatggcctatccaaggacatggacaccgggctgggtgactccatatgcttcagccccagtatctccagcaccaccagccccaagctcaacccgcccccctctcctcatgccaataaaaagaaacacctaaagaagaaaagcaccaacaactttatgattgtgtctgccactggccaaacatggcactttgaagccacgacgtatgaggagcgggatgcctgggtccaagccatccagagccagatcctggccagcctgcagtcatgcgagagcagtaaaagcaagtcccagctgaccagccagagcgaggccatggccctgcagtcgatccaaaacatgcgtgggaacgcccactgtgtggactgtgagacccagaatcctaagtgggccagtttgaacttgggagtcctcatgtgtattgaatgctcaggaatccaccgcagtcttggcacccgcctttcccgtgtgcgatctctggagctggatgactggccagttgagctcaggaaggttatgtcatctattggcaatgacctagccaacagcatctgggaagggagcagccaggggcagacaaaaccctcagaaaagtccacgagggaagagaaggaacggtggatccgttccaaatatgaggagaagctctttctggccccactaccctgcactgagctgtccctgggccagcagctgctgcgggccaccgctgatgaggacctgcagacagccatcctgctgctggcacatggctcccgtgaggaggtgaacgagacctgtggggagggagacggctgcacggcgctccatctggcctgccgcaaggggaatgtggtcctggcgcagctcctgatctggtacggggtggacgtcatggcccgagatgcccacgggaacacagcgctgacctacgcccggcaggcctccagccaggagtgcatcaacgtgcttctgcagtatggctgccccgacgagtgcatgtagtatctgttttatttgactgcagtctccttggtgcaaaaacaaaatgggaaaaataaggataactcagaatttcaaaaggaaatcacaaattcagctagtaatagcattttcagtacttttcgtaaactaagtaaatacacaaaatgttgatttttctgaccataagacatattttatgtccttttgccgaggtggatgtgttagtctcaggccctcctggccacattgcccaagtcacacaggcttctgtattatgtatttagataaaatgtgtgaaaatatatttgaaaaaaagttc

SEQ ID NO: 186074 - DNA, 1775 bp, Homo Sapiens
ttggagaaaatgtacctttttaaaaggtaattgtgagctgtctataggaccctgcaagccactacccaatttttgaagccattcctcctcctgttccacacaggtttccaccgtgcacattatgaagaaaagaaatggaggtgggagtttaaataactattcctcctccattccatcgactcccagcaccagccaggaggaccctcagttcagtgttcctcccactgccaacacacccacgcccgtttgcaagcggtccatgcgctggtccaacctgtttacatctgagaaagggagtgacccagacaaagagaggaaagccccggagaatcatgctgacaccatcgggagcggtagagccatccccattaaacagggcatgctcttaaagcgaagtgggaaatggctgaagacatggaaaaagaaatacgtcaccctgtgttccaatggcatgctcacctattattcaagcttaggtgattatatgaagaatattcataaaaaagagattgaccttcagacatctaccatcaaagtcccaggaaagtggccatccctagccacatcggcctgcacacccatctccagctctaaaagcaatggcctatccaaggacatggacaccgggctgggtgactccatatgcttcagccccagtatctccagcaccaccagccccaagctcaacccgcccccctctcctcatgctaataaaaagaaacacctaaagaagaaaagcaccaacaactttatgattgtgtctgccactggccaaacgtggcactttgaagccacgacgtatgaggagcgggatgcctgggtccaagccatccagagccagatcctggccagcctgcagtcatgcgagagcagtaaaagcaagtcccagctgaccagccagagcgaggccatggccctgcagtcgatccaaaacatgcgtgggaacgcccactgtgtggactgtgagacccagaatcctaagtgggccagtttgaacttgggagtcctcatgtgtattgaatgctcaggtatccaccgcagtcttggcccccacctttcccgtgtgcgatctctggagctggatgactggccagttgagctcaggaaggttatgtcatctattgtcaatgacctagccaacagcatctgggaagggagcagccaggggcagacaaaaccctcagaaaagtccacgagggaagagaaggaacggtggatccgttccaaatatgaggagaagctctttctggccccactaccctgcactgagctgtccctgggccagcagctgctgcgggccaccgctgatgaggacctgcagacagccatcctgctgctggcacatggctcctgtgaggaggtgaacgagacctgtggggagggagacggctgcacggcgctccatctggcctgccgcaaggggaatgtggttctggcgcagctcctgatctggtacggggtggacgtcatggcccgagatgcccacgggaacacagcgctgacctacgcccggcaggcctccagccaggagtgcatcaacgtgcttctgcagtacggctgccccgacgagtgtgtgtagtatctgttttatttgactgcagtctccttggtgcaaaacaaaaatggggaaaaataagataactccagaatttccaaaaggaaaatcacaaatttcagctaaatataagcatttttcagtactttttcgtaaaactaagtaacatcacaaatgttgatttttctgaccataaaaacaaattttatgtccttttgcc

SEQ ID NO: 186075 - DNA, 1321 bp, Homo Sapiens
ttgggaagaacagcgctcccgaggccgcgggagcctgcagagaggacagccggcctgcgccgggacatgcggccccaggagctccccaggctcgcgttcccgttgctgctgttgctgttgctgctgctgccgccgccgccgtgccctgcccacagcgccacgcgcttcgaccccacctgggagtccctggacgcccgccagctgcccgcgtggtttgaccaggccaagttcggcatcttcatccactggggagtgttttccgtgcccagcttcggtagcgagtggttctggtggtattggcaaaaggaaaagataccgaagtatgtggaatttatgaaagataattaccctcctagtttcaaatatgaagattttggaccactatttacagcaaaattttttaatgccaaccagtgggcagatatttttcaggcctctggtgccaaatacattgtcttaacttccaaacatcatgaaggctttaccttgtgggggtcagaatattcgtggaactggaatgccatagatgaggggcccaagagggacattgtcaaggaacttgaggtagccattaggaacagaactgacctgcgttttggactgtactattccctttttgaatggtttcatccgctcttccttgaggatgaatccagttcattccataagcggcaatttccagtttctaagacattgccagagctctatgagttagtgaacaactatcagcctgaggttctgtggtcggatggtgacggaggagcaccggatcaatactggaacagcacaggcttcttggcctggttatataatgaaagcccagttcggggcacagtagtcaccaatgatcgttggggagctggtagcatctgtaagcatggtggcttctatacctgcagtgatcgttataacccaggacatcttttgccacataaatgggaaaactgcatgacaatagacaaactgtcctggggctataggagggaagctggaatctctgactatcttacaattgaagaattggtgaagcaacttgtagagacagtttcatgtggaggaaatcttttgatgaatattgggcccacactagatggcaccatttctgtagtttttgaggagcgactgaggcaaatggggtcctggctaaaagtcaatggagaagctatttatgaaacccatacctggcgatcccagaatgacactgtcaccccagatgtgtggtacacatccaagcctaaagaaaaattagtctatgccatttttcttaaatggcccacatcagacagctgttccttggtcatcccaaagctatttctggggg

SEQ ID NO: 186076 - DNA, 1561 bp, Homo Sapiens
ttggcgacccggacggagggccggcgaggtgcggggtctggtgatgcgagctgcgcctctcggcaagatttcgcgctgcccatcccgggccctttcatcagtaatcggtagtggatcactctgccaagcggcaggaagaattaaggaaacgacaaggagacgctcggctctctcccgcttggctccttgcggcctcctcttcccttcgctccggcccggtgaaactgaacttataatcgtcactggattgtaagtacccgaggcgaagagagctcgctgagccctgattttttgagtgtctttgttccgggagagtttgtgagttgaaagtatctctgctgggctttctgggccgaaaaccgttccgggggagccgccatttgctttcctgttccctagctagctagctagctctctccgcgttgtccggcagcggcacctagaggttgggacttggcattgcatctgatttaatgaacttaagtctgtgaataagcctttgtgttaacgactggtattcggtcacagcatatttagagaaaagacttggagcttaaataaaaactaaggcaaaatagacgcttagctgctgatctacagagaacttcttgtaattaaaagatttcaattcatagcaaactggtgttttaaactattgcagtagctggaactttttagtgtaaccagcatttattggagaagtgaatcacaaggaaataaagatgagtaaaagcaaagatgatgctcctcacgaactggagagccagtttatcttacgtctgcctccagaatatgcctctactgtgagaagggcagtacagtctggtcatgtcaacctcaaggacagactgacaattgagttacatcctgatgggcgtcatggaatcgtcagagtggaccgtgttccattggcctcaaaattagtagacctgccctgtgttatggaaagcttgaaaaccattgataaaaaaactttttacaagacagctgatatctgtcagatgcttgtatccacagttgatggtgatctctatcctcctgtggaggagccagttgctagcactgatcctaaagcaagcaagaaaaaggataaggacaaagagaaaaagtttatctggaaccacggaattactctgcctctaaagaatgtcaggaagagaaggttccggaagacagcaaagaagaaatatattgaatctccagatgttgaaaaagaagtgaaacgattgctgagtacagatgctgaagctgttagtactcggtgggaaataattgccgaagatgaaacaaaggaggcagaaaatcaaggcctggatatctcttctccaggaatgtctggtcacaggcagggccatgactcattagaacatgatgagcttcgggagatattcaatgacctcagcagcagcagtgaggatgaagatgagacccagcatcaagatgaagaagatataaacatcattgacacggaggaagatctggagagacagctacagggacaagctaaatgaatcagatgaacagcaccaggaaaatgaaggaccaatcagctggttatggg

SEQ ID NO: 186077 - DNA, 1507 bp, Homo Sapiens
  misc_feature (1110)..(1124): n is a, c, g, or t
ttgggtgagtcccacccacaattttgaaccccctcattatgatggcatagaagcactaaccattcaaggggataacctatttagtgggtctagagataatggaatcaagaaatgggacttaactcaaaaagaccttcttcagcaagttccaaatgcacataaggattgggtctgtgccctgggagtggtgccagaccacccagttttgctcagtggctgcagagggggcattttgaaagtctggaacatggatacttttatgccagtgggagagatgaagggtcatgatagtcctatcaatgccatatgtgttaattccacccacatttttactgcagctgatgatcgaactgtgagaatttggaaggctcgcaatttgcaagatggtcagatctgacacaggagatctgggggaagatattgccagtaattaaacatgaatgaagataggttgtaaactgaatgctgtgataatactctgtattctttatggaaaatgttgtcctgtacttactaggcaaaacgtatgaatcggattaactggaaaatatatctgaattcaactgctgactataaatggtattctaataaaattgtgtactatcctgtgtgcttagttttaagatcaaccaatagatatatatcctacaattgatatattgctttattcacacttttattgtggctgaatttttgtgcctatctataaaacacactttcaaattatttgaattaccaagacgtctgcttttgtgacagtcagaaaacacacctggaatacgatgcagcccaccattaactcattcatgtagtttattcaagtgatttatgtatttaaactaaatattgaaaatgttagtcaaattgtggtttgcttgtcaggtatttatatcagtctgtagtggattcccaaatttcaaagctcttttaatgtaatggacaaaaataagatatgagaatattattgatgaattttcataaggtggaattgatcttaatctactaacagagaagggtagacagtttgtgttaaatgttggcatttacttgtattgaccaaagttttgcagctctactatattctgtgctcaggactaaaatgctgttaannnnnnnnnnnnnnnccagtgctgtgcatatattctgtgatgggaaacattgttgatgtcctaacagaaatatattttgatctattttcctatggagttgtttctattatgaccatttaattttgtttttatttaatagtagtatttccttcccttttatctaattttttatatgctgctaaatatattttaaatatactatgtttgcgaaccttggtagctatgatgagagctattatcatctgtggtgggaaaagctatgtaaataggtagattgtatagagagactatcttgtgttgtgcctgtatgaatttttaaaagttgttgactggattttgcaaaaggatgtataatatttctgtctgctcagatattaatttgtaaattctgcaagttt

SEQ ID NO: 186078 - DNA, 872 bp, Homo Sapiens
ttggcgcggtcgagtcatcgcagggcctcaccgcttcgttctcccgtccctccccgcgccttggcgcggggggtcgactagccaagtgaggcgggaggcgactcggacctttccctgcatttcgtttcggccagtgccgggggctacccgccctggggcctgggatccttggggcccgtgaggcccactcttagcggccggggcctaccgcggcccgccgctggccctcatgaggcatagcctgaccaagctgctggcagcctcgggcagcaactccccaacccgcagtgagagcccggagccggctgcaacttgttcgctgccctctgacctgacccgggctgcagcgggggaggaggagacggcggcggccggatctcccggccgcaagcagcagtttggcgacgaaggagagttggaagccgggagggggagccgcggcggcgtggccgtgcgcgcgccctcccccgaggagatggaggaggaggcgatcgccagcctcccgggggaagagacggaggatatggactttctgtctgggctggaactggcggatctcctggaccccaggcaaccggactggcacctggaccccgggcttagctcgccggggcctctctcctcgtctggcggaggctcggatagcggcggcctgtggagaggggacgatgacgatgaggccgcggctgctgaaatgcagcgcttctctgacctgctgcaaaggctgttaaacggtatcggaggctgcagcagcagcagtgacagtgggcagcgccgaaaagaggcggagaaagtcctcaggaggaggcggcggtggcggcagcggttacgacaacaaccaggccggcgaccaaagagtccccggaaggcgg

SEQ ID NO: 186079 - DNA, 853 bp, Homo Sapiens
ctttgtacaaaaaagttggggccgccgacatccaccggagccaccaacatcagcagcctagggcctaggcccgggccaccatggcgctgcctccaggcccagccgccctccggcacacactgctgctcctgccagcccttctgagctcaggggggcctggcacccccagattggcctggtatctggatggacagctgcaggaggccagcacctcaagactgctgagcgtgggaggggaggccttctctggaggcaccagcaccttcactgtcactgcccatcgggcccagcatgagctcaactgctctctgcaggaccccagaagtggccgatcagccaacgcctctgtcatccttaatgtgcaattcaagccagagattgcccaagtcggcgccaagtaccaggaagctcagggcccaggcctcctggttgtcctgtttgccctggtgcgtgccaacccgccggccaatgtcacctggatcgaccaggatgggccagtgactgtcaacacctctgacttcctggtgctggatgcgcagaactacccctggctcaccaaccacacggtgcagctgcagctccgcagcctggcacacaacctctcggtggtggccaccaatgacgtgggtgtcaccagtgcgtcgcttccagccccaggcccctcccggcacccatctctgatatcaagtgactccaacaacctaaaactcaacaacgtgcgcctgccacgggagaacatgtccctcccatccaaccttcagctcaatgacctcactccagattccagagcagtgaaaccagcagaccggcagatgggctcagaacaacagccggccagagcttctggacccgg

SEQ ID NO: 186080 - DNA, 1701 bp, Homo Sapiens
ccatacattctggtgctcgtgcatttgtctcttcactaatcttttctagtttgtcttgaatatccttgtacttttgttctgcctcattaagtctgacgtgctgtcttccattttcctgtcaagtctagcagcacgatcttctccaattttgatattatctctgatggcattcaattgtttttcaatttcattgaccactgcccaagccatttcatgtttcaaggactctaaattagtcttcattgtacttaaaccagcaatactttgaaaacgttcctctttctctacacactggcgctttagttcagtaagccgctcttctccttgatgtatctgctcctttgttctttctttcgtttccataatgtatgaataatcttccttcatctgttcaagttgcgttgctttcatgaagaatttgtatttgtctccttcatttttagactgtaagaactgcttgctcatttcttgtgttaaaacagaaactggattatccacctcaaactggatgttaaaatgatcaagaattgcaatcagctcttctttcctcgtggaaaccacggagcctgttgcacttttaagtttataagatcgacttccatctatgctgatgtgttgctgtataagtatagagttaccatacacactggctttaaaggcatcatctcctctgttcctcaatgttattgagatatctgcagagttctgtccatctttcacaaaaccttttaaagaggatcctctattagtagcaactgctcttccaccaagaccgactatgagagctgtgagtactgcactcttcccacttccattgttgccaacaacaaagttgacattagaaccaaacttaaaaggtccaagcattgaatgacacatgaagttttttaggtgaatactctcaattattccaacttctgctgcagtcaaagtagtacctttacattcgtcttcgtcaccatctttatcaaaatcctccaattcttcttgtcttggccttttggcatttttaggagaggaaaaattttcttcctttcttttggccatcaggtctgaacaaatatttatagtaacaatgaggtaaatcaagttccatatatattaaacttaacaaaataaatctaacaaggctaattaaactttaggtactatgtccatccatttttaccttaaaaattaaagtaaattagtcttgcatcttgcactaaggaagagggacatgagtcaaaaaatgctggaaaaggcaaggaaatagattttcccctagaggccctaaaacagaacatagccctactgacatctggattttagcccagtgagatctgtgttggacttctaatccacagaagcgtaagatagtaagtttgtattgctttaacatctgcatattctatactagttgattttacttcagaggtattcatagccaagattttatcagtataagcctacctaaatgttgtgactactaaactcacaaaaggtaaaagattttgtgaaattgtggtttctagttttctaaatctattcatagagatggcatggtgactcctgaaattattccaaagcaatgcacaattttcacaagttataaagtaatcagataaaacttttaatttttaagttgttttcccaaagaatcatattttgaagcacattgcttagcaccagtggtttcctttaactcttcccaaatgccaa

SEQ ID NO: 186081 - DNA, 1512 bp, Homo Sapiens
ttggtttttataaactaacaaaaacttgctctcagtcaatataataaatgatagttaaactctaaggaagacctgggaaatgaaaacaatttatggaagtcccctacagtcagtttataagggcttcagtagtgatagacattgttataaaaacttgtaccatgttacatgtacactgcaccacagtctaaattcagaccagcatttgaaggactgcacatatttcatttcctctgatttatgctgtcacaaattgaaaatctgagtgtagttaggacaaaaaacaaagctaaccatatggcactaattttgattttaacattagtgtaacaaataaggtcgggacatatatttacatagatcccagacactcaagaattagcacagctgatgtaaaattctaaattaccatttacttccagatagagcagaggagaaacacctcactgcagtttcaacatgctttccaagaacaatatatacgacatatacattttcctgcctctctcttgtgacaatttctgttagaatttgttgggggtctgatggttaaaatcatgggcaaggccattctctacatcattgcttaatatttcaaaaataggtattagagcactatcagtggtccaaaattagttttagctacttattttgctccatgggttttgggcttttcaaagaatactatgtataatttgtaattgaaagcctttcagtaggatatccaaagttcaatgtgtttcaaaagggaaaacttttacttgtgggggtgggagttagatgtattaaaaaaacgaaactacaaaatccttttaagaaagtaataccaatttagactctagtttgtgttacgaggtattctttcaaattttttttaaaagccaactactgtcattaagaaataattttagatttgtgctctagcagaaaataactctgtacccatcaatcttattgccaacattccataccagtggtaggaaagatattctcattttttttattgaaccagacatttttataaaatactgattgactttgtacattatggatattatatatgaaattttgccttgtattctttcacttgaaaaaactccaaaattccacaatattttagtagttaacttcctattctttcttaaatttgatggagaagggaaaataaattgcagttattgattcttgccatctttgttttcttaaagaaatctatgcattttaaggataaaactaaagcatatgggtttacatgaaacatcaggatggattattgtacattgaattcattccgcgtataatgtggtatttcttactctgtccatcttggtagctgtcacttcaaaagaagacagtttccctgagtaatcatcacctacatggccattagagtatctatcggtgataattccatgatacagagtatcttggcattataaattcagtatcccaggacctaaacctttatgctacattttcgaagattttttaaaaataatattgttaatcagt

SEQ ID NO: 186082 - DNA, 1601 bp, Homo Sapiens
  misc_feature (53)..(90): n is a, c, g, or t
  misc_feature (1461)..(1488): n is a, c, g, or t
ttggatagactggccaggtacagaaggcaggttggctggccagtgggtagaannnnnnnnnnnnnnnnnnnnnnnnnnnnnnnnnnnnnncgcaggcgtattggaggtgaagcaggagacggatagtagtttagtggtaaaagaagcgaaggtgggtgaaccagaggtaaaggaagagaaggtaaaggaagaggtaatggactggtcagaagtgaaggaagagaaggataacttggagataaaacaggaggagaagtttgttggtcaatgcataaaagaggaattgatgcatggagagtgtgtaaaagaagagaaggatttcctgaagaaagaaatcgtggatgatacaaaggtgaaagaagagcctccgataaatcacccggtgggctgcaagcggaaactggccatgtcaaggtgtgagacttgtggtacagaagaagcaaagtacagatgtccacgttgtatgcgatattcctgcagtttgccctgtgtaaagaaacacaaagcagaactgacatgtaatggagttcgagataaaactgcatacatttcaatacaacagtttactgaaatgaatctcctaagtgattatcgatttttggaagatgtggcaagaacagcggaccatatttctagagatgcttttttgaagagaccaataagcaataaatatatgtactttatgaaaaatcgtgcccggaggcaaggtattaacttaaaacttctacccaatggattcaccaagaggaagagaattcaaccttttttgataagaaaaaacaacagttttgttggcatgtgaagctccagtttcctcaaagtcaagctgagtacatagaaaaaagagtaccagatgataaaactattaatgaaatcctaaaaccttacattgatcctgaaaagtctgatcctgtaattcgtcaaaggttgaaagcctacattcgctctcagactggggttcagattttaatgaagattgaatatatgcagcaaaatttagtaagatattatgaactagatccttataaaagtctcctagacaatttgaggaacaaagtgatcattgagtatccaacattacatgtggtattgaaaggatccaataatgacatgaaagttcttcaccaagtgaagagtgaatctaccaagaacgttggcaatgaaaattgagcattttttctggaagaagaaagtgaaaacttccagacaactgcagcagactctgcattgatgggctgttggctgattggggtattgtcaatgggtgattggaattttttctttgtatgaaaaataagcttaactcttttaaaaaatgtattttataacctcttgaattaattgacttgtaagacccatttattcatattaagaactctcctttgcacttgatcagcatagtacttattaggccctggctttttaatatgcttaattgcttaattccataaactgaaaacnnnnnnnnnnnnnnnnnnnnnnnnnnnngagatggggtcttggagtgcaagtggtatgagcatagcttcctcaaattcctgggctcgaatggtcctctcactgcagcctcccaacaggctggtaccaccacactcagctaa

SEQ ID NO: 186083 - DNA, 1592 bp, Homo Sapiens
  misc_feature (155)..(175): n is a, c, g, or t
  misc_feature (842)..(869): n is a, c, g, or t
  misc_feature (984)..(1005): n is a, c, g, or t
  misc_feature (1007)..(1102): n is a, c, g, or t
ttggcatagttagtcttgcttgctctaagcaagacaggggtgtcagaggagctccatttctattcttctttcctgtgaaaggaaggagatggcgattagctagtcttctgtcactccacattcactcaacatatactgaccctcaattaagtttnnnnnnnnnnnnnnnnnnnnngttattctaaccacaagtggctggccaggataatagtgatctattcagtggcatgaatatggatcataaccacattgtgaagtgaccattcccaagtcttccacagagtcaggaaggatgttacctcacaaaatataattgccactttcagacatcatttctctatttattgtggccagaattgtatatcctagctgcctgggacatgacgcggtttgtgtgtccctgtgagcagtgcttttgctgtacatcagaaggagggagagaagagggacagagcaacctaaacagaaaaatataaacacttgactgtatgtttacttatttttttctagtgaagagtgaatctaccaagaacgttggcaatgaaaattgagcattttttctggaagaagaaagtgaaaacttccagacaactgcagcagactctgcattgatgggctgttggctgattggggtattgtcaatgggtgattggaattttttctttgtatgaaaaataagcttaactcttttaaaaaatgtattttataacctcttgaattaattgacttgtaagacccatttattcatattaagaactctcctttgcacttgatcagcatagtacttattaggccctggctttttaatatgcttaattgcttaattccataaactgaaaacnnnnnnnnnnnnnnnnnnnnnnnnnnnngagatggggtcttggagtgcaagtggtatgagcatagcttcctcaaattcctgggctcgaatggtcctctcactgcagcctcccaacaggctggtaccaccacactcagctaagnnnnnnnnnnnnnnnnnnnnnngnnnnnnnnnnnnnnnnnnnnnnnnnnnnnnnnnnnnnnnnnnnnnnnnnnnnnnnnnnnnnnnnnnnnnnnnnnnnnnnnnnnnnnnnnnnnnnnngcatcagccaccacacctggccttgaacattttttatttgttaatttcatgcgtgacaaaacccaaggatcacccatgtcaaccacaaagttggcattccctttagtagaacctcactaaacggaaaggctgtacaacgcaccgtctagccacaggagaactaatcttctatcagttgccctttcttctttggagtttttatgtaacttacccttgtgagacaagttttctacttgagaaactcctagtacaatgtcttatactagaagcctggataaatactattaactactgtttcttatattcacttcagaaaatcagtggctccacattgtttgagccattagtgataacaaatttggatctacttactcaagtcttatgaattctgtgcctttcatcacattcctagcccactctcatcattactgcagaagggtgttgtgatgaccagttttatactgtgttttgatatgtctagcaataactt

SEQ ID NO: 186084 - DNA, 804 bp, Homo Sapiens
ggcccccttcaccctcccgctcctgggggaggtagtcatggctgtggggccatgaagaagagggggtgagcttgctcagaccttgcagtaaattctgtccctgttgcaggtccagtttggcagggaagggacacccggtataccctccgttttctttacagaactccaggaatactttccagtcagggtcatggcccaggagaagggggttccccacgatgatgagcagggccttggcccgggtcacagctacattgaacctcttggggttcttaaggaaacccagattaaagtccagatccagctgcacaaagctctggctgcttcgcacggtggagatgaggatgacgcttcgttcttggccttggaattcttctactgaacccaccttcaagtccttgatgtcatccagtcctcgaagctccctgtcaagtttggtgatgcagtaacggattttctccacctgtttccggtacggggagatgacgcccacacttcgagggctcaggcgagctttgcccttcttggaggagggggccaggagcagcttcaggtaggaagtcactgtggcagcctcttcagggttgaagaaggatgggctgttgccttcacgctcatctttgcccattacgccgtgaaagatgatgggaaagccctgtcgaggtaggcccgcccagcggcagaagcgttctcgatccacgacatcagcacaggcctgcagctccccttcataatagagctggttaggaatgtccaggatggtgggatgagacctgtagttgcggagcagcttggttatgccaa

SEQ ID NO: 186085 - DNA, 1698 bp, Homo Sapiens
  misc_feature (922)..(934): n is a, c, g, or t
ttggggcgtgagccaccacgcccaacctttagcacatcttttgaaccaattcagtgttatttaatttcttcaagtgtctactactttcatgattgaagatagtttagcatttcatattaaagtacatttaatttcattacagtttgtgaaagagacagacaatgaagtaagaatgcgactattgcagttcgtcactggaacctgccgtttacctctaggaggatttgctgagctcatgggtaaatgaagtaatgggcctcaaaagttttgcattgaaaaagttggcaaagacacttggttaccaagaagccatacatgttttaatcgcttggatctaccaccatataagagttatgaacaactaaaggaaaaacttctttttgcaatagaagagacagagggatttggacaagaatgaatgtggcttcttattttggaggagctcttgcatttaaataccccagccaagaaaaattgcacagatagtgtatataagctgttcattctgtacagtgaattttccgaacctctcaaagtatgttttccgttcttccacagaaatatgcaaaacagttcatccttttctactttatttattgttcccttgaaatgactgaccaggaaaaagatcatccttaaattttgaagcaagtgagagactttattaaaaatacatatatatctatataaacatatatgatagtggctctagttttatagagctccaagtgtattaaacatgacagccattcattcataaagatctggatttgctttaccttgttaatattatctaggggaaaaagtgcaaattgctccatgttcttctctcccttatgtaacatctcctgagggtgtttagttgcatggctgttcagaaaggtattaagggcttaggccaaatcttactttgagtatgttnnnnnnnnnnnnntgctgctggcttttctgaagacaggtgcttgaacttgtcagtttgttttaaataaatacaatagttgaaaatttttctctgttacatcagtaatattgttaaagtaatggatagaaccataacttacacatgaaagtcatatactagatccaatactatttagtttattattgaaattggaaggattcattgagcagcatagaagtttgtttacatgttactttgagatgctaggtatttgtggaattaaaaagaatcaggctcttttgtactttgtttttaaatctgtgatgcttttcaaatttaattcataataaattgatgcaatttcatacttaggaacatacaaaaggtaatgtaaactctgccacttttttgtgttcaaaattttggtttttatgaagccagatggattgaagagttacataagcatttgaatgctctaatataaggctaatgattttctgttagtgtttgaatatcttcattcctctcaaattcataacagttctatttaactgaattaaataaccatatgaaaaatcttttgggtctccccctttttacacagataattatttttgtcataacactttttaattgtttttcatcataggggcctttgctgaactacaaaaatgtgtaacaaattaaaatctgatgtgaatgatattaatgctacttttagcaaactgggcttcctaatacaaaattttaaatttccatttgtatcatgcttttaatatgcactgtaaatttcatta

SEQ ID NO: 186086 - DNA, 2398 bp, Homo Sapiens
ttggtgaatgtattccttctaccagtgcagaattggaatctgaagctagaagtatattagagcctgacacctctaattctagaagtagttctgcttttgaagcagccaaatcaagacagccagatgggtgtatggatcctgtacggcagcagtctgggaatgccaacacagaaaccttgccatcagggtgggaacaaagaaaagatcctcatggtagaacctattatgtggatcataatactcgaactaccacatgggagagaccacaacctttacctccaggttgggaaagaagagttgatgatcgtagaagagtttattatgtggatcataacaccagaacaacaacgtggcagcggcctaccatggaatctgtccgaaattttgaacagtggcaatctcagcggaaccaattgcagggagctatgcaacagtttaaccaacgatacctctattcggcttcaatgttagctgcagaaaatgacccttatggacctttgccaccaggctgggaaaaaagagtggattcaacagacagggtttactttgtgaatcataacacaaaaacaacccagtgggaagatccaagaactcaaggcttacagaatgaagaacccctgccagaaggctgggaaattagatatactcgtgaaggtgtaaggtactttgttgatcataacacaagaacaacaacattcaaagatcctcgcaatgggaagtcatctgtaactaaaggtggtccacaaattgcttatgaacgcggctttaggtggaagcttgctcacttccgttatttgtgccagtctaatgcactacctagtcatgtaaagatcaatgtgtcccggcagacattgtttgaagattccttccaacagattatggcattaaaaccctatgacttgaggaggcgcttatatgtaatatttagaggagaagaaggacttgattatggtggcctagcgagagaatggtttttcttgctttcacatgaagttttgaacccaatgtattgcttatttgagtatgcgggcaagaacaactattgtctgcagataaatccagcatcaaccattaatccagaccatctttcatacttctgtttcattggtcgttttattgccatggcactatttcatggaaagtttatcgatactggtttctctttaccattctacaagcgtatgttaagtaaaaaacttactattaaggatttggaatctattgatactgaattttataactcccttatctggataagagataacaacattgaagaatgtggcttagaaatgtacttttctgttgacatggagattttgggaaaagttacttcacatgacctgaagttgggaggttccaatattctggtgactgaggagaacaaagatgaatatattggtttaatgacagaatggcgtttttctcgaggagtacaagaacagaccaaagctttccttgatggttttaatgaagttgttcctcttcagtggctacagtacttcgatgaaaaagaattagaggttatgttgtgtggcatgcaggaggttgacttggcagattggcagagaaatactgtttatcgacattatacaagaaacagcaagcaaatcatttggttttggcagtttgtgaaagagacagacaatgaagtaagaatgcgactattgcagttcgtcactggaacctgccgtttacctctaggaggatttgctgagctcatgggaagtaatgggcctcaaaagttttgcattgaaaaagttggcaaagacacttggttaccaagaagccatacatgttttaatcgcttggatctaccaccatataagagttatgaacaactaaaggaaaaacttctttttgcaatagaagagacagagggatttggacaagaatgaatgtggcttcttattttggaggagctcttgcatttaaataccccagccaagaaaaattgcacagatagtgtatataagctgttcattctgtacagtgaattttccgaacctctcaaagtatgttttccgttcttccacagaaatatgcaaaaaagttggtccttttctactttatttattgttcccttgaaatgactgaccaggaaaaagatcatccttaaattttgaagcaagtgagagactttattaaaaatacatatatatctatataaacatatatgatagtggctctagttttatagagctccaagtgtattaaacatgacagccattcattcataaagatctggatttgctttaccttgttaatattatctaggggaaaaagtgcaaattgctccatgttcttctctcccttatgtaacatctcctgagggtgtttagttgcatggctgttcagaaaggtattaagggcttaggccaaatcttactttgagtatgtt

SEQ ID NO: 186087 - DNA, 1530 bp, Homo Sapiens
  misc_feature (853)..(861): n is a, c, g, or t
  misc_feature (951)..(978): n is a, c, g, or t
ctttgtacaaatgacatgtatggagactacaacatacacatactgggcatgtggcgtcgtcctaattatttcaggtatctatctcttcattggcatgggcatcaattatcgacttttggcaaaagaacagaaagcaaacgagcagaaaaaggaaagtaaagaggaagagaccagtatagatgttgctgggaagccaaatgaagttaccaaagcagcagaatctccggaccagaaagacacagaaggagggcccaaggaggaggaaagtccagtctgaatccatggggctgaagggtaaattgagcagttcatgacccaggatatctgaaaatattctattggcctgtaatctaccagtggtgctcaatgcaaatagtagacatttgtgtggaaatcataccagttgttcattgatgggatttttgtttgactccttaccaatagcctgaatttgaggagggaatgattggtagcaaaggatgggggaaagaagtaggttctgttttgttttgtttgacacagtgtacttgtcaacccctctcaggtaccttttcttgggatgcttattagaagccaagtaaagtgcttaaggtttgttttcattaaattagctatttctgctcccctgttcaaagatgcattttgagtgtttatagatcactgccctttttgaaatcaccctggtattatttttcttactggaaaagttagtattaaaatctacagaactacatatttgtgcctccttggtaaatacaacacatctaattaaatgtagacagatatttcaaacatcagctgaattcacttaagtttttccaaaacctcagttaaactgtgaagctattggaannnnnnnnncctggaatttttcccctttgattcacagtggtcccatttatatctgcttctagcttagtgctatgtgtgagatatgtgtgtgtttggtgnnnnnnnnnnnnnnnnnnnnnnnnnnnnaaggtttgcaaattaaaaagggccagaaaaatttggcaccaggcaaacgaataaagataggattgggaaagaagttgctaagtgtgcttagttttaataagtaattccttctcttttttcaaaaaaggccttacagaaaattgttgtgcttaaaattgctggatgcatttttaccctccacacaaacctaaaaattttgtgacccctttcacttacctgaaaagtagagaaatggattcagtataaggataaggagggaaggtggaccagaatgaaaactgtaaatatttttttaacctaatatcacttaaatcgaggcagaaagatatagacattcaatgaattatattcaatgcatttaaaataccactgtaattgacagagtaaaagtatagatacaaacccttgtgtaagaggctgacttttccaataaacatttctttaagaaacattttcttctcccaaatgtctatttttcttgaggaaaatattgctgtgtcttcatttccataccagggtttcattttggggcctgctaaaattgaatgaaat

SEQ ID NO: 186088 - DNA, 1332 bp, Homo Sapiens
ttgtacaaaaaagttgggtgtaggggagcgcggagctgcatttgtctgctccaggtgctagccaggcaggcgcagccgtggccggctagggctggaagtgtcagcggcggccgcgggcccggcagaaggccgagtaggaggggagacagatgaccaacaaataaattgtatggtttcaacatggtcatgtctcatccacatgctgtcaatgagattgcactaagcctgaacaacaagaatcccagaacaaaagcccttgtcttagaactgttggcagccgtttgtcttgtcagaggcgggcatgaaatcattttatcagcatttgataactttaaagaggtttgtggagaaaaacagcgctttgagaagttgatggaacatttcaggaatgaagacaataacatagattttatggtggcttctatgcagtttattaatattgtagtccattcagtagaagatatgaatttcagagttcacctgcagtatgaatttaccaaattaggcctggatgaatacttggacaagctgaaacacactgagagtgacaagcttcaagtccagatccaggcttacctggacaatgtttttgatgtaggagctctactggaagatgctgaaactaagaatgctgccttggagagggtggaagaactggaagaaaacatttctcatttatctgaaaaactgcaagacacagagaatgaagccatgtccaagattgtggaactggaaaagcaactcatgcagaggaacaaggagctggatgtcgttcgggaaatctacaaagatgcaaatactcaagttcacacattaagaaaaatggtcaaagaaaaagaagaagcaattcaaagacagtctaccctggaaaaaaagattcatgagctagagaaacaagggaccattaaaattcagaagaaaggggatggggatatcgccatactgccagttgtggcttctggcacattgtccatggggtcagaagtggtagcaggtaactctgtgggacccacaatgggggccgcttcctcaggacccttgccccctcctccaccaccactgcctccctcatcagacacacctgaaacaggtaagaagccttggcaggaggactgaggaagttttggaatatttgtatttcttcttttgccaactgtccacttctgtcctttgtccgtttttgttggcatgttctttaagaattggttttcttgagtagttcttaactgtttacattttgagattaaatttataaatcctcatttcacatatgttgaaatatttttcccacatgtcaatgagacattttttggttttgaaaacagtcctttg

SEQ ID NO: 186089 - DNA, 1543 bp, Homo Sapiens
ttggcctggcgctgctggcttctgggcggtttttgtcttttgatttcaagagttaggagctcgagaaccgtttggcaatatgtacgacgcggatgaggatatgcaatatgatgaggatgatgatgaaatcaccccggatttgtggcaagaagcatgctggattgtaatcagttcctattttgacgagaaaggcttggttagacaacagctggattcttttgatgagtttattcagatgtctgttcaaagaattgtggaagacgctcctcctatagacctacaggctgaagctcagcatgctagtggagaagttgaagaaccgccacgatatttgctgaagtttgaacaaatttatctttccaagcctacccattgggaaagagatggtgctccttcaccaatgatgcccaatgaagctagattaaggaatctcacgtattctgctccgctttatgttgatataacaaaaacagtcattaaagaaggtgaagaacaacttcagactcagcatcagaaaacttttataggaaaaattccaattatgttgcggtcaacttactgccttttgaatggcttgacagatcgtgatctttgtgagttaaatgaatgccctttggatcctggtggctatttcattattaatggatcagaaaaggttctgattgcccaagagaaaatggcaacaaacacagtttatgtgtttgccaaaaaggattctaaatatgcctacacaggagagtgtagatcatgtcttgagaattcttcccgacccaccagtactatatgggttagcatgctggcaagaggaggacagggtgccaagaagagtgctattggtcagcgcattgtggcaactctaccatatatcaagcaagaagttcccatcattattgtgttcagagcattaggttttgtgtccgacagagatattttagaacatattatttatgattttgaagatccagagatgatggaaatggttaaaccttctctcgatgaagcttttgtcatccaagaacagaatgttgcactaaatttcattggttcaagaggagcaaagcctggtgttactaaagagaaaagaattaaatatgcaaaggaagttttacaaaaagaaatgctccctcatgttggtgtcagtgatttttgtgagaccaaaaaagcctatttcttgggatacatggttcataggttacttctggcagctttgggtagaagagaactagatgacagagatcactatggaaacaagagattggatcttgctgggccgctgcttgcattcttatttagaggtatgtttaagaatttgcttaaagaagtgcggatctatgcacagaaatttattgatcgaggaaaggattttaacttggagttggcaattaaaacacggatcatatctgatggcctaaaatactctttagctactggaaactggggtgatcaaaagaaagctcatcaagccagagctggagtatctcagtgttaaaccgcctgacttttgcgtctactctttctcacctgcgtcgtttaaattctccta

SEQ ID NO: 186090 - DNA, 937 bp, Homo Sapiens
ttggctggaaatcaagctgcttatgaacattttgagaccatgaagaaccagtggatcgataatgttgaaaaaatgacagggctggtggacgaagccattgataccaaatctctgttggatgcttcagaagaagcaattaaaaaagacctggacaagtgcaaggtagctatggccaacattcagcctcagatgctggttgctggggcaaccagtattgctcgtcgggccaaccggatcctgctggtggctaagagggaggtggagaattccgaggatcccaagttccgtgaggctgtgaaagctgcctctgatgaattgagcaaaaccatctccccaatggtgatggatgcaaaagctgtggctggaaacatttccgaccctggactgcaaaagagcttcctggactcaggatatcggatcctgggagctgtggccaaggtcagagaagccttccaacctcaggagcctgacttcccgccgcctccaccagaccttgaacaactccgactaacagatgagcttgctcctcccaaaccacctctgcctgaaggtgaggtccctccacctaggcctccaccaccagaggaaaaggatgaagagttccctgagcagaaggccggggaggtgattaaccagccaatgatgatggctgccagacagctccatgatgaagctcgcaaatggtccagcaagggcaatgacatcattgcagcagccaagcgcatggctctgctgatggctgagatgtctcggctggtaagagggggcagtggtaccaagcgggcactcattcagtgtgccaaggacatcgccaaggcctcagatgagtgactcggttggccaaggaggttgccaagcagtgcacagataaacggattagaaccaacctcttacaggtatgtgagcgaatcccaaccataagcacccagctcaaaat

SEQ ID NO: 186091 - DNA, 2341 bp, Homo Sapiens
  misc_feature (1529)..(1537): n is a, c, g, or t
ttgggtttcataagacaggactttccaggaactaaattgagcctgtttggctcctccaaaaatggatttgggttcaaacagagtgaccttgacgtctgtatgacaattaatggacttgaaactgctgagggattggactgtgtcagaactattgaagaattagcaagagtcctcagaaaacattcaggtctgagaaacatcttacctattacaacagcaaaggtgccaattgtgaagttcttccatttgagaagtggtctggaagtagatatcagtttgtataacacattggcccttcataacacaaggcttttatctgcttattccgccattgatcccagagtgaagtatttgtgctataccatgaaagtatttacaaagatgtgtgatattggtgatgcatctagaggcagcttatcatcgtatgcatatactcttatggtgctatattttctccagcagaggaatccaccagtcattcctgtccttcaagagatatacaaaggtgaaaagaaacctgaaatatttgttgatggctggaatatttatttttttgatcaaatagatgaactgcctacctattggtcagaatgtggaaaaaatacagaatctgttgggcagttatggttgggccttcttcgtttctacacagaggaatttgattttaaagaacatgttattagcatcaggagaaaaagtctgcttacaacttttaagaaacagtggacctcaaaatacattgttattgaagatccctttgatttgaatcataatcttggagctggattatcaaggaaaatgacaaattttataatgaaggcttttatcaatggtagaagagtatttggtattcctgtcaagggatttccaaaggactacccctcaaaaatggaatacttttttgatccagatgtgttaactgaaggagagctggccccaaatgatagatgttgtcgaatttgtggaaaaatcggacacttcatgaaggactgtcctatgaggagaaaagtaagacggcggcgagatcaggaagatgccctgaaccaaagataccctgagaacaaggaaaaaagaagcaaagaggacaaagaaattcacaacaagtacacagaaagggaggtgtcaacaaaagaagataagcccatacagtgcacacctcagaaagccaagccaatgcgggcagctgctgacctggggagggagaagatcctcaggccaccagtagaaaaatggaagagacaggatgacaaagacttaagagaaaaacgttgttttatttgtggaagagaagggcacattaaaaaggaatgcccacagtttaaaggctcttcaggtagcctttccagtaaatatatgactcagggaaaagcctcagcgaagaggacccagcaggaatcatgagggaaggaaaatgcagcactctaaatggccactcaggcgttcctattcactcggaaaattaggttcatttcacaggacacagcagtgtagatcaggcttcaacttaacatttaagggaaatgtcagannnnnnnnnaatttaatgaaattgttaatgaggaaaaatttttaatatagtcttatctaccacacatccccatagatttaaggattttaatagaaagacatgatgtatgtatttaagccacgttaaaagaaaaaatataactatggaccggtattcattgaatacagtttcatggtttttaattctttcaaagcacattaaaaatggtgtgctgataaaccccaagtaaattaaccctttttccgtataaatccattttttgttttgaagaggggaaattatatttattgttgtttactgaatcctggtgtgaaagcatatcagatatgtatgaactgctactgctgtacttccgatttacggacatcattttattgctatttgtagacgtgataacatgaacatgagtacctatttatgtgggccttcagtggatgggcagtgccactcaggtctctggggtttccctctctaattttaagtaaattgacatataactactatgcttataaaaatgaagtaaggaaaacaagtagtcctgtttgccactaaaaacattttcaaaggaaaaataaaatgaaagtactttttactttttatgatactcagaaattaggatgaagaacttttaaaattgctgaagatcaaagaggttatctctgccagtcacaagtgtggctggtgtcattctgggtctgactggagcccttctggactgtttctttaatttcaaaagccctgcaaaatagtacctggttcagaactatgcttcggtttatttatcattttgaaataaatcagaatttcaacctg

SEQ ID NO: 186092 - DNA, 1749 bp, Homo Sapiens
ttggctagaatgctgtgcgtcggaaggctgggcggcttgggagccagagcagcagctctgccgccccgccgggcgggccggggaagcctcgaagccgggatccgggcccgaagggtcagcaccagctggtctcccgtgggcgccgccttcaatgtcaagccccagggcagccgcttggacctgttcggcgagcgccggggtctttttggagttcctgagctgagtgccccagaaggatttcatattgcacaagaaaaagccttgagaaagacagaattgcttgtggaccgtgcatgttccaccccacctgggccccagaccgtgctgatcttcgatgagctctcggattccttatgcagagtggccgacttggctgattttgtgaaaatcgctcaccctgagccagcattcagagaagctgcggaagaagcttgtagaagtattggcaccatggtagagaagttgaacacaaatgtggatttatatcaaagtttgcaaaaattactagctgataaaaaacttgtggattcccttgatccagaaacaaggcgagtggctgaactgtttatgtttgattttgaaattagtggaatccatctagacaaagaaaagcgtaaaagagcagtggacctcaatgttaaaatcttggatttgagtagtacatttcttatgggaaccaattttcccaacaagattgagaagcatctcttaccagaacacattcgtcgtaactttacatctgctggggatcatatcataattgatggtctccacgcagaatcaccagatgacttggtgcgagaagctgcttataaaatttttctttatcccaatgctggtcaattgaaatgtttagaagaattgctcagcagcagagatcttctggcaaagttggtggggtattccacgttttctcacagggctctccaaggaacgatagctaaaaatccagagactgtcatgcagttccttgaaaaactatctgacaaactttctgaaagaactctgaaagattttgagatgatacaagggatgaaaatgaaactgaatcctcaaaattccgaagtaatgccctgggaccccccttactacagtggtgtgattcgtgcagaaaggtataatattgagcccagcctatattgcccgtttttctctcttggagcatgcatggaaggcctgaatattttgcttaacagactgttggggatttcattatatgcagagcagcctgcaaaaggagaggtgtggagcgaagatgtccgaaaactggctgttgttcatgaatctgaaggattgttggggtacatttactgtgatttttttcagcgagcagacaaaccacatcaggattgccatttcactatccgtggaggcagactaaaggaagatggagactatcaactcccagttgtagttcttatgctgaatcttccccgttcctcaaggagttctccaactttgctaactcctggcatgatggaaaatcttttccatgaaatgggacatgccatgcattcaatgctaggacgtactcgttaccaacacgtcactgggaccaggtgccctactgattttgctgaggttccttctattctgatggagtactttgcaaatgattatcgagtattaaccaatttgccagacattatcagactggacagccactgccaaaaatatggtgtctcgtctttgtgaatcaaaaaggtttgtgctgcactgatatgcactcaagtcctttatgccactctg

SEQ ID NO: 186093 - DNA, 1674 bp, Homo Sapiens
  misc_feature (221)..(234): n is a, c, g, or t
  misc_feature (582)..(599): n is a, c, g, or t
  misc_feature (1040)..(1048): n is a, c, g, or t
  misc_feature (1431)..(1441): n is a, c, g, or t
ttggcaacaagcagcctattatgcccagacaagtccccagggaatgccacagcatcctccagcacctcaggtataatgtaattgctaatttgttgatttctactccagtctgttttctgcatgtttactgtttgtctgtttgggagtgtttgccttttaaatttttatctggcaaagtataataactatttaaatgaagtactacggtgtattgtttgggnnnnnnnnnnnnnnataatgctttccagcatctgagtggtgaatatttctgcaatgcctttgattttaaaaataaattttcttcccccagggatttgcaaatcatgcaagaagccaccaccatttatattaaccactttttctttcttaaaggattcactcctgaattagctccatttcaaggattttctttaactttttgtgtatttcttatgtatctcttctgcacagggccaataataagaagtggacaatacagtatttgcttcattgtgtgggggaaaaaaacctttgttaaatatatggatgcagacgacttgatgaagatcttaattttgtttttggtttaaaatagtgtttccnnnnnnnnnnnnnnnnnngaaaatgtacaaaatatctatcactactgataggaggttaatatttctgtgtagaaatgaaaattggtttgtttttagtatttagtgtagatgtacacattccagcaaatgtatttgcaattatgtggttgatgctttgtgatataaatgtactttttcaatgtatactttcacttttaaaatgcctgttttgtgctttacaataatgatatgaaacctcctgtgtcggtaagttggatatgtgggtatttaaaggattcataatttcttagcaatgataaattaagatacatatacacaaatatataagctttccccatgaaatattgagtttttaaacactggcatgtttttccccccttgcagtatagtggtagattggaggatcttttccatttattgtattggctctttcagcacaagtaatcctgatatcttcannnnnnnnnccttctgtttgattaaaaactgcatgtgtgtacaatgatcttttggcatacttccattgcattaacagtgaaatttccttttatacatgaccactgtttcagacctgtactgctgctataacagttaacctttctgttcttaatttgataatacttgatttccaagactgtttcggcataactaattttaaacagttttcagatagtgaatatgagtagtctaataagaacagtttttttccatgtgaagcaactctttcaatgtatataatgttagtgtgtttctttctaaatttaggatagaaaagtgaatagtgtgcaaaaagtatagctacattgcatctgccattgaaacataaatggggtatggaaacgttcaagcnnnnnnnnnnnctttatgcagtatagataagctttgttttgtaaatgcacaagtccaatcattgaatcaacttaatttttttatgtacttgaagtcattttattactctttaacactcatgctgaagttctgatattttgttgaaatccattgttttactctttgcatatttgttggctctttgcatattaatatattagactacatgcaaatacagtctgtcttgccattgtctgttgaagtg

SEQ ID NO: 186094 - DNA, 1583 bp, Homo Sapiens
  misc_feature (140)..(153): n is a, c, g, or t
  misc_feature (501)..(518): n is a, c, g, or t
  misc_feature (1351)..(1362): n is a, c, g, or t
ttggctaatttgttgatttctactccagtctgttttctgcatgtttactgtttgtctgtttgggagtgtttgcctttaaatttttatctggcaaagtataataactatttaaatgaagtactacggtgtattgtttgggnnnnnnnnnnnnnnataatgctttccagcatctgagtggtgaatatttctgcaatgcctttgattttaaaaataaattttcttcccccagggatttgcaaatcatgcaagaagccaccaccatttatattaaccactttttctttcttaaaggattcactcctgaattagctccatttcaaggattttctttaactttttgtgtatttcttatgtatctcttctgcacagggccaataataagaagtggacaatacagtatttgcttcattgtgtgggggaaaaaaacctttgttaaatatatggatgcagacgacttgatgaagatcttaattttgtttttggtttaaaatagtgtttccnnnnnnnnnnnnnnnnnngaaaatgtacaaaatatctatcactactgataggaggttaatatttctgtgtagaaatgaaaattggtttgtttttagtatttagtgtagatgtacacattccagcaaatgtatttgcaattatgtggttgatgctttgtgatataaatgtactttttcaatgtatactttcacttttaaaatgcctgttttgtgctttacaataaatgatatgaaacctcctgtgtcggtaagttggatatgtgggtatttaaaggattcataatttcttagcaatgataaattaagatacatatacacaaatatataagctttccccatgaaatattgagtttttaaacactggcatgtttttccccccttgcagtatagtggtagattggaggatcttttccatttattgtattggctctttcagcacaagtaatcctgatatcttcattttttttccttctgtttgattaaaaactgcatgtgtgtacaatgatcttttggcatacttccattgcattaacagtgaaatttccttttatacatgaccactgtttcagacctgtactgctgctataacagttaacctttctgttcttaatttgataatacttgatttccaagactgtttcggcataactaattttaaacagttttcagatagtgaatatgagtagtctaataagaacagttttttttccatgtgaagcaactctttcaatgtatataatgttagtgtgtttctttctaaatttaggatagaaaagtgaatagtgtgcaaaaagtatagctacattgcatctgccattgaaacataaatggggtatggaaacgttcaagcnnnnnnnnnnnnctttatgcagtatagataagctttgttttgtaaatgcacaagtccaatcattgaatcaacttaatttttttatgtacttgaagtcattttattactctttaacactcatgctgaagttctgatattttgttgaaatccattgttttactctttgcatatttgttggctctttgcatattaatatattagactacatgcaaatacagtctgtcttgccattg

SEQ ID NO: 186095 - DNA, 2821 bp, Homo Sapiens
  misc_feature (153)..(246): n is a, c, g, or t
ttggatataaagaagatattttagttcaaattagccttggaaatattcatgtaattctttattacatttagtttcacactaggatgatttcacttaaatgattgaaggcatatatctggaattagcagagaattcatgtttaacaatttatcnnnnnnnnnnnnnnnnnnnnnnnnnnnnnnnnnnnnnnnnnnnnnnnnnnnnnnnnnnnnnnnnnnnnnnnnnnnnnnnnnnnnnnnnnnnnnnttaattataccacaaaatcatggccctataaaacaatgacaaggttaatcaaatctgtctgtaaatagcaagactcaatggtggcattatgccaatgcccgaaattactataaaaactcccaaataacattgttatccttgtaaatgcttccttgtaaagactgcagtaggtgcctatttcttggaggaagagaactggacattaaaagaaaggctctgcctacaggagcttcgaatctaccaaagggaagctcaaatcccgcccagcggacccgcccgcttcccctaagcttgcctcccgccacgaaagctggaaagtcactgggggcggagctaaggggagctgcgagaattccgggggatgtgaccggactgggcggggcctgtaccttggccctgcgctcccgttgacgtcgcatcctgtcagtatttcgccaaacctccaggcgccatcagtgtgtgaaccgttacgcagctggtccaccgcgggcggagaacaagcgactatgcccagggatcctgcacgcatgcgtggagctgaaccgtcagcgtgcgtgtgacgtcacctgcgcgcccgcctaaactcttcctagggttctttctagagtacggcagcaagttgtcagattccctagttgaatttgctttggacatcagtgtgaagcagaactgatatgccacttgaattaataaaggaagtcaatggggtgcctgaagttcagccgctgagtaaattacataaagtagatttcggatccctacagccaggttacaattatagcaagaaatatattcagggaaaactttcacttatctcttctttaacttatcgtggaaataaaacagctgttttgcagattggactacaaggacaccattgcagtggctagatttattgtttttttagcttcttcatctacaagcagagatggtaaaccttgcatatttttgaaagcatttgaagacctcaaatcaactgtttatgtttatgtcaaatctttaagagatttttctacagaatcaatgtctttggttccagcaacaaattatatatatacacccctgaatcaacttaagggtggtacaattgtcaatgtctatggtgttgtgaagttctttaagcccccatatctaagcaaaggaactgattattgctcagttgtaactattgtggaccagacaaatgtaaaactaacttgcctgctctttagtggaaactatgaagcccttccaataatttataaaaatggagatattgttcgctttcacaggctgaagattcaagtatataaaaaggagactcagggtatcaccagctctggctttgcatctttgacgtttgagggaactttgggagcccctatcatacctcgcacttcaagcaagtattttaacttcactactgaggaccacaaaatggtagaagccttacgtgtttgggcatctactcatatgtcaccgtcttggacattactaaaattgtgtgatgttcagccaatgcagtattttgacctgacttgtcagctcttgggcaaagcagaagtggacggagcatcatttcttctaaaggtatgggatggcaccaggacaccatttccatcttggagagtcttaatacaagaccttgttcttgaaggtgatttaagtcacatccatcggctacaaaatctgacaatagacattttagtctacgataaccatgttcatgtggcaagatctctgaaggttggaagctttcttagaatctatagccttcataccaaacttcaatcaatgaattcagagaatcagacaatgttaagtttagagtttcatcttcatggaggtaccagttacggtcggggaatcagggtcttgccagaaagtaactctgatgtggatcaactgaaaaaggatttagaatctgcaaatttgacagccaatcagcattcagatgttatctgtcaatcagaacctgacgacagctttccaagctctggatcagtatcattatacgaggtagaaagatgtcaacagctatctgctacaatacttacagatcatcagtatttggagaggacaccactatgtgccattttgaaacaaaaagctcctcaacaataccgcatccgagcaaaattgaggtcatataagcccagaagactatttcagtctgttaaacttcattgccctaaatgtcatttgctgcaagaagttccacatgagggcgatttggatataatttttcaggatggtgcaactaaaaccccagatgtcaagctacaaaatacatcattatatgattcaaaaatctggaccactaaaaatcaaaaaggacgaaaagtagcagttcattttgtgaaaaataatggtattctcccgctttcaaatgaatgtctacttttgatagaaggaggtacactcagtgaaatttgcaaactctcgaacaagtttaatagtgtaattcctgtgagatctggccacgaagacctggaacttttggacctttcagcaccatttcttatacaaggaacaatacatcactatggatgtaaacagtgttctagtttgagatccatacaaaatctaaattccc

SEQ ID NO: 186096 - DNA, 1886 bp, Homo Sapiens
  misc_feature (1768)..(1783): n is a, c, g, or t
ttgggttaagttacttatttcttcccccaaattatccagcgtttatttagtacacgtttgttgagtacctactgtgcctggcactatgctagtgggccttgggtatacatcagggaataaagacataacccttcctttcatggagtgacacttaatagagcttaaattaattagattttatagtatatatttggttcaggaggatgcatgtcataaatatgattcttgttattctgattgaatataaaaattctttacagtacttacagatcatcagtatttggagagggcaccactatgtgccattttgaaacaaaaagctcctcaacaataccgcatccgagcaaaattgaggtcatataagcccagaagactatttcagtctgttaaacttcattgccctaaatgtcatttgctgcaagaagttccacatgagggcgatttggatataatttttcaggatggtgcaactaaaaccccagatgtcaagctacaaaatacatcattatatgattcaaaaatctggaccactaaaaatcaaaaaggacgaaaagtagcagttcattttgtgaaaaataatggtattctcccgctttcaaatgaatgtctacttttgatagaaggaggtacactcagtgaaatttgcaaactctcgaacaagtttaatagtgtaattcctgtgagatctggccacgaagacctggaacttttggacctttcagcaccatttcttatacaaggaacaatacatcactatggatgtaaacagtgttctagtttgagatccatacaaaatctaaattccctggttgataaaacatcgtggattccttcttctgtggcagaagcactgggtattgtacccctccaatatgtgtttgttatgacctttacacttgatgatggaacaggagtactagaagcctatctcatggattctgacaaattcttccagattccagcatcagaagttctgatggatgatgaccttcagaaaagtgtggatatgatcatggatatgttttgtcctccaggaataaaaattgatgcatatccgtggttggaatgcttcatcaagtcatacaatgtcacaaatggaacagataatcaaatttgctatcagatttttgacaccacagttgcagaagatgtaatctaatattgccatccaatttagcatacataaaatgttgccactcaccttccctgtttgagcttcttttcctgacctgagttttgtatcagcaatgttgatgatgttagcatgggtatgggattagaaaatgtccttaccttaaatctcttggcttttactgggtgcaaggtaaataatggctatggattttgttttgctttctgttttgcttttgtacaaagagacctgcttaaacaagtactgctgagataagtgtctgatcaagctacagtgtactttaagtagaaatggcaaagttgctttgttggggtgctgatactgatgattttaggataaattcatttctttaaacttgtaatacatggttttattgcttgtttctctccaggatagtagagatttctctatttcacctccacctaataaaagtggtcagatttataatgttaatgacttaatattatccttttctaatagtctcatgtaaaatatgccgctattacaacttacaactaattgaatgagatgttaacttagtaaaatagtttgatttttacctgacagtgtttgtcaaatttaaaatcatgaatattcaattttatacaaacattnnnnnnnnnnnnnnnngatttgtgtatgttatttgccaaagacagatataaattacctgctttaatattagtgaagaataaataagtgcacacatttcaactgtttcatttatttgccc

SEQ ID NO: 186097 - DNA, 1002 bp, Homo Sapiens
  misc_feature (213)..(229): n is a, c, g, or t
  misc_feature (923)..(938): n is a, c, g, or t
ttggtggctttattactcccctaagtctttactctgacttccccaaacccagaaagattttctccacagtgttcatttgaaagaggagtattttgtcccattttccccttcctcattatcaaacagccccagtcttccttgtctctgctaagaaagtagaggcatgatgatctgcctctcaactgccctaagtcctagctaagtatcaggggnnnnnnnnnnnnnnnnngcctaacaaatgggattagactagggctgcaagtagtgaggattttgttgatacctctgctggggggtgtgctttcccatatcttgccttcaggaattacactgtgccttttccccagggatatgggctctgtctacccagtgctccagtttcccggtaactgctcttgaacattgtggacaagggcaggtcttcatatttttgatcatccctttctcccagtgaaatcccatagcccttacctagagtctagggcacaaagacttcggggaagatacactgagattgacctgaggagacatctacacacaccagtggcagctgccccagggcctgcttccccttcctaagtctgtcatcctctggaagggatgggtggtgctccaatctctggtgcctaaaaacccaagtttatttctctcttaacactggcaataaccagtccacaccactgttgccttttaaaacctcttaataatctcatgctgtgtttgttttgattccaatccaattatcaccagggctgtgtgggtaaatgcttttaaatgctctctcatcttgttcttccccctcaccccccactcttaggtatgtatgatgctaatcttgtccctaagtaagtttcttcctgctccttttgtatcttcctttcttgtctttcctcctaccttttgtctcttggtgttttgggacnnnnnnnnnnnnnnnnggccttttgtacaaagattagttttcaatgtaatctgtagcctcctttgtaaaacaattaaaaa

SEQ ID NO: 186098 - DNA, 1382 bp, Homo Sapiens
  misc_feature (1078)..(1086): n is a, c, g, or t
  misc_feature (1267)..(1307): n is a, c, g, or t
ttggcaaaggagggaaggaggctgcacacagcaaccggattctccacctcctgacccaggaggctctctcaatccatggagtcaaggaggccgtgcaactggtgaataccagagaagaagttgaagatctttgccgcctagacaaaatgatagatctgatcattccacgtggctcttcccagctggtcagagacatccagaaagctgctaaggggattccagtgatggggcacagcgaagggatctgtcacatgtatgtggattccgaggccagtgttgataaggtcaccaggctagtcagagactctaaatgtgaatatccagctgcctgtaatgctttggagactttgttaatccaccgggatctgctcaggacaccattatttgaccagatcattgatatgctgagagtggaacaggtaaaaattcatgcaggccccaaatttgcctcctatctgaccttcagcccctccgaagtgaagtcactccgaactgagtatggggacctggaattatgcattgaagtagtggacaacgttcaggatgccattgaccacatccacaagtatggcagctcccacacggatgtcatcgtcacagaggacgaaaacacagcggagttcttcctgcagcacgtagacagtgcctgtgtgttctggaatgccagcactcgcttttctgatggttaccgctttggactgggagctgaagtgggaatcagtacatcgagaatccacgcccggggaccagtaggacttgagggactgcttactactaagtggctgctgcgagggaaggaccacgtggtctcagatttctcagagcatggaagtttaaaatatcttcatgagaacctccctattcctcagagaaacaccaactgaaaagagccaggaaaacccgggaattttccaaaaggtcttcacgttaaacttgtcttatctcaggagagagcccgctcttgtctcccagttcctggtagggtctgcctgttggaaagtgtacctggatgcttctgggctccgtttggcaatagcaatcttggctgatgtgcacagtctggctcccagctcacccnnnnnnnnnaaagtaagaaaatagttgctaccgatagggactttgccaagtccaattatcttctaggattgaaaggtgcattttccccataaaaaaggcgaggaaaacccatggctgctttgtgtcacctcagtgacttacagtcccccttggcatttagttggtactagagccagtcatcctttaacannnnnnnnnnnnnnnnnnnnnnnnnnnnnnnnnnnnnnnnnaaaaaggaaaggatttggaattttagaaaaggggcaactcttctttttagcattctcatcagaaggtcacaaaaa

SEQ ID NO: 186099 - DNA, 2953 bp, Homo Sapiens
ttggatatgtgcccatcagcacagctgagtgccaggcgtggggtgacccccattacgtcactctggatgggcaccgattcgatttccaaggcacctgcgagtacctgctgagtgcaccctgccacggaccacccttgggggctgagaacttcactgtcactgtagccaatgagcaccggggcagccaggctgtcagctacacccgcagtgtcaccctgcaaatctacaaccacagcctgacactgagtgcccgctggccccggaagctacaggtcgacggcgtgttcgtggctctgcctttccagctggactcgctcctgcacgcacacctgagcggcgccgacgtggtggtgaccacaacctcagggctctcgctggctttcgatggggacagcttcgtgcgcctgcgcgtgccggcggcgtacgcggcctctctctgtggcttatgcgggaactacaaccaggaccccgcagacgacctgaaggctgtgggcgggaagcccgctggatggcaggtgggcggggcccagggctgcggggaatgtgtgtccaagccatgcccgtcgccgtgcaccccagagcagcaggagtccttcggcggcccggacgcctgcggcgtgatctccgccaccgacggcccgctggcaccctgccacggccttgtgccgcccgcgcagtacttccagggctgcttgctggacgcctgccaagttcagggccatcctggaggcctctgtcctgcagtggctacctacgtggcagcctgtcaagccgctggggcccagctcggcgagtggaggcggccggacttctgtcccttgcagtgccctgcccacagccactatgagctctgcggtgactcctgccctgtgagctgcccgagcctctcagcacccgagggctgtgagtcggcctgccgtgaaggctgtgtctgcgatgctggcttcgtactcagtggtgacacctgcgtacccgtgggccagtgtggctgcctccatgatggccgctactacccactgggcgaggtcttctacccgggccctgagtgtgagcggcgctgtgagtgtgggccaggtggccatgtcacctgccaggagggcgcagcctgtgggccccatgaggagtgccggttagaggatggtgtccaggcctgtcatgccacaggctgtggccgctgcctggccaacgggggcatccactacatcacccttgatggccgtgtctacgacctgcatggctcctgctcctatgtcttggcccaagtctgccacccaaagcctggggacgaggacttttccatcgtgcttgagaagaatgcagctggacatctccaacgcctcctggttactgtggctggccaggttgtgagcctagctcaggggcagcaggtcaccgtggacggcgaggctgtggccctgcctgtggctgtgggccgcgtgcgggtgaccgccgagggccgaaacatggttctgcagacgaccaaggggctgcggcttctctttgatggcgatgcccacctcctcatgtccatccccagccccttccgtggacggctctgtggcctctgtgggaacttcaatggcaactggagtgacgactttgtcctgcccaatggctcagcagcgtccagtgtggagaccttcggggctgcatggcgggtgcccggctcctccaagggctgtggcgagggctgcgggccccaaggctgcccagtgtgcttggcagaggagactgcaccctatgagagcaacgaggcctgcgggcagctccggaacccccagggccccttcgcgacctgccaggcggtgctgagtccctctgagtacttccgccaatgcgtatacgacctgtgcgcgcaaaagggtgacaaagccttcctgtgccgcagcctggcagcctacacggcggcctgtcaggcagctggcgtggccgtgaagccctggaggacagacagcttctgcccgctccattgccccgcccacagccactactccatctgcactcgcacctgccagggatcctgtgcggctctctccggcctcacgggctgcaccacccgctgttttgagggctgtgagtgcgacgaccgcttcctgctttcccagggtgtctgcatccctgtccaagattgtggctgcacccataatggccgatacttgccggtaaactcctccctgctgacctcagactgcagcgagcgctgttcctgttcctcaagctctggcctgacatgccaggccgctggctgcccaccaggccgtgtatgtgaggtcaaggctgaagcccggaactgctgggccacccgtggtctctgtgtcctgtctgtgggtgccaacctcaccacctttgatggggcccgtggtgccaccacctctcctggtgtctatgagctctcttcccgctgcccaggactacagaataccatcccctggtaccgtgtagttgccgaagtccagatctgccatggcaaaacggaggctgtgggccaggtccacatcttcttccaggatgggatggtgacgttgactccaaacaagggtgtgtgggtgaatggtctccgagtggatctcccagctgagaagttagcatctgtgtccgtgagtcgtacacctgatggctccctgctagtccgccagaaggcaggggtccaggtgtggcttggagccaatgggaaggtggctgtgattgtcagcaatgaccatgctgggaaactgtgtggggcctgtggaaactttgacggggaccagaccaatgattggcatgactctcaggagaagccagcgatggagaaatggagagcgcaggacttctcccatgttatggctgatcagtcatccaccaggaacgaagatttccctgaagaagacctggtccctctggaggttgcggtgggctggagggatgcatcatgtgctcctaccctgctctaccgcttttctgggtcacagaggcc

SEQ ID NO: 186100 - DNA, 2864 bp, Homo Sapiens
ttggaccgattcgatttccaaggcacctgcgagtacctgctgagtgcaccctgccacggaccacccttgggggctgagaacttcactgtcactgtagccaatgagcaccggggcagccaggctgtcagctacacccgcagtgtcaccctgcaaatctacaaccacagcctgacactgagtgcccgctggccccggaagctacaggtggacggcgtgttcgtcactctgcccttccagctggactcgctcctgcacgcacacctgagcggcgccgacgtggtggtgaccacaacctcagggctctcgctggctttcgatggggacagcttcgtgcgcctgcgcgtgccggcggcgtacgcgggctctctctgtggcttatgcgggaactacaaccaggaccccgcagacgacctgaaggcggtgggcgggaagcccgccggatggcaggtgggcggcgcccagggctgcggggaatgtgtgtccaagccatgcccgtcgccgtgcaccccagagcagcaagagtccttcggcggcccggacgcctgcggcgtgatctccgccaccgacggcccgctggcgccctgccacggccttgtgccgcccgcgcagtacttccagggctgcttgctggacgcctgccaagttcagggccatcctggaggcctctgtcctgcagtggccacctacgtggcagcctgtcacgccgctggggcccagctccgcgagtggaggcggccggacttctgtcccttccagtgccctgcccacagccactacgagctctgcggtgactcctgtcctgggagctgcccgagcctgtcggcacccgagggctgtgagtcggcctgccgtgaaggctgtgtctgcgatgctggcttcgtgctcagtggtgacacgtgtgtacctgtgggccagtgtggctgcctccacgatgaccgctactacccactgggccagaccttctaccctggccctgggtgtgattccctttgccgctgccgggagggcggtgaggtgtcctgtgagccctccagctgcggcccgcatgagacctgccggccatccggtggcagcttgggctgcgtggccgtgggctctaccacctgccaggcgtcgggagatccccactacaccaccttcgatggccaccgcttcgacttcatgggcacctgcgtgtatgtgctggctcagacctgcggcacccggcctggcctgcatcggtttgccgtcctgcaggagaacgtggcctggggtaatgggcgagtcagtgtgaccagggtgatcacggtccaggtggcaaacttcaccctgcggctggagcagagacagtggaaggtcacggtgaacggtgtggacatgaagctgcccgtggtgctggccaacggccagatccgtgcctcccagcatggttcagatgttgtgattgagaccgacttcggcctgcgtgtggcctacgaccttgtgtactatgtgcgggtcaccgtccctggaaactactaccagctgatgtgtggcctgtgtgggaactacaacggcgaccccaaggatgacttccagaagcccaatggctcgcaggcaggcaacgccaatgagttcggcaactcctgggaggaggtggtgcccgactctccctgcctgccgccgcccacctgcccgccggggagcgcgggctgtatccccagcgaggagtgtcctcccgagctggagaagaagtatcagaaggaggagttctgtgggctcctctccagccccacagggccactgtcctcctgccacaagctggtggatccccagggtcccttgaaagattgcatctttgatctctgcctgggtggtgggaacctgagcattctctgcagcaacatccatgcctacgtgagtgcttgccaggcggctggaggccaggtggagccctggaggaatgaaactttctgtcccatggaatgccctcagaacagtcactacgagctctgtgcggacacctgctccctgggctgctcggctctcagtgcccctctgcagtgcccagatgggtgtgctgagggctgccagtgtgactccggcttcctctacaacggccaagcctgcgtgcccatccagcaatgtggctgctaccacaatggtgtctactatgagccggagcagacagtcctcattgacaactgtcggcagcagtgcacgtgccatgtgggtaaagtcgtggtgtgccaggaacacagctgcaagccggggcaggtgtgccagccctccggaggcatcctgagctgcgtcaacaaagacccgtgccacggcgtgacatgccggccacaggagacatgcaaggagcagggtggccagggtgtgtgcctgcccaactatgaggccacgtgctggctgtggggcgacccacactaccactccttcgatggccggaagtttgacttccagggcacctgtaactatgtgctggcaacaactggctgcccgggggtcagcacccagggcctgacacccgtcaccgtcaccaccaagaaccagaaccggggcaaccctgctgtatcctacgtgagagtcgtcaccgtggctgccctcggcaccaacatctccatccacaaggacgagatcggcaaagtccgggtgaacggtgtgctcacagccttgcctgtctccgtggccgacgggcggatttcagtggcccagggtgcatcgaaacactgctggtggctgactttggactgcaagtcagctatgactggaactggcgggtagacgtgacgctctccagcagctatcatggcgcagtgtgcgggctctgcggtaacatggaccgcaaccccaacaatgaccaggtcttccctaatggcacactggctccctccataccc

SEQ ID NO: 186101 - DNA, 1703 bp, Homo Sapiens
  misc_feature (895)..(909): n is a, c, g, or t
ttggcaagggcctggcttgtcgtgggtgcacccggatggggtgggcgtccagatcgacaccatcacgcccgagatccgcgctctctacaacgtgctggccaaagtgaagcgggagcgggacgagtacaagcggaggtgggaagaggagtacacggtgcggatccagctgcaagaccgtgtaaatgagctccaggaggaagcccaggaggctgatgcctgccaggaggagctggcactgaaggtggaacagttgaaggctgagctggtggtcttcaaggggctcatgagtaacaacctgtcggagctggacaccaagatccaggagaaagccatgaaggtggatatggacatctgccgccgcatcgacatcaccgccaagctctgcgatgtggctcagcagcgcaactgcgaggacatgatccagatgttccagaagaagctggtcccatccatgggggggcggaagcgggagcgcaaggctgccgtcgaggaggacacctccctgtcggagagtgaggggccccgccagcccgatggggatgaggaggagagcacagccctcagcatcaacgaggagatgcagcgcatgctcaaccagctgagggagtatgattttgaggacgactgtgacagcctgacttgggaggagactgaggagaccctgctgctttgggaggatttctcaggctatgccatggcagctgcagaggcccagggagaggtaacctctgctctcggcctcagggccctctggctctgcctctccagcctgaagcccactcccccgctcctctccttgctctgtccccccatgtggctgtcatcctctacctgcgtctcccctcttcctttatccttttgcttttctttctccagtttctttaaccagacttcnnnnnnnnnnnnnnncctgacttggccctttggaatgcgtcccatcccatccctccttggctggcctcccccgcttccctttctactccagcagcaggaagatagcctggagaaggtgattaaagatacggagtccctgttcaaaacccgggagaaggagtatcaggagaccattgaccagatagagctggagttggccacggccaagaacgacatgaaccggcacctgcacgagtacatggagatgtgcagcatgaagcgcggcctggacgtgcagatggagacctgccgccggctcatcacccagtctggagaccgaaagtctcctgctttcactgcggtcccgcttagcgacccgccgccgccgccaagcgaggctgaggactccgatcgcgatgtctcatctgacagctccatgagatagagacctgcctcccccttgcacccgaggccctcgcagcagggagctcagcgaggcagagggtggggctgcacagaggggaacatcagctgcagctctgcaccaggccggtccctggggactggggcgctcctccctcaggctttctccctcagtcttggcttctccagggctctggggtgtctggagctaggcttggccctaccattctggggccatttccaccacagttggggctctcctgccttcacgcgtgggtgtctgctacttccccatctttaaaatgctgccagagcgattgcggcccctcaccttgtccacgtatcaagaatgtgaatgtgggacctttcctccatccctgttgtccgggagccagctcactgtcttc

SEQ ID NO: 186102 - DNA, 820 bp, Homo Sapiens
  misc_feature (155)..(166): n is a, c, g, or t
  misc_feature (431)..(478): n is a, c, g, or t
actttgtacaaaaaagttggccctttttctctctatctcttgttctcttgactgcatttctttctctcccttctcccccggctttccagatctggatgtgattcaggttctcttttgtacacattgcacactcatcctccttgcgtcctaaagcnnnnnnnnnnnnagttgagtcatttaatcaaaaagactttttttagaaaaaaatttcctcttgagccatcatgcacatctgactgcagccccagcgagcccttccttccttgtctgactgctcttcttctcgatttcttcttgttctgccttctcggtttgcagccctgacccccgctgtgtgtctggcccttggtgactgtccgtgtttctgttcctgtcattgtaactgtgacttttctctctgtctgcccccccttcctactggttcatgcttnnnnnnnnnnnnnnnnnnnnnnnnnnnnnnnnnnnnnnnnnnnnnnnntcctcatgcacccggcctcgtctctgtagtctctgcacttgtctcccattaaggtcccatccatgggggggcggaagcgggagcgcaaggctgccgtcgaggaggacacctccctgtcggagagtgaggggccccgccagcccgatggggatgaggaggagagcacagccctcagcatcaacgaggagatgcagcgcatgctcaaccagctgagggagtatgattttgaggacgactgtgacagcctgacttgggaggagactgaggagaccctgctgctttgggaggatttctcaggctatgccatggcagctgcagaggcccagggagaggtaacctctg

SEQ ID NO: 186103 - DNA, 2574 bp, Homo Sapiens
ttggggggccgggaccggagccggagctgcggggcgcaccggctagacgcgcgcgggattctcggcgggcacgccccgcggaccatgagcgtccccagctccgggagcagccgcggcgcgggcggtgcgaggccggccgcgcggcgcctttgagccccagccggaggtccagagatcctgagagcccgagcgcccagcgccgcgccgggagagttgagaattatggctgcaggaaaatttgcaagccttcccagaaacatgccggtgaatcaccagttccccctggcctcatccatggaccttctgagcagcaggtcccctctcgctgagcatcgcccagatgcctatcaagatgtgtctatacatggcacccttccacggaagaaaaaaggtcctcctcccataaggtcctgtgatgacttcagtcacatgggcaccctcccccactccaaatccccacggcagaactcgcctgtgacccaggatggcatccaggagagcccatggcaggaccggcacggcgaaaccttcaccttcagggatccacatcttctggacccaactgtggaatatgtgaagttctccaaggagaggcacatcatggacaggacccccgagaaactgaagaaggagctggaggaggagctgctcctgagcagcgaggacctgcgcagccatgcctggtaccacggccgcatcccccgacaggtgtctgaaaaccttgtgcagcgagatggtgacttcctagttcgtgactctctgtccagccctgggaactttgtcctgacctgtcagtggaagaacctcgctcagcacttcaaaatcaaccggacagttctgcgactcagcgaggcctacagccgcgtgcagtaccagttcgagatggagagcttcgactccatccccggcctggtgcgctgctacgtgggcaaccgccggcccatctcccagcagagtggcgccatcatcttccagcccatcaacaggacggtgcctctgcggtgcctggaggagcattatggcacctccccaggccaggcccgggagggcagcctcaccaagggaaggccggatgtggccaagaggctgagcctcaccatgggtggcgtccaggcccgagagcagaatttgcccaggggaaacctcctcagaaacaaagaaaagagtggtagccagcccgcctgcctggatcacatgcaggacagaagagccttgtccctcaaagcccaccagtcagagagctacctgccgattggctgcaagctgccacctcagtcctcgggtgtggacacaagcccctgcccaaactcacctgtgttcaggacgggaagcgagcctgccctgagcccagcagtggttcggagggtctcctcagacgccagggctggggaggcgctgaggggatcagacagtcaactgtgccctaagcccccgcctaagccctgcaaggtgccgttcctcaaggttccctcgtctccctctgcctggctcaactcagaggccaactactgtgaactgaacccagcgtttgccacaggctgcggcaggggagcaaagctaccctcatgtgcccagggaagccacacagaactgctcacagccaagcagaatgaggcgccaggtccccggaactctggcgtcaactacttgatccttgatgatgatgacagggaaagaccttgggaacctgcggcagctcagatggagaaggggcagtgggacaagggcgagtttgtgacgcccctcctggagactgtctcctccttcaggcccaacgagtttgagtcaaagttccttccccctgagaataagcccctggaaacagcaatgttgaaacgtgcaaaagaactgttcaccaacaacgaccccaaggtcatcgcccagcacgtactgagcatggactgcagggttgctaggatacttggagtctctgaagagatgaggaggaacatgggggtgagctcaggcctggaactcattaccttgcctcacggacaccagctgcgcctggacataattgaaagacacaacacaatggccatcggcattgcagtggacattctgggatgcacgggcactttggaggaccgagcggccactctgagtaagatcatccaggtggcggtggaactgaaggattccatgggggacctctattccttctcagctctcatgaaagccctggaaatgccacagatcacaaggttagaaaagacgtggactgctctgcggcaccagtacacccaaactgccattctctatgagaaacagctgaagcccttcagcaaactcctgcatgaaggcagagagtccacatgtgttcccccaaacaatgtatcagtcccactgctgatgccgcttgtgacgttaatggagcgccaggctgtgacttttgaaggaaccgacatgtgggaaaaaaacgaccagagctgtgaaatcatgctgaaccatttggcaacagcgcgattcatggccgagctgcagacagctaccggatgaatgctgagaggatcctggcacttttcaaccagatgaagaaatgaatgaaatctgcagactgaatttcaaatgcga

SEQ ID NO: 186104 - DNA, 1659 bp, Homo Sapiens
ttggggttggtggtgagatgacgaccttagtgctggataatggagcttacaacgccaaaatcggttacagccatgaaaatgtgtcggttattcctaattgtcagttccggtcaaaaacagcacgtcttaaaacttttactgccaaccagatagatgaaataaaagacccttctggactcttttacatcctcccttttcaaaagggctacttggtgaattgggatgttcagagacaagtttgggattacctttttggaaaagaaatgtatcaggttgattttttagatactaatattattatcactgaaccatactttaacttcacttcaattcaagaatcaatgaatgaaattctatttgaagaataccagtttcaagcagtattaagagtaaatgctggggctctcagtgcacataggtatttccgagataatccttccgaattatgctgtatcattgttgatagtggatattcctttacacatatagttccttattgtagaagtaaaaagaaaaaagaagcaattattcggataaatgtgggaggaaaactcttaaccaatcatctaaaggagatcatatcttacaggcagctacatgttatggatgaaacacatgtgattaatcaagtgaaagaagatgtatgctatgtgtctcaggatttttatagagacatggatattgcaaagttgaaaggagaagaaaatacagtaatgatagactatgtcttgcctgacttcagtacaattaaaaagggcttttgtaagccaagggaagagatggtgttgagtggaaaatacaaatctggggaacaaattcttcgtttggccaatgagagatttgctgttccggaaatactctttaatccttctgatataggcattcaagaaatgggaattccagaagctattgtctattcaattcaaaatctacctgaagaaatgcagccgcatttttttaagaacattgtcttgacaggaggaaattcccttttcccaggatttagggatcgggtttactcagaagttcgatgtcttactccaacagattatgatgtttctgttgtgctgcctgaaaaccctattacttatgcctgggaaggtggaaaattgatatcagagaatgatgattttgaagatatggtggtaacaagagaagattacgaagaaaatggacatagcgtctgtgaagagaaatttgatatttaagcaacatttttgaatgaaagttgtgaccataaggtttaatttcaaagttccttttaaaagaggttaaggaactgtgttaccttttgtcctaagaaaaaggcttgaatttatgtaaatactttgatcgattgctaattttcaaaggcttcttaggtaggttactacagtaaactgtaactcagtccacattttcatttaggagctagactaccataacaatgcttatgctgtttccaagggtaggttatttttcattaaaagaagaatgaatgcattttaagtttaattcttcatagctgaaagcacaaatttaacggcttcactggacagttttccttagaaggtagttttgtgtgactgtgactaaactattttattttaaaatgtcattcttatttatacattctaaagttggaaagactgatcttatatgtgtataatgtttattttg

SEQ ID NO: 186105 - DNA, 933 bp, Homo Sapiens
  misc_feature (178)..(229): n is a, c, g, or t
ttggcttgttttttctttaaaattagagggtccataaattcaggacatagggaaaaaggaacatttactattttgtagcggtaaacaaggttcctttcctttttgggttgctctactcatatgaaatgtatgcttatttctgtaccttaaacaattttctgttgggttgggtagagcnnnnnnnnnnnnnnnnnnnnnnnnnnnnnnnnnnnnnnnnnnnnnnnnnnnntagtaatttatgtttcaggcatttcagttttcctgtaaaatcatctgggttcatttatacctttattttcagccctattacttatgcctgggaaggtggaaaattgatatcagagaatgatgattttgaagatatggtggtaacaagagaagattacgaagaaaatggacatagcgtctgtgaagagaaatttgatatttaagcaacatttttgaatgaaagttgtgaccataaggtttaatttcaaagttccttttaaaagaggttaaggaactgtgttaccttttgtcctaagaaaaaggcttgaatttatgtaaatactttgatcgattgctaattttcaaaggcttcttaggtaggttactacagtaaactgtaactcagtccacattttcatttaggagctagactaccataacaatgcttatgctgtttccaagggtaggttatttttcattaaaagaagaatgaatgcattttaagtttaattcttcatagctgaaagcacaaatttaacggcttcactggacagttttccttagaaggtagttttgtgtgactgtgactaaactattttattttaaaatgtcattcttatttatacattctaaagttggaaagactgatcttatatgtgtataatgtttattttgtacctagagtacatttaaaagggtggaagactaacctaataaagttttttt

SEQ ID NO: 186106 - DNA, 1179 bp, Homo Sapiens
  misc_feature (989)..(998): n is a, c, g, or t
gtttcttgctacccattgtgtttattaatagacatgatgggtttttttcagttgtcatatagattttcattattttcccttccattttcaaaatttaatgttaccagtttctccaaagacaagaaggcatctagtattaatgatggaagagtttattttctcttaccctttactaatttaaacattaggctggtgagccaccgcacctggccagaagccactaactaaaataggcacacatgacacagcatgtggttaatagctgtgtcttgaattatcctctaaataaccaaatttagttgtatgtatttgtaaaggatatggcttcagaagctatcttttgttctctgtcgatataactcttaagggcattcctgacccaagaaagactccttgcgtttgtaactgtggtctaatacccaaatgtgccctgttcttatggatacagtctcttgaagcatacctcaaagtcatagagagaatatggcatttgaaagaaatcgtttgccttggatcatatgagttattttgtgaaacaacagctgacttttcagaaaaggagcaactacttttatatgctaaaagtatttcataactttctgggaaaccttatttaggtataaatggtcatcttattatttttcaaaaaggtatattttaataattgtacaatttatatacagtttgtgaccagaatttgtaagttgttggtgtcatatcaaggatcttttaaattatgccactacaggatgtatcatttcaagtctattttgcacagctaaacagtagcaaaagatgccaattagcatgataatggtgtcttcatttttactgtatttaactgaaacctaacacatgttgaaaaccatatcatacctagtttatctcttaatttcaaactatgtacttgtaaaaatgatgtaaatttgcactgggaacctgggaaagagtgactgataatttttggtgcgtgatttttagatttgtcnnnnnnnnnnaagaagaatttgttactatgtaaaccctgacattaaatgttttatctctaccagcatcaggaggaatcactgctttaagggtattatgtaatgcctagtgccttctatttacagtgaaaaagaggttttgtgaaggcatttatggtcattaccaaaaactaaattaaaggccctggatttt

SEQ ID NO: 186107 - DNA, 1782 bp, Homo Sapiens
ttggctcagagaagccgggggtgctggaaatgtaaacaagaatagactgttcattcctgatggcttttagtctatactaacatattgtttgtcatggcatccgagactgaaaagacccatgctttactgcagacttgtagcactgaatctcttatttccagccttggtctgggggcattttgcctcgtagctgacagacttcttcagttttccacaattcagcaaaatgactggcttcgtgctctctcagataatgcagtacattgtgtaattggcatgtggtcatgggcggtagtcactggaatcaagaagaagactgactttggagaaatcattttagctggatttttagcctctgttattgatgtagaccacttttttctagctggatccatgtctttaaaggctgctttgactctcccgcgaagacctttccttcactgttctactgtgattcccgttgtggttctgaccctgaaatttactatgcaccttttcaagctcaaagactcatggtgctttcttccctggatgttatttatatcctggacttcacatcatatccgagatgggattcgtcatggtttgtggatatgcccatttggaaaaacttctcctttgccattctggctttatgtaataatcacatcatctttacctcacatctgttcattcgttatgtatttaacaggaaccagacaaatgatgtcttcaaaacatggagttcgtattgatgtctgaggtacacggcagtcttagagaagcaaatggctcagatgatgataattaagagtagccaacattaaagttaatttttaaaaatacagttaggtgtttatattatttagttattataattctgcaatcctcttgctcaggaagtgtatacaacttttttaaaaattatacttgttattattctacttctctcttctatgacaactctagtgcaatattagagtttcatttattccacaatatatttttactgtttttttctatttatctggctttactagtagttcttttagattaacatccagttcattttctggaaatatacctggaatttagtccatttcctaatgaaaaacagctcaaattttagggtaactaatttgtaaagagttaacattatatttggatccaattttcctgagatattgaaatagtgaaatcaccaaataaatgatatgaatcatttaactagacaaatgtatagttaatgctaacatgtatttattttcatatatgttgatcctgagtgaaatttaatttgcagaatgctttatgagttatgattactggcaaaaccttcagagcacttgtgacacatcattataatatccagtagctaacattagatctagcttattatttcagaaattaatttaggaaataattattaaaacatgttggctacagtagcactttactgaagtagtattttttggtatctctagcctagaatctcgtgtgttagttttaactgttttgaaaataataagtaacattaacaaaatgttgatatttggatcataaccgtaacatttgaatttatgcaaaaaaaagaccagaaatgtcatttcaaatgtaaattcctgaatgtaccattaaaattattttagttgctatcagtttgtttatatactattttatatactattctaaaatattttactctgcctgatactgaaagacagcatatatttttttcaaaataaagttttaggaaatttggctttttcctttttctttcaggttgatcttctattaaaatga

SEQ ID NO: 186108 - DNA, 922 bp, Homo Sapiens
tctttttgccaatcctttgacatttctgaattgttttcatcatctgaattaacattgttgtttcattattatcttcagaaaagcatctagagccattttcattttctgctctatcactgttgctacaagattcacaagactgaaaatctacatccgactggctcttgtcttcttccattgtctcctcagtggttatggtttgcggatcttcttctacttccatgacttgctctttcaattcttcatgaagcaaatccattaaacatcgaaggaattcttgagcatcctgctgagaatacccccgaaatgttggatttacagttttaattccttgaaacagagtagtaggcacaacagatcctggcctgcttttatgccacagctctgtcattagtttgagataacttttacaaatggcaggtttcttatctgttcgagctagtcctccacaatcaagaaaaaactgtgtcaaaggtgggcaattagaaagagcctgcaaagctgcattcatgtaacaagtatttccaatatttttcaaacctgtaagacctctggccctaagttcatcttcttcatccgcttctatatccagatcatcaaatacggcaaccagaggagtttttaatgttgtattactgggtattttaaaatcctggacactgttttcttgtatttggtgaggttgtcttacatgaggcaatgaaggctgagttcctaatttcctatccaaaaatacttctttgctgcaagcataacaccatactcgaagagtggtaaggttcacagttagataatgctttgtctcctgagaatgtatggtgctgtgatctacttgtgattcaccacagccaacatatgaacatctattctccagacatgcccaaagatttggtccttggactttacaatcctgccaagccaa

SEQ ID NO: 186109 - DNA, 4061 bp, Homo Sapiens
  misc_feature (1456)..(1773): n is a, c, g, or t
ttggcaaaatgttcccactccaactcacaatctgtgggaaagtagcagctctggtttctagaaaaattcagaaccttccctttccttctttctggaggcaaagggtgaaactttaaagcctgacagaacagaaggcagtttatctcagcagtgaagggatggcagtaatgggatggcagtcagggtggaccagcagaatgggtgaagagatgtattggattggctgacttgctaatcggagctattctttttttccccttttgaaatcaggtggagatgttacagccaaaaatatctggttggcagaaagtgttctggatatcctgacagagcaaagggagtgggtcctgaagagcagcatcctcattgccatggctgtttacacgtacctccgcctcatcgtggaccaccatgggactgcccagctccaggccctgcgacagaaggaagtagacttctgcatctcactgcttcgggaacggttcatggaatgtctgatgattggtcgggatctcgtaagactacttcagaatgttgctaggataccagaatttgaactgctttggaaagatattatccataatcctcaggccttgagtcctcagttcacaggtatcctacagcttcttcagtcaagaacatcccgaaaattcctagcatgtcgtctaaccccggacatggagactaaactcctcttcatgacatcccgggtgcgatttggtcaacaaaagcgataccaagattggttccagcgccagtacctgtcaactccagatagtcagtctctgcgctgtgacctcattcgctacatctgtggggtagtccacccttctaatgaagtactgagttcagatatcttgccccggtgggccatcattggttggctcctgacaacgtgcacgtcaaatgtcgctgcctccaatgccaagctggctttgttttatgactggctgttctttagtccagacaaggatagcattatgaacatagaaccagccatcctggtcatgcaccactccatgaagccccacccagccatcactgccacactcctggacttcatgtgccgcatcattcccaacttctatccaccattggagggccacgtgcggcagggtgtcttttcctccctcaaccacattgtggagaaacgggtcttggcgtaaggaatttggtgggggaaggaggttgttttcccatttttcattaggtccaggtgtatccaaatgttgccatagcactgctggcccttttctctgacaggtgtaaaaagtattggctctacctcagactgctgggcatatgtcttcttggctcttagaggaatttctctcctgccatcgtattacaaaggtcttcaaatgccttcatgttccctgttgacccccttcagggatctgagtatggtccagttagactgattgtgcttagacctatctcaactccatgttgagtnnnnnnnnnnnnnnnnnnnnnnnnnnnnnnnnnnnnnnnnnnnnnnnnnnnnnnnnnnnnnnnnnnnnnnnnnnnnnnnnnnnnnnnnnnnnnnnnnnnnnnnnnnnnnnnnnnnnnnnnnnnnnnnnnnnnnnnnnnnnnnnnnnnnnnnnnnnnnnnnnnnnnnnnnnnnnnnnnnnnnnnnnnnnnnnnnnnnnnnnnnnnnnnnnnnnnnnnnnnnnnnnnnnnnnnnnnnnnnnnnnnnnnnnnnnnnnnnnnnnnnnnnnnnnnnnnnnnnnnnnnnnnnnnnnnnnnnnnnnnnnnnnnnnnnnnnnnnnntaagagaagctctgatattgaccttcatcatgttccccatttagacacctagctcccctgtttgacaaccctaagttggataaggagctgcgggcaatgctgagagagaagtttcctgagttctgcagctcaccctccccacctgtggaagtcaaaattgaggagccagtttccatggagatggacaaccatatgtcggataaggatgagagttgctatgacaatgcagaggcagccttcagtgacgatgaagaggatctcaacagcaaaggaaagaagagggagtttcgcttccaccctatcaaggagacagttgtggaggagccagttgatatcaccccttaccttgaccagttggatgagtccctgagggacaaagtactccagctacagaaggggagtgatacggaggcccagtgtgaggtcatgcaggaaattgtggaccaggtcctggaggaagactttgactcggagcagctgtctgtccttgcttcctgcctacaggagctcttcaaggcccactttcgaggggaggtcctgcctgaggagattactgaggagtccctggaggagtctgtaggaaagcctctgtacctaatatttaggaacctatgtcagatgcaggaagacaacagcagcttctctctacttctagaccttctctccgagctatatcagaagcagcccaagattggctaccacctgctctactacctgagggccagcaaagccgccgcagggaagatgaacctgtacgagtcatttgcccaggctacccagctgggcgatctgcacacctgcctgatgatggacatgaaggcctgccaggaggacgatgtgcggctcctgtgccacctcacgccctccatctacacagagtttccagatgaaaccttgaggagcggagagctgctgaacatgatcgtggctgttattgactctgcacagctccaggagctggtctgccacgtgatgatgggtaacctggttatgtttcgaaaagactcagttctcaacatactcattcagagcctagactgggagacctttgagcagtattgtgcctggcagctctttctggcccacaatattcccctggagaccataatccccatcctgcagcacctcaaatacaaggagcacccagaggccctgtcctgcctactgcttcaactccgaagagaaaagcccagcgaggagatggtgaagatggtgctgagccggccctgccatcctgacgaccagttcaccaccagcatcctgcggcactggtgcatgaaacatgacgagctgctggccgagcacatcaagtccctgctcatcaagaacaacagcctgcctcgcaagagacagagcctgaggagctctagcagcaagctggcccagctgactctggagcagatcctggagcacttggacaatctgcggctcaacctgaccaacaccaagcagaacttttttagccagacgccaattctccaggcgctgcagcatgtccaagcgagctgtgacgaagcccacaagatgaaattcagtgatctcttctccctggcggaggaatatgaggactcttccaccaagccacccaagagccggcgaaaagcagctctgtccagccctcgaagtcgaaagaatgccacacagccccccaatgccgaagaagagtcgggctccagcagtgcttcagaagaggaagacacgaaaccgaagcctaccaagcggaaacgaaaagggtcctctgcagtgggctctgacagtgactgaggccctgcattccccatcccacccccggctggactgccctctccttcttggtgattcaaaggttaatagaggctgaggagattgcaggggaaacacccttgctgcatccccaagctcccccggtggaaggaggagctttctcctctggctgagtttgagaagctgccatgcagcccctagccccttccctcctcctggggcctccagcccctcacactgctgttcccagtgatatttgggatctgactgaagccagaggctctgtaaaatcagaccatagtggaagtcctcagccccctggccccttccgcaatctcctctcccagtctcccaaagagccatttcaacagagaagggaaatgacaaaggggcagctgggccagataagctaggatgagagcagagactcagtgtgtgggtgtcccttcctgcttccccttcaggtcttggtttgttctgaagggacgttttatagtcactatccacatgccagtgtgaaatgggcatctatgacgtggtcaagg

SEQ ID NO: 186110 - DNA, 2475 bp, Homo Sapiens
  misc_feature (458)..(485): n is a, c, g, or t
  misc_feature (2232)..(2292): n is a, c, g, or t
ttggcatttgttgaaaagattattcttccctattaaattatgttggcacttctaaaagaaggattccaaaagtagattaagaagcagttttaaaagaggattccaaagatgttacttactgttccagtaactcatgtcctccagaggtgatttttgaagagtgcgtatttttggcagttactttccatggcagttcagttacttcatgttcattaatttccctgactactggttgtcattttaattgtttaattgtagtaataatttaattgtttgttattttgaaggaaggggaagggaggttcaatgataagaaaagcattcttcctttttaatttaaataattagaacatacaatttgtactgaaatgatgtaaaaaggctcttattattgaatcattggttttgcttatccttttgtttgaagtataacttgtcatatcctttatagccacttnnnnnnnnnnnnnnnnnnnnnnnnnnnngcaatttggaactcttcaaagaagaattaaagcaaattcaagaggaacgtgatgagagacataaaacaaaaggcagattaagtcgatttgaacctcctcagtcagattctgatggtcagcgtcgttctatggacgcgccttcaagaagaaatagatcatctgttcttgatgattacgcacctggctcacatgatgtaggagatccaagcactactaatttataccttggaaacattaatccacagatgaatgaagaaatgctgtgccaagaatttggaagatttggaccgttagccagtgtgaaaatcatgtggcctagaactgatgaagaaagagccagagagagaaattgcggctttgtggcctttatgaatagaagagatgctgaaagagctttaaaaaatttgaatggaaaaatgattatgtcttttgaaatgaagttaggttggggtaaagctgtacctattcctccacatccaatatacattccgccttctatgatggaacatacgcttcccccacctccatccggactgccttttaatgcgcagcctagagagcggttaaaaaaccctaatgctcctatgttaccgccacctaaaaacaaagaggattttgagaagactctgtcgcaagccatagtcaaagtggttatcccaacagaaaggaatttgctcgccctgatacatcgaatgatagagtttgttgtacgtgaagggccaatgtttgaagctatgattatgaacagagaaatcaacaatcctatgttcaggttcttatttgaaaaccagacaccagcccatgtttactataggtggaagctttattctattctgcagggagattctccaactaaatggcggacggaagattttcgtatgttcaaaaatggatctttttggaggccaccaccattaaatccgtacttgcatggaatgtcagaagagcaagaaacagaagcttttgtagaggaacctagtaaaaagggagcacttaaggaagaacagagggataaattggaagaaatcttgcggggattaactccaaggaaaaatgatattggagatgcaatggttttctgtcttaataatgctgaagctgctgaagaaatagtggattgcattactgagtcgttgtccatcttaaagacaccccttcctaaaaagattgccagattatatttggtttctgatgttttgtacaactcttcagccaaagttgctaatgcttcatattatagaaaattttttgaaacaaagttatgtcagatattttcagacctcaatgccacctatcgtacaattcaaggccatttacaatctgaaaactttaagcaacgggtaatgacttgcttcagagcatgggaagattgggcaatttatccagaaccatttttgatcaaactacaaaatattttcttaggacttgtaaatattattgaagaaaaggaaacagaggatgttccagatgaccttgatggtgcccccatcgaggaagagcttgatggtgcacctctggaagatgtagatggaattcctattgatgctactcccatcgatgatcttgatggagtccctataaaaagtcttgatgatgatcttgatggagtgcctttggatgcaactgaagactcaaaaaagaatgagcctatatttaaagttgccccatcaaaatgggaagctgtggatgaatctgaattggaagcacaggctgttacaacttctaaatgggaattatttgaccagcnnnnnnnnnnnnnnnnnnnnnnnnnnnnnnnnnnnnnnnnnnnnnnnnnnnnnnnnnnnnntactcaaagttccaaatctgaagaacatcatttgtactctaatccaatcaaagaagaaatgactgagtctaagttctctaagtactctgaaatgagtgaggaaaaacgagccaaacttcgtgaaattgagctcaaagttatgaagtttcacatgaattggaatctgggaaaagacctaaaaaa

SEQ ID NO: 186111 - DNA, 1376 bp, Homo Sapiens
  misc_feature (571)..(621): n is a, c, g, or t
  misc_feature (871)..(927): n is a, c, g, or t
aaaaaatatggtaatgatatatagttattttctttaaagtttaaaaaaacatcagtttaaaggcaaatttagcaaatcttgatgatcattctcatgaactgaaatttgagacatatagcccaaaataaaagtttgttgtctgtttcctgtttctttagcaacgggtaatgacttgcttcagagcatgggaagattgggcaatttatccagaaccatttttgatcaaactacaaaatattttcttaggacttgtaaatattattgaagaaaaggaaacagaggatgttccagatgaccttgatggtgcccccatcgaggaagagcttgatggtgcacctctggaagatgtagatggaattcctattgatgctactcccatcgatgatcttgatggagtccctataaaaagtcttgatgatgatcttgatggagtgcctttggatgcaactgaagactcaaaaaagaatgagcctatatttaaagttgccccatcaaaatgggaagctgtggatgaatctgaattggaagcacaggctgttacaacttctaaatgggaattatttgaccagcnnnnnnnnnnnnnnnnnnnnnnnnnnnnnnnnnnnnnnnnnnnnnnnnnnnatgaagaagatactcaaagttccaaatctgaagaacatcatttgtactctaatccaatcaaagaagaaatgactgagtctaagttctctaagtactctgaaatgagtgaggaaaaacgagccaaacttcgtgaaattgagctcaaagttatgaagtttcaggatgaattggaatctgggaaaagacctaaaaaaccaggccagagttttcaggagcaagtagaacactacagagataaacttcttcaacnnnnnnnnnnnnnnnnnnnnnnnnnnnnnnnnnnnnnnnnnnnnnnnnnnnnnnnnnaattggaatctcgctccaaagacaagaaggaaaaagatgagtgtactccgacaaggaaggaaaggaagaggcgacacagtacatcccccagcccatctcgcagtagcagtggtagacgagtgaaatccccatcaccaaaatcggagcgatcagagcgttcagaaagatctcataaagagagctcacggtccaggtcatctcacaaagattctcctagagatgttagcaaaaaagccaaaagatcaccatctggttcaaggacacctaaaaggtctaggcgatcacggtctagatctcctaaaaaatcaggaaagaagtccagatcccagtccagatctccacacaggtctcataaaaagtcaaagaaaaacaaacactgacgtaaatttttaagatgctgtcacttattggaaatgcgatttgttttgtgcctgaacggtctgtttttt

SEQ ID NO: 186112 - DNA, 1441 bp, Homo Sapiens
  misc_feature (636)..(690): n is a, c, g, or t
  misc_feature (932)..(982): n is a, c, g, or t
acaaaaaagttgggagtcgttgtccatcttaaagacaccccttcctaaaaagattgccagattatatttggtttctgatgttttgtacaactcttcagccaaagttgctaatgcttcatattatagaaaattttttgaaacaaagttatgtcagatattttcagacctcaatgccacctatcgtacaattcaaggccatttacaatctgaaaactttaagcaacgggtaatgacttgcttcagagcatgggaagattgggcaatttatccagaaccatttttgatcaaactacaaaatattttcttaggacttgtaaatattattgaagaaaaggaaacagaggatgttccagatgaccttgatggtgcccccatcgaggaagagcttgatggtgcacctctggaagatgtagatggaattcctattgatgctactcccatcgatgatcttgatggagtccctataaaaagtcttgatgatgatcttgatggagtgcctttggatgcaactgaagactcaaaaaaagaatgagcctatatttaaagttgccccatcaaaatgggaagctgtggatgaatctgaattggaagcacaggctgttacaacttctaaatgggaattatttgaccagcatnnnnnnnnnnnnnnnnnnnnnnnnnnnnnnnnnnnnnnnnnnnnnnnnnnnnnnnaagatactcaaagttccaaatctgaagaacatcatttgtactctaatccaatcaaagaagaaatgactgagtctaagttctctaagtactctgaaatgagtgaggaaaaacgagccaaacttcgtgaaattgagctcaaagttatgaagtttcaggatgaattggaatctgggaaaagacctaaaaaaccaggccagagttttcaggagcaagtagaacactacagagataaacttcttcannnnnnnnnnnnnnnnnnnnnnnnnnnnnnnnnnnnnnnnnnnnnnnnnnntaaagaaaaattggaatctcgctccaaagacaagaaggaaaaagatgagtgtactccgacaaggaaggaaaggaagaggcgacacagtacatcccccagcccatctcgcagtagcagtggtagacgagtgaaatccccatcaccaaaatcggagcgatcagagcgttcagaaagatctcataaagagagctcacggtccaggtcatctcacaaagattctcctagagatgttagcaaaaaagccaaaagatcaccatctggttcaaggacacctaaaaggtctaggcgatcacggtctagatctcctaaaaaatcaggaaagaagtccagatcccagtccagatctccacacaggtctcataaaaaagtcaaagaaaaacaaacactgacgtaaattttttaagatgctgtcacttattggaaatgcgatttgttttgtgcctgaacggtctgtttttt

SEQ ID NO: 186113 - DNA, 1364 bp, Homo Sapiens
ttggggcaaatggaacgtgaaaggaaagccatagcagaaaaatatattatgacatctgcaaaactcattgctcctgtaattgaaacatcttttgctgcaggttatgattggctgtagagatcttaaaagtgttggaaaaaaaggacagtagagtgaaaagtgcagctgcaaccaatctctcagccctgtattatatggacagaccccttcccactaggtgtgtaggctgctatggaacagagccttgaagtgtcttagaagcccacttcgctacctgggagagaaggtctgctagggaaaggattttgcacaagccagcagctatgcagatatagctgtgaactctgatagatataatccagcagctcttactaataaagggaatacagtttttgcaaatggtgattatgagaaggccgctgaattctataaagaggctctaagaaatgattcttcttgtactgaagcactttataatattggccttacctatgagaaactaaatcggctagatgaggctttggactgtttcctgaaacttcacgcaatcctacgaaacagtgccgaagttctttaccagatagcaaatatatatgaattaatggaaaatcccagtcaagctattgaatggctaatgcaggtggtcagtgttattccaaccgatcctcaagttttatctaagctaggagaattatatgatcgtgaaggagataaatctcaagcatttcaatattactatgagtcatataggtattttccttgtaatattgaagtcattgagtggcttggagcctattacattgacacccaattttgggaaaaagctattcagtactttgaaagagcttctcttatacagcctacacaagtgaaatggcagctgatggtagctagttgtttcagaagaagtggtaactaccaaaaagcattagatacttacaaagatactcacagaaaatttccagaaaatgtcgaatgtctgcgtttcttagttcgtctctgcacagatcttggattaaaagatgctcaagaatatgccagaaaactgaagaggttggaaaaaatgaaagaaataagggaacagcgcataaagtcaggcagagatggcagtgggggctcccgtggcaaaagagaaggaagtgctagcggtgatgcctcctatgtggacccacttggccctcaaatagaacgaccaaaaactgcagccaagaaaaggatcgatgagggatgattttgctgatgaagaattaggagatgatttgcttccagaatatattcactttaatatttattaaaggaaagaaattgccttatgagatcatcctcatgttaaaccttggattaaaatatctaacctgtaatta

SEQ ID NO: 186114 - DNA, 1953 bp, Homo Sapiens
ttgggtgtgtgtcttaataaattatgtttcttaggcaacttgttccagcgatggcatgttcctctagaactccagatgacaagacaaatggctagctctggtgcatcagggggcaaaatcgataattctgtgttagtccttattgtgggcttatcaacagtaggagctggtgcctatgcctacaagactatgaaagaggacgaaaaaagatacaatgaaagaatttcagggttagggctgacaccagaacagaaacagaaaaaggccgcgttatctgcttcagaaggagaggaagttcctcaagacaaggcgccaagtcatgttcctttcctgctaattggtggaggcacagctgcttttgctgcagccagatccatccgggctcgggatcctggggccagggtactgattgtatctgaagatcctgagctgccgtacatgcgacctcctctttcaaaagaactgtggttttcagatgacccaaatgtcacaaagacactgcgattcaaacagtggaatggaaaagagagaagcatatatttccagccaccttctttctatgtctctgctcaggacctgcctcatattgagaatggtggtgtggctgtcctcactgggaagaaggtagtacagctggatgtgagagacaacatggtgaaacttaatgatggctctcaaataacctatgaaaagtgcttgattgcaacaggaggtactccaagaagtctgtctgccattgatagggctggagcagaggtgaagagtagaacaacgcttttcagaaagattggagactttagaagcttggagaagatttcacgggaagtcaaatcaattacgattatcggtgggggcttccttggtagcgaactggcctgtgctcttggcagaaaggctcgagccttgggcacagaagtgattcaactcttccccgagaaaggaaatatgggaaagatcctccccgaatacctcagcaactggaccatggaaaaagtcagacgagagggggttaaggtgatgcccaatgctattgtgcaatccgttggagtcagcagtggcaagttacttatcaagctgaaagacggcaggaaggtagaaactgaccacatagtggcagctgtgggcctggagcccaatgttgagttggccaagactggtggcctggaaatagactcagattttggtggcttccgggtaaatgcagagctacaagcacgctctaacatctgggtggcaggagatgctgcatgcttctacgatataaagttgggaaggaggcgggtagagcaccatgatcacgctgttgtgagtggaagattggctggagaaaatatgactggagctgctaagccgtactggcatcagtcaatgttctggagtgatttgggccccgatgttggctatgaagctattggtcttgtggacagtagtttgcccacagttggtgtttttgcaaaagcaactgcacaagacaaccccaaatctgccacagagcagtcaggaactggtatccgatcagagagtgagacagagtccgaggcctcagaaattactattcctcccagcaccccggcagttccacaggctcccgtccagggggaggactacggcaaaggtgtcatcttctacctcagggacaaagtggtcgtggggattgtgctatggaacatctttaaccgaatgccaatagcaaggaagatcattaaggacggtgagcagcatgaagatctcaatgaagtagccaaactattcaacattcatgaagactgaagccccacagtggaattggcaaacccactgcagcccctgagaggaggtcgaatgggtaaaggagcatttttttattcagcagactttctctgtgtatgagtgtgaatgatcaagtcctttgtgaatattttcaactatgtaggtaaattcttaatgttcacatagtgaaataaattctgattc

SEQ ID NO: 186115 - DNA, 1039 bp, Homo Sapiens
caatagatgaaatctggcttgtacaatggaccacagtccccagaggaaatgagatgcaagggcaaattattaacttcaagcaacatttcttcttttataatggatttttcttcagtactgaggttttcaaagtcattttggaatgcaggcaagtaactggaaataaaatggagctgttgtttcttggtgggatacttccggatgtttgctctgaaaaaagggtatttttcatagctataatcatacatccactcacagaagtgatttccaatgtcgaatcccctgtaattgtaactgctgtattcgaaatcaatgagcatcagtttctgtttttcagaattctctcggccttccagcaacaagatattaccttcttgacagtcattatgacaaaatacaactggagatggagtagattcaagcaatgatctcaggttttccagttccaagggcagattgtaactgagcaatttgtggagctttttaattctggattcctcagtaaatttaattctcagcacttcctttagatacttttccattgtgccaaaaagccattttggttccttattgaatggcattttcataccatgaaatgtagccattttctcggcgatttctgcagaaatatctggcaaacttaattcttcagtatctaatcgccggctcgggatgaactgctccagtcggccttggggaaagatgccatagagttttggcccaagtgacctctctgcgagaatggcaaacataacgctctccagaaccatggcctcagccccttgaaattcattttctttctgagcttgttcggatccctctttattacaggacctctttcacaatttcattgttagaggaaagtcaatagagtgcactcttccaatcaggccttctaaagacaagcggtcaggctgagtctctcaccaatttagctacgtggttctctcaagtcaacctgcaagaacagggagtgtaaacatgcctgtggacagctgtggtcagcacagaacttggacagagaagaaagcgctgccaa

SEQ ID NO: 186116 - DNA, 1528 bp, Homo Sapiens
  misc_feature (781)..(828): n is a, c, g, or t
  misc_feature (1159)..(1175): n is a, c, g, or t
actttgtacaaaaaagttggataaatgattgatgcaaatttgcactctgctccccctctgtaaggatactgatagcacaacctcttccccccaccccgccccgccttttggtcgtccatccctgtccctttctggccctcttcctgtagcccagtctcaggctttcctcttcctgaagccctacagagttagggaatggagcccaggcaccaggggtctaaagtgtgagccactgagaagagagacgccaactgcacccttgccacttccaaagcaatagaggcagagtggtcccctctttgccacctaggccagttttgaccctggcattaactggccttagaagaaactggatcctggtagggggtggcattttgtttgtttcttccaatctgctgaatcttttgactgcaccttacaaacagcagtctgctcccatgaccctctgcccacttccattggtctccaggccccaataatctggggttgaaactttgaggaaatgccagtgacttattccagagtgcctcagttaggggaacttctctgtaaagaaccctgggtattgagcaaaaaccttattatcgttaatgacctataattggaagcttcctgcctttttctttggttgctcctgtggaaaatactgaaaagattactttgttttattttgttgtctttttataaaaggggaggtggagagaccccttcagagcagggattgtgccgggagagtgcctctgactttgggacatttcatccacagaaatttccaagccannnnnnnnnnnnnnnnnnnnnnnnnnnnnnnnnnnnnnnnnnnnnnnnaaaaacatgcatttttaccgtgcacgtaaattggtcagcagaaaagggagcccagaaaaggcagcagatggaccatgcccttgctgggttttccttttctttgggactgtgaggggaaatggtttttagaggtgagggttggtccatgtggaggaaagaagtgtctctgttgggggacagaggaacctggggagtccatcgcatgtcctacaatctgctcttagacacggccttgccaggagagcctgccctcagactgcaggaccagaacccctgcctccatctttccaagcaccggggcgaaaaaccacaaaggaaaggaagaaaattnnnnnnnnnnnnnnnnnaaatcacttggtgattaaaaaaataactgctccataaataaaactcctaaagtcacttatgtttaaagggtttggttgtgttttttgtttttcggagaaatattgtaaatatatatttttttgttgctgatttagagtcaatctccaatgttgtgctaaaaagtttaaattaaatgtaagcattaaggggataagtcttatgctatctcagttgacacattgaggttattttgggccagagaaggaggaagctagttggactttgttttgttttccaaaagttctccactattggttttagagagagcaatgacacgcacacacctgacacgtgggaatgggtgatatttgtg

SEQ ID NO: 186117 - DNA, 1024 bp, Homo Sapiens
  misc_feature (396)..(406): n is a, c, g, or t
gggtcaaaactggcctaggtggcaaagaggggaccactctgcctctattgctttggaagtggcaaagggtgcagttggcgtctctcttctcagtggctcacactttagaccccgtggtgcctgggctccattccctaactctgtagggcttcaggaagaggaaagcctgagactgggctacaggaagagggccagaaagggacagggatggacgaccaaaaggcggggcggggtggggggaagaggttgtgctatcagtatccttacagagggggagcagagtgcaaatttgcatcaatcatttataagctcttgccataggctgctgctactgagcatctcctcacacacttaaaaatattgacccaaaagaaattccgacctttctttctttcnnnnnnnnnnnaaagtgcaaaaagctctctgctgccctagagagaggatctttggacaggccgttcaatgcaaagtaaaagggggcagctgatggggctcaacaaagggcggtggagcgggagacaccatgctcccctccctccctccctccacacacacgcgcagaatacactcagccacacacacagaggcacgtgcacacccccttccatggctgcaggcagagggctggtgactggcttctaagcaggaccccctgactgccctgaaagttcagtgagccactggggctagacacaggcctgggctcagggggctccgctaaaccagaggcctggaggagcctggctgggaggcaggttggggcttggcccagtcctctgccgcctccagcttgggggagataggctgctccctctgaggacgtgcatcctgggaaagccttcttcaggcagaatgaagacacatggaaaagggcagtcagtgggaggcaaaagagagagggggaacaaggagatggtgcctgtctcagaatccacttgggtagcaacgaaatgggtgtgtccctggggtagacagttccagctcctctgaagagcttcaaccccaataagtgcaataaggccaa

SEQ ID NO: 186118 - DNA, 1406 bp, Homo Sapiens
  misc_feature (87)..(97): n is a, c, g, or t
  misc_feature (949)..(1011): n is a, c, g, or t
  misc_feature (1326)..(1342): n is a, c, g, or t
ttggatcagctgcccccttttactttgcattgaacggcctgtccaaagatcctctctctagggcagcagagagctttttgcactttnnnnnnnnnnngaaagaaagaaaggtcggaatttcttttgggtcaatatttttaagtgtgtgaggagatgctcagtagcagcagcctatggcaagagcttataaatgattgatgcaaatttgcactctgctccccctctgtaaggatactgatagcacaacctcttccccccaccccgccccgccttttggtcgtccatccctgtccctttctggccctcttcctgtagcccagtctcaggctttcctcttcctgaagccctacagagttagggaatggagcccaggcaccaggggtctaaagtgtgagccactgagaagagagacgccaactgcacccttgccacttccaaagcaatagaggcagagtggtcccctctttgccacctaggccagttttgaccctggcattaactggccttagaagaaactggatcctggtagggggtggcattttgtttgtttcttccaatctgctgaatcttttgactgcaccttacaaacagcagtctgctcccatgaccctctgcccacttccattggtctccaggccccaataatctggggttgaaactttgaggaaatgccagtgacttattccagagtgcctcagttaggggaacttctctgtaaagaaccctgggtattgagcaaaaaccttattatcgtttaatgacctataattggaagcttcctgcctttttctttggttgctcctgtggaaaatactgaaaagattactttgttttattttgttgtctttttataaaaggggaggtggagagaccccttcagagcagggattgtgccgggagagtgcctctgactttgggacatttcatccacagaaatttccaagccaannnnnnnnnnnnnnnnnnnnnnnnnnnnnnnnnnnnnnnnnnnnnnnnnnnnnnnnnnnnnnnaccgtgcacgtaaattggtcagcagaaaagggagcccagaaaaggcagcagatggaccatgcccttgctgggttttccttttctttgggactgtgaggggaaatggtttttagaggtgagggttggtccatgtggaggaaagaagtgtctctgttgggggacagaggaacctggggagtccatcgcatgtcctacaatctgctcttagacacggccttgccaggagagcctgccctcagactgcaggaccagaacccctgcctccatctttccaagcaccggggcgaaaaaccacaaaggaaaggaagaaaattnnnnnnnnnnnnnnnnnaaatcacttggtgattaaaaaaataactgctccataaataaaactcctaaagtcacttatgttt

SEQ ID NO: 186119 - DNA, 954 bp, Homo Sapiens
ttggcgaattcctgaaaggatttcgggtaatactggaggagctgaagtcggagggaagacagtgccaacaactgattctaaaggatccgaagcagctcaacagtagcttcaaaagaactggaatggaatctcaacctttcctgaatatgaaatttgaaacggattatttcgtaaaggttgtcccttttccttccattaaaaacgaaagcaattaccaccctttcttctttagaacccgagcctgtgacctgttgttacagccggacaatctagcttgtaaacccttctggaagcctcggaacctgaacatcagccagcatggctcggacatgcaggtgtccttcgaccatgcaccgcacaacttcggcttccgtttcttctatcttcactacaagctcaagcacgaaggacctttcaagcgaaagacctgtaagcaggagcaaactacagagacgaccagctgcctccttcaaaatgtttctccaggggattatataattgagctggtggatgacactaacacaacaagaaaagtgatgcattatgccttaaagccagtgcactccccgtgggccgggcccatcagagccgtggccatcacagtgccactggtagtcatatcggcattcgcgacgctcttcactgtgatgtgccgcaagaagcaacaagaaaatatatattcacatttagatgaagagagctctgagtcttccacatacactgcagcactcccaagagagaggctccggccgcggccgaaagtctttctctgctattccagtaaagatggccagaatcacatgaatgtcgtccagtgtttcgcctacttcctccaggacttctgtggctgtgagtggctctggacctgtgggaagacttcagcctctgtagagaacggcagagagaatgggtcatccagaagatccacgagtcccagttcatcattgtggtttg

SEQ ID NO: 186120 - DNA, 1309 bp, Homo Sapiens
ttggggttaaaataaaaacttgtggggattttaatgtatttctttggtgaaaatacattagttgtttgtctctaattggatcactttcccttctagactctgaacaggaagtgcctcctggaaccacagagtcggttcagtctgtggattactactgtgatacgatcattcttcggaacatagctccgcacactgtggtggattccatcatgacagcactgtctccttacgcgtctttagctgtcaataacatccgcctcataaaagacaaacagacccagcagaacagaggcttcgcatttgtgcagctgtcctctgcaatggatgcttctcagctgcttcagatattacagagtctccatcctcctttgaaaattgatggcaaaactattggggttgggattttgcaaaaagtgccagaaaagacttggtcctctcagatggtaaccgcgtcagcgctttctctgtagctagtacggctattgctgctgctcagtggtcatccacccagtctcaaagtggtgaaggaggcagtgttgactacagttatctgcaaccaggtcaagatggctatgcccaatatgctcagtattcacaggattatcagcagttttatcaacaacaagctggaggattggaatctgatgcatcatctgcatcaggcacagcagtgaccaccacctcagcggctgtagtgtcccagagtcctcagctgtataatcaaacctccaatccacctggctctccgactgaggaagcacagcctagcactagcacaagtacacaggccccagccgcttcccctactggtgtagttcctggtaccaaatatgcagtacctgacacgtccacttaccagtatgatgaatcttcaggatattactatgatccgacaacagggctctattatgaccccaactcgcaatactactataattccttgacccagcagtacctttactgggatggggaaaaagagacctacgtgccagctgcagagtctagctcccaccagcagtcgggcctgcctcctgcaaaagaggggaaagagaagaaggagaaacccaagagcaaaacagcccagcagattgccaaagacatggaacgctgggctaagagtttgaataagcagaaagaaaactttaaaaatagctttcagcctgtcaattccttgagggaagaagaaaggagagaatctgctgcagcagacgctggctttgctctctttgagaagaaggagccttagctgaaaggcagcagctcatcccagaattggtgcgaaatggagatgaggagaatccccttcaaa

SEQ ID NO: 186121 - DNA, 876 bp, Homo Sapiens
ttggatttttactctagcagtgtcacacctctttgctaggtggttcatcacctttacttataccaaggtgtgcccagggtcttttctgggcaggaaatatcactagtccacaacatactttatcttttttttgaccaaatatgtaatccactgacatagcagaaagtctgcattaattgttttttgtttgttgttttctagtactactataattccttgacccagcagtacctttactgggatggggaaaaagagacctacgtgccagctgcagagtctagctcccaccagcagtcgggcctgcctcctgcaaaagaggggaaagagaagaaggagaaacccaagagcaaaacagcccagcagattgccaaagacatggaacgctgggctaagagtttgaataagcagaaagaaaactttaaaaatagctttcagcctgtcaattccttgagggaagaagaaaggagagaatctgctgcagcagacgctggctttgctctctttgagaagaagggagccttagctgaaaggcagcagctcatcccagaattggtgcgaaatggagatgaggagaatcccctcaaaaggggtctggttgctgcttacagtggtgacagtgacaatgaggaggagctggtggagagacttgagagtgaggaagagaagctagctgactggaagaagatggcctgtctgctctgccggcgccagttcccgaacaaagatgccctagtcaggcaccagcaactctcagacctgtcacaagcaaaacatggacatctatcgacgatccaggctgagcgagcaggagctggaagccttggagctatgggagagagagatgaaataccgagaccgagctgcagaaagacggga

SEQ ID NO: 186122 - DNA, 1094 bp, Homo Sapiens
actttgtacaaaaaagttggtgcctatctgaaggattggatgggcagagtataggtggcggtggttggtcctccccgtatgttgtccatttaattccagagcactgatttttccgaagtgtgctctgccctgggaaaatggacacatgttcctcacaatgggaataactaattacttcttttcttacagaaaaagttggtgattcaaggaaagcacattgcaatgcattatagcaatcccagacctaagtttgaagattggctttgtaacaagtgctgccttaacaatttcaggaaaagactaaaatgcttccgatgtggagcagacaagtttgactctgaacaggaagtgcctcctggaaccacagagtcggttcagtctgtggattactactgtgatacgatcattcttcggaacatagctccgcacactgtggtggattccatcatgacagcactgtctccttacgcgtctttagctgtcaataacatccgcctcataaaagacaaacagacccagcagaacagaggcttcgcatttgtgcagctgtcctctgcaatggatgcttctcagctgcttcagatattacagagtctccatcctcctttgaaaattgatggcaaaactattggggttgattttgcaaaaagtgccagaaaagacttggtcctctcagatggtaaccgcgtcagcgctttctctgtagctagtacggctattgctgctgctcagtggtcatccacccagtctcaaagtggtgaaggaggcagtgttgactacagttatctgcaaccaggtcaagatggctatgcccaatatgctcagtattcacaggattatcagcagttttatcaacaacaagctggaggattggaatctgatgcatcatctgcatcaggcacagcagtgaccaccacctcagcggctgtagtgtcccagagtcctcagctgtataatcaaacctccaatccacctggctctccgactgaggaagcacagcctagcactagcacaagtacacaggccccagccgcttcccctactggtgtagttcctggtaccaaatatgcagtacctgacacgtccacttacca

SEQ ID NO: 186123 - DNA, 1337 bp, Homo Sapiens
  misc_feature (1185)..(1206): n is a, c, g, or t
caactttgtacaaaaaagttggctttgctaggtggttcatcacctttacttataccaaggtgtgcccagggtcttttctgggcaggaaatatcactagtccacaacatactttatcttttttttgacaaaatatgtaatcgactgacatagcagaaagtctgcattaattgttttttgtttgttgttttctagtactactataattccttgacccagcagtacctttactgggatggggaaaaagagacctacgtgccagctgcagagtctagctcccaccagcagtcgggcctgcctcctgcaaaagaggggaaagagaagaaggagaaacccaagagcaaaacagcccagcagattgccaaagacatggaacgctgggctaagagtttgaataagcagaaagaaaactttaaaaatagctttcagcctgtcaattccttgagggaagaagaaaggagagaatctgctgcagcagacgctggctttgctctctttgagaagaagggagccttagctgaaaggcagcagctcatcccagaattggtgcgaaatggagatgaggagaatcccctcaaaaggggtctggttgctgcttacagtggtgacagtgacaatgaggaggagctggtggagagacttgagagtgaggaagagaagctagctgactggaagaagatggcctgtctgctctgccggcgccagttcccgaacaaagatgccctagtcaggcaccagcaactctcagaccttcacaagcaaaacatggacatctaccgacgatccaggctgagcgagcaggagctggaagccttggagctaagggagagagagatgaaataccgagaccgagctgcagaaagacgggagaagtacggcattccagaacctccagagcccaagcgcaagaagcagtttgatgccggcactgtgaattacgagcaacccaccaaagatggcattgaccacagtaacattggcaacaagatgctgcaggccatgggctggcgggaaggctctggcttgggacgaaagtgtcaaggcattacggctcccattgaggctcaagttcggctaaagggagctggcctaggagccaaaggcagcgcatatggtttgtcgggcgccgattcctacaaagatgctgtccggaaagccatgtttgcccggttcactgagatggagtnnnnnnnnnnnnnnnnnnnnnntgacaaggagcacaagaagtggtccatctctcgaattcgctgttaccgcctgtctctttaagggcatgccttgtgctgttaatagatcttaggtgaaccacttcattctgcagggttctccctcccacctt

SEQ ID NO: 186124 - DNA, 1590 bp, Homo Sapiens
ttgtaggctcctgagggccaaaggcctggaagtggaacagttatctactacctgtcaaaacctccagtggctgaaagaagaaatggaaaccaaatttagccgttggcagaaggaacaagagagtatcattcagcagttacagacgtctcttcatgataggaacaaagaagtggaggatcttagtgcaacactgctctgcaaacttggaccagggcagagtgagatagcagaggagctgtgccagcgtctacagcgaaaggaaaggatgctgcaggaccttctaagtgatcgaaataaacaagtgctggaacatgaaatggagattcaaggcctgcttcagtctgtgagcaccagggagcaggaaagccaagctgctgcagagaagttggtgcaagccttaatggaaagaaattcagaattacaggccctgcgccaatatttaggagggagagactccctgatgtcccaagcacccatctctaaccaacaagctgaagttacccccactggccgtcttggaaaacagactgatcaaggttcaatgcagataccttccagagatgatagcacttcattgactgccaaagaggatgtcagcatacccagatccacattaggagacttggacacagttgcagggctggaaaaagaactgagtaatgccaaagaggaacttgaactcatggctaaaaaagaaagagaaagtcagatggaactttctgctctacagtccatgatagctgtgcaggaagaagagctgcaggtgcaggctgctgatatggagtctctgaccaggaacatacagattaaagaagatctcataaaggacctgcaaatgcaactggttgatcctgaagacataccagctatggaacgcctgacccaggaagtcttacttcttcgggaaaaagttgcttcagtagaatcccagggtcaagaaatttcaggaaaccgaagacaacagttgctgctgatgctagaaggactagtagatgaacggagtcggctcaatgaggccttacaagcagagagacagctctatagcagtctggtgaagttccatgcccatccagagagctctgagagagaccgaactctgcaggtggaactggaaggggctcaggtgttacgcagtcggctagaagaagttcttggaagaagcttggagcgcttaaacaggctggagaccctggccgccattggaggtggggaactggaaagtgtgcgaattcatcacaagcatgcctactgagcactggcgggtcagactgcagcccaggatggaaaaccttgtttgcactaaccagaaagatccttgtctgattttggcagaattaaacggtgacttactaatgatagaactggtacaagtagcatcaactacaaagtgaaactcactttagcctacatggatctcactgtacatacatatcaatccctaaattgaatggtggaggttgcaaagtgtatttgcacattttaaatcattctgttttagtttttccacttttattcattcttatccctagccccttctcgttccctcatcccttctgtgggccaataaagtttattcttccccactttccc

SEQ ID NO: 186125 - DNA, 1633 bp, Homo Sapiens
ccagtcacctcgattccctaagcctccactcccaaatgaggaaggggcgcttccccgacctggggcttcccgggagagccccacagaccccgctcgctggaaagggccgcgcccaagctctcccaggctttggctaggggtgaggggtacgcagcgggagcagccccaccggccggatactcacaatgaggacttccccaccccagtggccctgcaagagggggcaggggctcatcaccgccatggccatgttgtagcccccaaagcaggtcccaagcacggagaggacccccaggaacagcagagacctgttaggcaggaacatggagaccaacgaggcaagagggttggccacaatgctgagggtggcagccaggtggtaggcaactggcccataggacaggcaggagtaggtctgcacagagggcagcatgccgttggtgagcgcgttgacgaaggccaccagggtatagatgaaggccaggtgcgccgggcagcagggggctgctttctcctctagatacccctggccctggctgctgtccaccgtgcctgcagggcccaagtcattctcttcccgcggccggatggagtggagggtgacctggtcattgagaaggtcttccacggaagcctcccagcacctgggttgacgctggaggacaaagaacgccacgaggcagcaggccatcatgatggataggaggaggaagaagaccaggggtgagaagtgggcgggaaggtagcggctctccaggtgggacaagggtgcttccattccggggagggcggacaccaaagctctgggaactccctgtgcgatgtcagtctccctcgtgggtacagggcttggtacgctgtctgatatctcagtgacattgacgcaggtagtgagaccggagccctgggcaagagccaccagggcgggcaagaggccgctgagtccttcacccacaaaagaaggtggtgaggtagtaggtgggcagccggctcatgaacggcaggaaggtcactgaagaggtgcagtccaccagggccaggaagaaggtgaggaccaagaaagcgatgctgtggtggccgtccagcacccaggaggtcatattccagaggaaggcaaagatgatgcaggtgacggttcccacgcccagcagggtgaagatgatgggcacttcggaaaggcagctgggccggaagtgatggagcagggtgaccaggaggggcccgatgttggccagctggatgaccaccgtgaggtaggagggcaggtaccagccctcgggcagctccatcaccagcaggggcagctctacccagagcccattgatggtcacccaggagcccattccgaagacgcagaccagcaggtgcatcaggaaggccatggcggtatctgccctgggccagaggctttctcagatcagcctgcagcggggcagtggtatatgcacctttttgtagagacacgccaactgggccaatcttcacgttttgtagatgggagacgaggtccgaaggggcagaggggctctcctgggatctggactggatcctctgcagcaagcggcctgtccgggactcctcagttcacgctgcagtctttaactccatacttcccaacttttttgtacaaagt

SEQ ID NO: 186126 - DNA, 1774 bp, Homo Sapiens
acaaaaaagttgggtcatggctgctcctgtacgtagtcacggtcttgtgctctaaggtgagtggaggacgagcttgggcttagcggcagcccgtatcacatcctagactttttacttcgaggagaagagtctcacgagttgtcctggaagaaaacgacagcacgtgttctttttcactagtagaagtgacgttggtttcatgttgacaactttgaagccatttggaagtgtttcagtggagagcaaaatgaataacaaagcgggctcctttttctggaaccttagacaattcagtacattagtttcaacaagcagaactatgaggctatgttgtttgggactttgcaaaccaaaaatagttcattcaaactggaacattttaaataactttcataacagaatgcaatcaactgatatcattagatatctctttcaggatgcattcatttttaaatcagatgttggctttcaaacaaagggcataagcactctaacagcccttagaattgaaagactactttatgctaaaagactgttttttgactcaaagcagtctcttgtccctgttgataaatctgatgatgaattgaagaaagtaaaccttaatcatgaagtctccaatgaagatgttcttaccaaggaaacaaaaccaaaccgtatcagcagtagaaaactgtctgaggaatgtaattccctgagtgatgtgttagatgcattttcaaaagcgcccacatttcctagtagcaactatttcacagcaatgtggacaattgccaaaagactgtctgatgaccagaagcgctttgaaaaacgactgatgtttagccaccctgcatttaatcagctctgtgaacatatgatgagagaagccaagatcatgcagtataagtacctactgttcagtcttcacgccatagtgaagcttggaatccctcagaacactattttggtgcagactttgctgagggtgacccaggaacgtatcaatgagtgtgatgagatatgcctttcagttttgtcaactgttttagaggcaatggaaccatgcaagaatgttcatgttctacgaacgggattcagaatactagttgatcagcaagtttggaaaatagaagatgtcttcacattacaagttgtgatgaagtgtattggaaaagatgcaccgattgctcttaagaggaaactggagatgaaagccttgagggaattagacagattttctgttttgaatagccaacacatgtttgaagtactagctgccatgaatcaccgatctcttatactcctggatgaatgcagtaaggtggtcctagataatatccatgggtgtcctttaagaataatgatcaacatattgcagtcctgcaaagacctccagtaccataatttggatctcttcaagggacttgcagattatgtggctgcaactttcgacatctggaagttcagaaaagttctttttatcctcattttatttgaaaaccttggctttcgacctgttggtttaatggacctgtttatgaagagaatagtagaggatcctgaatccctaaacatgaaaaacattctatctattcttcatacttactcttctctcaatcatgtctacaaatgccagaacaaagaacagttcgtggaagttatggctagtgctctgactggttatcttcacactatttcttctgaaaacttattggatgcagtatattcattttgcttgatgaattactttcccctggctccttttaatcagcttctgcaaaaagacatcatc

SEQ ID NO: 186127 - DNA, 1378 bp, Homo Sapiens
  misc_feature (921)..(965): n is a, c, g, or t
ttggaaaaatcatcccataaatgaatgttgaggttaccaaagtacatcacctgctgaggaaggataaatcttcctgctttaagggagccctgtcatctctcctcttaatgcacgtttcccttggtattagtggaagctgtgttcaagatgggaagcctttcctgcagttcttagaaacacctgctttctaaggagagccttttctaggattagcttatgtgtgttttctctaggcgattttttatttcagttaccaatttaattttcaagttgacagatgctgtgtaaagtctctcataatgagagtagtccattaaattgttgaaagttgcactgcttttcatctttcaggtacctgaaatgagtgacatcaggtatttggaaggagtaagatcataaactgtattcattttcttccttgtacaaagtgatgacttctaatgcttatatctcaaggtattttttaaaaaagcaacggtccctaatagagtaaaatttggttttggtccaagttcccaataatgtatttaatgtttctgttgtttactggtgcctcccgttgcatcaggtagagattgcctgcctctttgtagggcagccttgtggcaccttatgtccaacttggaggatagtatatggcttctttgtgcctctactatcttttcaaaagccattttataaaaatcctaggtagcctattttaatatttaaatatatatatttgtgaaagaacttttagaacagaccttttctttttactttaaaattcctgtatttccatttttaagagtaaatttaatctccaggatttagaagtgtctttccagagaagcataatgagaaagtcagactgaggtaataagaccagaattaagtgatagaagaaactgttgtttggttaaaggacacagatttgaaggnnnnnnnnnnnnnnnnnnnnnnnnnnnnnnnnnnnnnnnnnnnnnctgtaatgtcatatttgctgctacagtagctcaatattttacagggctaacataaagctggctccatttaaaaactggagtacttcctagtgcagccagcctaggcggaaactgtacaccatggtcttccagatgggtgactgatggctttgggtagctgatgcatgctttaatatttgcctatagcccggcagcaaggaagtcggggcggggggacttttttaccctgccagttatagcattgtgattctttctgggcactggcattttgtgaaactctcaagggaaggtgatgcaggggagaaaatgtgaattaaattacatagatgggtgtttttatgtcttctacccctttcctagaattagtacaactcttaactgtgccagtccccagttcaccagctttgtatcca

SEQ ID NO: 186128 - DNA, 936 bp, Homo Sapiens
ttgggcaagaatttcctgcggttcctctaggaaaattcctttgtgcagatcaggcccgtggattgggatctgtgaacaagaggaacctcagcagccaggacaggcaggagcagtggaatagctagtatggcttctggaatcctggttaatgtaaaggaggaggtgacctgccccatctgcctggaactcctgacacaacccctgagcctggactgcggccacagcttctgccaagcatgcctcactgcaaaccacaagaagtccatgctagacaaaggagagagtagctgccctgtgtgccggatcagttaccagcctgagaacatacggcctaatcggcatgtagccaacatagtggagaagctcagggaggtcaagttgagcccagaggggcagaaagttgatcattgtgcacgccatggagagaaacttctactcttctgtcaggaggacgggaagttcatttgctggctttgtgagcggtctcaggagcaccgtggtcaccacacgttcctcacagaggaggttgcccgggagtaccaagtgaagctccaggcagctctggagatgctgaggcagaagcagcaggaagctgaagagttggaagctgacatcagagaagagaaagcttcctggaagactcaaatacagtatgacaaaaccaacgtcttggcagattttgagcaactgagagacatcctggactgggaggagagcaatgagctgcaaaacctgggagaagaggagaagacattctgaaaagccttacgaactctgaaactgagatggtgcagcagacccagtccctgagagagctcatctcagatctggagcatcggctgcaagggtcagtgatggagctgcttcaaggtgtgatggcgtcataaaaagaccggagaacgtgaccttgaagaagccagaacttttccaaaaatc

SEQ ID NO: 186129 - DNA, 1228 bp, Homo Sapiens
  misc_feature (1028)..(1036): n is a, c, g, or t
ttggctttttgtttctcgtataaaactttttgatttgaaccaaaacagtgaagatgacaacacacaccaattggatgataattgtagcgggggcggtgggggggagaagtccacgccatccatcatgcaaaattctttcagatgaggtgggaaggccgtgtacatagttatgtaaaaagagattgcttcatgagctaatggttcatatatgcaaaagggtaagatgaaagctttactttgtacaaatgtaaatagataaagtaacataatacattaatacttcttaaaatgtgctatttgcaaacttacttaatatcagtgaacacagtcggctaaagctgtgttcccatatattgttatagacagctaaacccttcaactatgcaatgaatgttcgggcttttcacaaaagcccgcctaactcaaaggagccttttcaaatccatttacagcatacttaaggtcatattttccctgaacaagcgcttacgtgatatgactctgttttccttgcttgttttttttcaaacggagaaacatcctgttttgcaaattggaccccaggctggaacttagcatctgaagttgccgcttgtgggctctgggggaaagtgtagccccggagaggtaactgaggacatgagcaaccagtgccagggagggtgggatttgccagatgccaaaatcaggggacgggtggtggtgtctgtcagacacacacaggtcgccagtgacttcacacacacctcatgtgagaaccatgccttttttagtgtgtcctatttcatacctgtacacacttcctcgttttgtaatgagatttacttacacccaaacagatcctgaaagaaagcttcaagttttctcagatgatggatatgttttcactgtattcaataactgacggatgtaaggtgcacgtttcctgatgtgacgcactgtattccagctggtgatcaagtctgggaacagccgtaacaggtcaaccttgtggagccatcgcgagttagagggtgaaagatagcagnnnnnnnnngtcttgtgtgtgagtgtgttttattgagtttgcatcaatcttaatgtctcttcataatacttttataaatacattaagcctcttgtctacatattttggagagaatatgactttactatcagagaaatacaatatatccttgtctactggactgtaaaatatatgtatgaaataaaaataagttccatttgg

SEQ ID NO: 186130 - DNA, 2011 bp, Homo Sapiens
  misc_feature (981)..(1031): n is a, c, g, or t
ttggggggcctccccggaggccagtgcgcggccgcggtgctctaccggcgtgtcgctccgccccagggagagccggcgctaccatggaggagtaccatcgccactgcgacgaggttggcttcaatgctgaggaagcccacaatattgtcaaagagtgtgtagatggggttttaggtggtgaagattataatcacaacaacatcaaccagtggactgcaagcatagtggaacaatccttaacacacctggttaagttgggaaaagcctataaatatattgtgacctgtgcagtggtccagaagagcgcatatggctttcacacagccagctcctgtttttgggataccacatctgatggaacctgtaccgtaagatgggagaaccggaccatgaactgtattgtcaacgtttttgccattgctattgttctttaactgactaaaaatgttgggctaaagccattaacttaagaatttgtcagtgtatcctttccaaaaagagtaatagttgtttactagtgtgctagatgaaaagcgtgcaatatgctttaaagctatcaacaaaaactgaatattataagcaagcaatatcatagtaattggcagattagctcatattctatacagcatcgtttaaataggaaaaatttaatgctagcaaaaaataaatttagaaatatggcatgacatgaaaatacaatcttatatttacaccagcttttcactaatattttgtacctaaggtgatggggaactccattcagataataaaattctctttcagctagagaagttaacaggaataaatatatgaacaaaaaagctgcaaggataaatgtggagaaaatgatgagaattagctaacatttttaagtttttttaaactttcttcccctcagttgtacttaatatttagtggaaagtaataatttttttaattttctatcaactaatagtatagtaacaactatgattaacttgnnnnnnnnnnnnnnnnnnnnnnnnnnnnnnnnnnnnnnnnnnnnnnnnnnnggatttacacttgagggtaaattaaatctggtaaactgaatttcctagttaaataaaattagttgcagtatatgatgaacagtgtatgactcaaacagctgccttacaattcactcattccatgtggaacaaacatttatcagatgcctattatgggcatatgtctctgctaagcaccatagttgtcaatgtgctgtgcaaatgctaagttccttttagcaattgttcagttggaagacgtattaatatttggggaaggaaaagaaagtagttgttttacaagggaggaaaaaagtgaatctggttacacatatggaagtaagcaaaatgaaaagcacttattgctttctgacagaattatagatgtaattttaagagttgctcctagcaagttaaaagtgcatataaaatatgcaactcttagttaaaggccttattatcagtcttacctatacaagtagtaaattttgtcattgctttagttacaaccatctgtaaataacttaaaagacttattatgtggggttcaaattgagtggaataaagtatagattaaaagtatacaatccttagcacgttatctcagggcttatgaaatgtaattaaatttattaagaaaatagatgaaaaattagggtacacagctggccaccaaatgcgaagtcaatctgctacttaaccctgaaaacaaaatcagttttgcatattaccactaacactaatacatatagagagcggaaccataactcattgaattttggagaggaataagcttagcgttaatattgacaatattaaggcaatattcttgtagaatactatgtgcatgtttgatattttgccaaataacaataattaataattgttcaatgtttaagataatattaacaaaataaaggagtttaatgcagtgatctttgtttttggcacatcaaaaattctcagtcattattcatgtttctttatgctgctggcttttg

SEQ ID NO: 186131 - DNA, 1936 bp, Homo Sapiens
  misc_feature (171)..(200): n is a, c, g, or t
aaaggactagtaaaggtgactgggtcatccttcctgccccagggacactgattagagaaaatccgtctgtgctggcaatacggcagtgctggacactcggaattcccttgaaggcaaaagcaaggaacagagcgtgattagggtactggacactgccaagtgctgggctcnnnnnnnnnnnnnnnnnnnnnnnnnnnnnntcctcgagttggagctgggatgccagcccccatggacctggcagaacacgctcttgacagccccacagggcttctccctagggcgtgcccttagaagattccaggcagcaggcggtaaggcactgcggcggtgtagcgctcccagtcccggccgtacttgctggcgcagcggtgctcgtcccggaggcagcggtgggtcagcaggatggccatgtagatgatgtagaagtagggcagcaggtggccaccgccacaggccaggcagtaggccaggctgcccatcaggtcgccgacgtagttgaagtggcgggccacgccccagaagcccgacaccagcagcttgctgtggtgcctctgcccgtcggcggatgtgtaggagcactcgatgaccttgggcttcctgccccagatgaggcagcgcccatccgtgcggcggaacaggtccttctggtggttggccacccggaagatgtagtagcccaccaggcccagcagcaggacgcccacggcgtgcggggtggacagctgcacggggtggtacaccaagtacagaccctgcagcgtgtaaagataaggcagccagacacagtcgccccagcccaggtaccacccgaagtggtcatggcagatgtcaatggtcttcaggtaccaggtttcgttccagaagaagtcaatcacgtagatggcctgcaggacgttgaccaggaccatggcattggtcacatggctgtggagctcccgctgcttcgctgcgaaggacaggttgatgagggtccaggcgacgatcccggggcgcccattgaagaacagcttgaagtcaaaccacttcccgatccgagggttaaactcgatgcccatcatgtagttgtaaaagaaattgcctgtgaatttgcagtctctggcgctggtggggaagaagtagcccttgaccatggcgaaggtggagacggcatagccaaggatgttggcgcaccacagcagtgggatccagttgtcgaagatgatggtgggcgagaaccaggacaggagatgagcgtttgcaaaccagagcaggtgcgtgaggagccaggcttgcaggccgttgatctgatacttgttcacaacccctgcaggagtcacggccccctcctggatgcctcctacgtagccgggtagaaacttatggcagaagtcagggagagacgtgtacagaagcacctggaaggtgacccacaaggtatagagctgggcggctttcctcgttataggtggagtcttggcccagatgtccgagagccgagcatgtccggtgacgatgtccaccacagggccggtcagggcgcagctgtattggtcacaagccatgatgaagtagtagacgatgaagggggcgaacagcagtaggaagatgacgctcgccagtgaaaaccagtccacctcccaggcacggccccactgcccttgagatgcggttctgtcattggtgacgccatctagactcttggctttgggaatgttgggttgcgattttgcagccattgggccctccagcctcttgccaaatagtttcacagcagaagggaacttttccttcttgaaccggccccttaaaagtttctagacacctgtgctccaaatgcctgcttgatccttctcaaccggctaaagtcctgcgcacacctcggcccctcacctgcgcccaccttcccctggcctcgcttgcgcgcgctgctccacgccgcctaccctctagccaa

SEQ ID NO: 186132 - DNA, 1457 bp, Homo Sapiens
  misc_feature (1239)..(1259): n is a, c, g, or t
ttggggaacctctacatgttttagtttgcttcacctaaaataatgctgatctagagatagagaaataggggtggttatttttccagattggagagttgaaagtccctgactgatttcagccattttcctagtgcttgtcggatgcagagacaatgttgaaatcccctaaacacagttctcagtggcaaaacctaggaaggctcatgttcccagagaagggaccacatgagccttctcccatgcaaagcttcccccagcttaaatagttgataaggactaattgtttaatgagtttatttatctacagtaggttagggatcctgggttctgtttatatgaagttcttcccagtttgtgaattctagtacagcagccatgcagccaccttatttcatagatgccatctgtgtgtcctcttgactaccttctatttagaggaagaatgagagctttgtgtgtttaactgagcttatagtaggacttctttgcatatgtatggtactgaaaaatcttaatatacatctttaatcctttttaggttgtcctttaaagagtttttgactagtttctttttcttgacagctcttctctttggacacatgggccttcttagagggttcagtctaggacccggctctcctggccctgtgttgagggtagctggtccctctgtccctgtgtctgctagcactagactttgttgctgcagattgatccagtgggtacataggctaattaatgtgagtctttttccttgtttaaaggagtccctcttgctgaaagtagatgattactattgctgtagtgttaggaaagtattaagtttgtgctgaaaatccattgccatttggtacaaatgacatttgttctttctgtgaaagagatgccctcgagtgtgtttgtacacaaacccttaggatggtgagttgaagcatcaccctcgcgctatcttcagtgacgggtgacggctcagggagatggcaggcagattgggctctaagtcattattctctcagttactccattggtgaaatggccctttccctctttgcagttcagtctaagtctcgtatttgctttgctgtctgtgtgctgaagctcgtcccgtgtgagttgctgtctgccccttgtcaggctgtgaggtgctcgtgtagacctggagcatgcaggctgcctccgtttttgggtactgtgttgtgttttgctctgtctaaaaacatctgcatagttttcaactgnnnnnnnnnnnnnnnnnnnnntgggatgtcctaaaatgaaagctgctcaaagtcacagaacaaccgagggacaaaggagattggatgactgggaagcgctgggcccggaacagcctctgcaactgtggggcctgcacacagcccttccacagttggcactgcaggtgcagcccaccctttaaagataaacaagaagtcagctcttcacttttactagtt

SEQ ID NO: 186133 - DNA, 1650 bp, Homo Sapiens
ttgggtccctggcgcttccttcttcttttccggcggagagcttgggatgtggtaatgccagccacactcctcagagccgtggccagatctcatcatatattatcaaaagcacatcagtgccgaagaatcggtcatctaatgttaaaaccacttaaggaatttgaaaatacaacatgcagcacactgacaatacgtcaaagcttggatttgttccttcctgataaaacagctagtggtttgaataagtctcagatcctggaaatgaaccaaaaaaagtcagataccagcatgctgtctccattaaatgctgctcgtttgccaagatgaaaaggcacaccttccaaccatgaaatcctttggtactcacaggagagtgacccacaaaccaaatctgttgggttctaaatggtttataaaaatattaaagaggcatttctcatctgtatcaacggaaacatttgttccaaaacaagacttcccacaggtgaagagaccactaaaagcatccaggaccagacagccatccaggaccaaccttccagttctgtctgtgaacgaggacctaatgcactgcacagcatttgcaacggcagatgagtatcatctgggaaatctgtctcaagatctggcctcccacggatatgttgaagtaacaagcttgcctagagatgcagcaaatattttggtgatgggtgtggaaaattctgcaaaagaaggtgatcctggaacaatattcttcttcagggaaggagctgctgtgttttggaatgtgaaagacaaaactatgaagcatgtgatgaaagttctagaaaaacatgaaattcagccctatgaaatcgcactggtacactgggaaaatgaagaacttaactacataaaaatagagggacagtcaaaacttcacaggggggaaatcaagttaaattcagagctggatttagatgatgccattctagagaagtttgctttctccaatgctctatgcctttctgtaaaactggcaatttgggaagcatcactggataaatttattgaatctattcagtcaattcctgaggctttaaaagctgggaagaaagtgaaactctctcatgaagaagttatgcagaaaatcggtgaactctttgctctaaggcaccgtataaacttgagttcagacttcctgattactcctgatttctactgggacagagaaaacctggaaggactttacgataaaacgtgtcaattccttagcattggccgaagagttaaggtcagaagtctggcatggcctaaagttaagatgttgattcctctttggagactgcgagtggaatccatttcctcaccttttccagtgactggaggccacccatattccttgctcatggccccctcctccatctagcaaaggcctgtggaatcctcatattgtatcattctgaactcttctgccccgcatttccacttttaaggacccttgtgattacattggggcttacccagataatctaggattatctcatcttaaggtcatgaatgaaaaacttcagcactgcatggaactaacagatctaatgcggaatcacctgaatgagaagagggcactccgcttggagtggatgattgtcatcctcattaccatagaggtaatgtttgagctgggac

SEQ ID NO: 186134 - DNA, 358 bp, Homo Sapiens
ctttgtacaaaaaagttgggtgaactctttgctctaaggcaccgtataaacttgagttcagacttcctgattactcctgatttctactgggacagagaaaacctggaaggactttacgataaaacgtgtcaattccttagcattggccgaagagttaaggtcatgaatgaaaaacttcagcactgcatggaactaacagatctaatgcggaatcacctgaatgagaagagggcactccgcttggagtggatgattgtcatcctcattaccatagaggtaatgtttgagctgggacgagtatttttctgatcaagtgataaccaaagtgtcactgcaagagatattcaagttctacaat

SEQ ID NO: 186135 - DNA, 1430 bp, Homo Sapiens
  misc_feature (549)..(568): n is a, c, g, or t
ttgggggagaagccctagtgcctctgccggctgcccaggacctggtatcggcccacagaccaagtcctccacagagggcgagccagggtggagaagagccagcccagtgacccaaacatccccgataaaacacccactgcttaagaggcaggctcggatggactatagctttgataccacagccgaagacccttgggttaggatttctgactgcatcaaaaacttatttagccccatcatgagtgagaaccatggccacatgcctctacagcccaatgccagcctgaatgaagaagaagggacacagggccacccagatgggaccccaccaaagctggacaccgccaatggcactcccaaagtttacaagtcagcagacagcagcactgtgaagaaaggtcctcctgtggctcccaagccagcctggtttcgccaaagcttgaaaggtttgaggaatcgtgcttcagacccaagagggctccctgatcctgccttgtccacccagccagcacctgcttccagggagcacctaggatcacacatccgggnnnnnnnnnnnnnnnnnnnnatcaggcagagaatcagctcctttgaaacctttggctcctctcaactgcctgacaaaggagcccagagactgagcctccagccctcctctggggaggcagcaaaacctcttgggaagcatgaggaaggacggttttctggactcttggggcgaggggctgcacccactcttgtgccccagcagcctgagcaagtactgtcctcggggtcccctgcagcctccgaggccagagacccaggtgtgtctgagtcccctcccccagggcggcagcccaatcagaaaactctcccccctggcccagacccgctcctaaggctgctgtcaacacaggctgaggaatctcaaggcccagtgctcaagatgcctagccagcgagcacggagcttccccctgaccaggtcccagtcctgtgagacgaagctacttgacgaaaagaccagcaaactctattctatcagcagccaagtgtcatcggctgtcatgaaatccttgctgtgccttccatcttctatctcctgtgcccagactccctgcatccccaaggaaggggcatctccaacatcatcatccaacgaagactcagctgcaaatggttctgctgaaacatctgccttggacacagggttctcgctcaacctttcagagctgagagaatatacagagggtctcacggaagccaaggaagacgatgatggggaccacagttctcttcagtctggtcagtccgttatctccctgctgagctcagaagaattaaaaaaactcatcgaggaggtgaaggttctggatgaagcaacattaaagcaattagacggcatccatgtcaccatcttacacaagaggaagtgctggtcttgggttc

SEQ ID NO: 186136 - DNA, 958 bp, Homo Sapiens
acaaaaaagttgggcgtactcgccacggcacccaggctgcgcgcacgcggtcccggtgtgcagctggagagcgagcggccaccgggagcccccggcacagcccgcgcccgccccgcaggagcccgcgaagatgccccggcgcagcctgcacgcggcggccgtgctcctgctggtgatcttaaaggaacagccttccagcccggccccagtgaacggttccaagtggacttattttggtcctgatggggagaatagctggtccaagaagtacccgtcgtgtgggggcctgctgcagtcccccatagacctgcacagtgacatcctccagtatgacgccagcctcacgcccctcgagttccaaggctacaatctgtctgccaacaagcagtttctcctgaccaacaatggccattcagtgaagctgaacctgccctcggacatgcacatccagggcctccagtctcgctacagtgccacgcagctgcacctgcactgggggaacccgaatgacccgcacggctctgagcacaccgtcagcggacagcacttcgccgccgagctgcacattgtccattataactcagacctttatcctgacgccagcactgccagcaacaagtcagaaggcctcgctgtcctggctgttctcattgagatgggctccttcaatccgtcctatgacaagatcttcagtcaccttcaacatgtaaagtacaaaggccaggaagcattcgtcccgggattcaacattgaagagctgcttccggagaggaccgctgaatattaccgctaccgggggtccctgaccacacccccttgcaaccccactgtgctctggacagttttccgaaaccccgtgcaaatttcccaggagcagctgctggctttggagacagccctgtactgcacacacatggacgacccttcccccagagaatgatcaacaacttccggcagg

SEQ ID NO: 186137 - DNA, 1618 bp, Homo Sapiens
ttggttttgattctcttctctacatcttatttccccttggtgtagcacagtggttgaaagcagggaatctaaagccacagacctgagtgaatcttgccccacttgcatcttgggacaagaaacataacttttatgagcctattttcatacttgtaaaatagggatattacttactactgtaaataggcataatacttatactcattactgtaaatggttagcactaagcacttaataatcagatattcttgttaaagtgaatttgactattgaaattaatgttttcttctctgcagctattgaaatatttgaagaaactctccaccctgcctattacagtagacattcttgcggagactggggttgggaaaacagtaaatagcttgcgaaaacacgagcatgttggaagctttgccagggacctagtggcccagtggaagaagctggttcctgtggaacgaaatgctgagcctgatgaacaggactttgagaagagcaattcccgaaagcgccctcgggatgccctgcagaaggaggaggagatggagggggactaccaagaaacctggaaagccacggggagccgatcctatagccctgaccacaggcagaagaaacataggaaactctcggagctcgagagacctcacaaagtgtctcacggtcatgagaggagagatgagagaaagaggtgtcacagaatgtcaccaacttactcttcagaccctgagtcttctgattatggatgttcaatcccctccatcttgtaccagtcctcatcagatgtacgtcgaccactacagatccctggaggaggaccaggagcccattgtttcacaccagaagcctgggaaaggccacagcaatgcctttcaggacagactcggggccagccaagaacgacacctgggtgaaccccatgggaaaggggttgtgagtcaaaacaaggagcacaaatcttcccacaaggacaaacgccccgtggatgccaagagtgatgagaaggcctctgtggtgagcagagagaaatcacacaaggccctctccaaagaggagaaccgaaggccaccctcaggggacaatgcaagggagaaaccgccctctagtggcgtaaagaaagagaaggacagagagggcagcagcctgaagaagaagtgtttgcctccctcagaggccgcttcagacaaccacctgaaaaagccaaagcacagagacccagagaaagccaaattggacaaaagcaagcaaggtctggacagctttgacacaggaaaaggagcaggagacctgttgcccaagctatgaccagccccggaagaaaaagaaaaagattgtgaaaacttcagccacggcacttggagataaaggacttaaaaaaaatgactctaaaagcactggtaaaaacttggactcagttcagaaattacccaaggtgaacaaaaccaagtcagagaagccggctggagctgatttagccaagctgagaaaggtgcctgatgtgttgccagtgttgccagacctcccgttacccgcgatacaggccaattaccgtccactgccttccctcgagctgatatcctccttccagccaaagcgaaaagcgttctcttcaccccag

SEQ ID NO: 186138 - DNA, 1254 bp, Homo Sapiens
actttgtacaaaaaagttgggccaataatcgacccacagtggtctgaggaacagctgattgctgcaaaattttgctttgctggacttcttataggccagactgaagtggatatcatgagtcatgctacacaggctatatttgaaatactggagaaatcctggttgccccagaattgtacactggttgatatgaagattgaatttggtgttgatgtaaccaccaaagaaattgttcttgctgatgttattgacaatgattcctggagactctggccatcaggagatcgaagccaacagaaagacaaacagtcttatcgggacctcaaagaagtaactcctgaagggctccaaatggtaaagaaaaactttgagtgggttgcagagagagtagagttgcttttgaaatcagaaagtcagtgcagggttgtagtgttgatgggctctacttctgatcttggtcactgtgaaaaaatcaagaaggcctgtggaaattttggcattccatgtgaacttcgagtaacatctgcgcataaaggaccagatgaaactctgaggattaaagctgagtatgaaggggatggcattcctactgtatttgtggcagtggcaggcagaagtaatggtttgggaccagtgatgtctgggaacactgcatatccagttatcagctgtcctcccctcacaccagactggggagttcaggatgtgtggtcttctcttcgactacccagtggtcttggctgttcaaccgtactttctccagaaggatcagctcaatttgctgctcagatatttgggttaagcaaccatttggtatggagcaaactgcgagcaagcattttgaacacatggatttccttgaagcaggctgacaagaaaatcagagaatgtaatttataagaaagaatgccattgaattttttaggggaaaaactacaatttctaatttagctgaaggaaaatcaagcaagatgaaaaggtaattttaaattagagaacacaaataaaatgtattagtgaataaatgcttctctagatccatattaataaacatgagcatctaacccctcctttcttaggctagacaccaagatatttcagccagcctttatcattcctcttactttatcctttttccttaagtattggtggtcactactattgagtttcttccttaacactgattaaatgatcttaactccctcagctaaaactggcattactgactcccagctatatttctccagacttgca

SEQ ID NO: 186139 - DNA, 1397 bp, Homo Sapiens
aggacagccccagcgaggccatttccagcacatagaagagagattggaaaccaacgtgcagaactgccagtcccctgacacgctgtgccccacccactgcagcccagtgctgaatgaaccctgcccagaggtgtctgtagtgagcttctgccctagtgacttttgagccggccaggttgcagcgcggacacactcgcaggtcgctgtggccccagcctcgcctgacagaatgagcggctcggacgggggactggaggaggatccagagctcagcatcaccctcacgctgcggatgctgatgcacgggaaggaagtgggcagcatcatcgggaagaagggcgagactgtaaagcgaatccgggagcagagcagtgcccggatcaccatctccgagggctcctgccctgaacgcatcaccaccatcaccgggtctacagcagctgtcttccatgcagtctccatgattgctttcaaactggatgaggacctttgtgctgctcctgcaaatggtggaaatgtctccaggcctccagtgaccctgcgccttgtcatccctgccagtcagtgtggctcactgattgggaaggctggcaccaagatcaaggagatccgagagactacgggtgcccaggtacaggtggcaggggacctgctccccaactccacagagcgagctgttacggtatctggggtgcctgatgccatcatcctgtgtgtgcgccagatctgcgctgttatcctggagtccccacccaaaggagccactatcccctaccatccgagcctctccctaggtactgttcttctctctgccaaccagggcttctctgtccagggtcagtatggggctgtgaccccagctgaggtcaccaagctccagcagctctcaagccatgcggtcccctttgccacacccagcgtggtgccaggactggatcccggcacacagaccagctcacaggagttcttggttcccaacgatttgattggctgtgtgatcgggcgccagggcagcaagatcagcgagatccggcagatgtcaggggcacatatcaagatcgggagccaagcagagggcgctggggagcggcatgtcaccatcactggctctccggtctccatcgccctggcccagtacctcatcactgcctgagacggccaagtctacctctggggggacgcccagctcggcccccgcagacctgcctgcccccttctcgccacccctgacggccctgcccacagctccccctggcctgctgggcacaccctatgccatctccctctccaacttcatcggcctcaagcccatgcccttcttggctttaccacctgcttccccaaggccgccgccgggcttggcggcctacactgccaagatggcagcagctaatggg

SEQ ID NO: 186140 - DNA, 2925 bp, Homo Sapiens
ttggacttctctgagttctatgtggagctggaggcaaacaatgagggtgtcgagtgcctgcggctgctcaacgagatcatcgctgactttgatgagattatcagcgaggagcggttccggcagctggaaaagatcaagacgattggtagcacctacatggctgcctcagggctgaacgccagcacctacgatcaggtgggccgctcccacatcactgccctggctgactacgccatgcggctcatggagcagatgaagcacatcaatgagcactccttcaacaatttccagatgaagattgggctgaacatgggcccagtcgtggcaggtgtcatcggggctcggaagccacagtatgacatctgggggaacacagtgaatgtctctagtcgtatggacagcacgggggtccccgaccgaatccaggtgaccacggacctgtaccaggttctagctgccaagggctaccagctggagtgtcgaggggtggtcaaggtgaagggcaagggggagatgaccacctacttcctcaatgggggccccagcagttaacagggcccagccacaaattcagctgaagggaccaaggtgggcattgagtggactctgtgctcactgggtggagctgtggcagggggcactgagcctccagaccctgctaaccacaaaagggaacatcccagcaggctgtgcttggatcatgctcgtctgccctcaagctggaaaacaaggggctacctaccgagaggattatgcaagtgactttctttcttacttggggtagggctgttccctctccaatcttccagcctttgggagcaggggaggggtcagtagcagaagcagagggaggcctcttgcctgagggattaaaatggcagcttgccatgcctacccttccctgtctgtctgggcagcaggttcagggctgagcccttcttttccctcttttttcctgggaatattttgtacaatattttgtacaaagacaggcatgaggagtgcctattccatgcttgcctttgcaatacctgcatccccagcactggtcctgggcacttccccaccccagccaggtgtccctcctatgcacagagcagaggagggagaagctctggggagccagctttggccatatttcaggagaatgtttccatgtgccaaatcttagtcccatgatctgtccccaaaggggaacaaagggacctctgacagcttagatttagccccagttcctgcacgctccagggaacggggtgtctggcctcactggtactgtgaaaaatgctcagagagcaagcctgtgtgtggggatgtcaggtcaggagctggaagttcacctgcaggtgccaaagagcaggccggccagggctggggcagtgccagactctgatctgaggaccccgtcggggtccagatcaggtcactctgccccagtgctctcttgctgtctgctgacaagggggcatggagcatctcttcctcttctgttgccaaatagaaaagggtcagggcatggagaaaggtgaccctgatcccaaacctgccctcccaagtctctggtgttggggagggcccgtgtgtttgtgtaactgtgtgtgcatgttggtctttgtgtgcatatctgttttccaggtctatgtgagtccttgtgctcctgctcctcagctctccaccccaggttgcctctctcctgtgggcctctgtcttctgggaataaagcagggtttcctacttcaggggatgtagagagatgcccaggttgcacaggagtgggatggggtgtggtagcaaaaggagggagaggagtcctttttgtgccaaatccctaagtgccgttcgggggccatgtgtgcagcatgactctccctgtctgtggcagggacccaagcgcttgcttaagccccagtgctccatgccagcacttgaactgtctggggtttgatggacagaggctgaggaatttcctggcttccccagatagtgtcctgggacatggtatgctttggggctggggtagcatggaatccctctgaggacctggatactggtactacggggtggggaagaggaaccttaaacttggctttccccagccttcagcctgagtctagcatgtttctagctccccagtcccttgtgaagccttgagggctggcagaagggttaggaggttgaactctagattcccttcctgtctttgccttccttttacccctttccctgcaacctccttgactctggcctgaatttgttggtgcctcagtttctctgtctgtacctatttaagccaaaggcactagcctgaattttgcttgaagatcactttgtcttggaaatgactagagaggcagaggagaagggtttccagagttgctaggtttgggagtggaaggggcaggcagtgcacttgcccctcctcatgccccttctgacaccagctccctgtggaggcctggtttctgggtaatgcctcccttgggcatcttcatgcatcaaccaaatgggccatcaggtacttcattagtcatggcagaaggaggggaaaagacttgttttccagacagaaaatctactcccctgtccccagccatatccctggataggaagggataggaagagactacttggtgccatggggtaggggtgagggtataagtagatcagagtgggaagacctcagccttgggtggcttgtctctgcttcttgccaggtgggagggcctgtccacaccctggatccccgtaccacagtgccagccatgcccttcccctgggctaccattgtccctttcctcacccagttggtagaggagtcaggaggtgggaggccgtgggctttggttttataatgtaaccactgtgggggtgggggaggatggtgaaccatgtatttcagtgaaatatttaatatatttaaatatc

SEQ ID NO: 186141 - DNA, 3163 bp, Homo Sapiens
  misc_feature (2247)..(2277): n is a, c, g, or t
ttggctatctgccatgcaaatttacgcttagtcccgaagaccagggaccgctggacatcgagtggctgatatcaccagctgataatcagaaggtggatcaagtgattattttatattctggagacaaaatttatgatgactactatccagatctgaaaggccgagtacattttacgagtaatgatctcaaatctggtgatgcatcaataaatgtaacgaatttacaactgtcagatattggcacatatcagtgcaaagtgaaaaaagctcctggtgttgcaaataagaagattcatctggtagttcttgttaagccttcaggtgcgagatgttacgttgatggatctgaagaaattggaagtgactttaagataaaatgtgaaccaaaagaaggttcacttccattacagtatgagtggcaaaaattgtctgactcacagaaaatgcccacttcatggttagcagaaatgacttcatctgttatatctgtaaaaaatgcctcttctgagtactctgggacatacagctgtacagtcagaaacagagtgggctctgatcagtgcctgttgcgtctaaacgttgtccctccttcaaataaagctggactaattgcaggagccattataggaactttgcttgctctagcgctcattggtcttatcatcttttgctgtcgtaaaaagcgcagagaagaaaaatatgaaaaggaagttcatcacgatatcagggaagatgtgccacctccaaagagccgtacgtccactgccagaagctacatcggcagtaatcattcatccctggggtccatgtctccttccaacatggaaggatattccaagactcagtataaccaagtaccaagtgaagactttgaacgcactcctcagagtccgactctcccacctgctaaggtagctgcccctaatctaagtcgaatgggtgcgattcctgtgatgattccagcacagagcaaggatgggtctatagtatagagcctccatatgtctcatctgtgctctccgtgttcctttcctttttttgatatatgaaaacctattctggtctaaattgtgttactagcctcaaaatacatcaaaaaataagttaatcaggaactgtacggaatatatttttaaaaatttttgtttggttatatcaaaatagttacaggcactaaagttagtaaagaaaagtttaccatctgaaaaagctggattttctttaagaggttgattataaagttttctaaatttatcagtacctaagtaagatgtagcgctttgaatatgaaatcataggtgaagacatgggtgaacttacttgcataccaagttgatacttgaataaccatctgaaagtggtacttgatcatttttaccattatttttaggatgtgtatttcatttatttatggcccaccagtctcccccaaattagtacagaaatatccatgacaaaattacttacgtatgtttgtacttggttttacagctcctttgaaaactctgtgtttggaatatctctaaaaacatagaaaacactacagtggtttagaaattactaattttacttctaagtcattcataaaccttgtctatgaaatgacttcttaaatatttagttgatagactgctacaggtaatagggacttagcaagctcttttatatgctaaaggagcatctatcagattaagttagaacatttgctgtcagccacatattgagatgacactaggtgcaatagcagggatagattttgttggtgagtagtctcatgccttgagatctgtggtggtcttcaaaatggtggccagccagatcaaggatgtagtatctcatagttcccaggtgatatttttcttattagaaaaatattataactcatttgttgtttgacacttatagattgaaatttcctaatttattctaaattttaagtggttctttggttccagtgctttatgttgttgttgtttttggatggtgttacatattatatgttctagaaacatgtaatcctaaatttaccctcttgaatataatccctggatgatattttttatcataaatgcagaataatcaaatacattttaagcaagttaagtgtcctccatcaattctgtattccagacttgggaggatgtacagttgctgttgtgtgatcaaacatgtctctgtgtagttccagcaaatcaagctgagctttgaaaaagtttgtcttagttttgtgaaggtgatttattcttnnnnnnnnnnnnnnnnnnnnnnnnnnnnnnngataagaagaaggagtaaagggactactcctccttgccaaatgtgctaaatatcattttaggagaagaaagtgggtttattgtatttcccttaagattgtgagggagtgtggatacagtagaatgagccaacagtttctttataataaatacggtctgcaataaattatttcactagctctaaaacctttccctagattttagtagggagttggtttctgttaatatctttgggtgctgtggtggtaaatgctatattatgaacggtggcatgtatttacagttagagtattgtgtgtacactttttaatggtaaacttaagctgaatgtgtaatggatttgtgtatagttttacatatttggaagcattttaaaaacaggttttaaccttatgtaaaattacttttatactcgtgttaacattttcatctgtgccttttggtaatttaatttctattatgaatttctggtgcctatgagctagctatcacctacctgaaaggtgcttagaggtgaaggtactgtttctaaaaacacatcactgtgatacctttctatcctcacattttcaagcttgcctcttttctgttctttgtggatataacttaagcaattgtgttattcataaaggtttagaaatttcagtattcccaacactctatgtttctgattttataacagtagccatttttgaaagtcagatgtttggcctgttttatatgaataaagtttatttataaaatattataaaaaataagtaaataaacagaacattaataataaagttttggttcttcctattcctgactttcatataatgaaaattatcctattgatctaagtagaagttatcatagaaagtggacacgtatagactttccttccc

SEQ ID NO: 186142 - DNA, 1669 bp, Homo Sapiens
ttggggcgtcgcccttcagcggggcgctgcagctgacggacctggatgacttcatcgggccgtctcaggagtgcatcaagcctgtcaaagtggaaaaaagggcgggaagtggcgtggccaagattcgcattgaagatgacgggagctacttccaaattaaccaagacggcgggacccggaggctggagaaggccaaggtctcgctaaacgactgcctggcgtgcagcggctgcatcacctccgcagagaccgtgcttatcacccagcagagccacgaggagctgaagaaggttctagatgctaacaagatggcggcacccagtcagcagaggctggttgtagtttcggtctcaccacagtctagagcatcgctggctgcacggtttcagctgaatcctacagatactgccaggaaattaacctcattctttaaaaaaataggggtgcacttcgtcttcgacaccgccttctcaaggcacttcagcctcctggagagccagcgagagtttgtgcggcgattccgaggacaggccgactgcagacaggcgctgcccctgctggcctctgcctgcccaggctggatctgctatgccgagaagactcacggcagcttcatcctcccccacatcagcaccgcccggtccccgcagcaggtcatgggctccctggtcaaggacttcttcgcccagcagcagcacttgacccctgacaagatctaccacgtcacagtgatgccctgctatgacaaaaagctggaagcctccagacccgactttttcaaccaggagcaccagacacgggatgtggactgtgtcctcacaacaggagaagttttcaggttgctggaggaagagggcgtctccctccccgacctggaaccagcccctctggacagcctgtgcagcggtgcctctgcagaggagcccaccagccatcggggagggggctcggggggctacctggagcacgtgttccggcacgcggcccgagagctctttggaatccatgtggctgaggttacctacaaacccctgaggaacaaagacttccaggaggtgacactggagaaggagggccaggtgctgctgcacttcgcaatggcgtacggcttccgcaacatccagaacctggtgcagaggctcaaacgagggcgctgcccctaccactacgtggaggtcatggcctgcccctcaggctgcctgaacggcgggggccagctccaggccccagacaggcccagcagagagctcctccagcacgtggagagactgtacggcatggtccgggctgaggcgcccgaggacgcgcctggggttcaggagctgtacacacactggctgcagggcacggactcggagtgtgcaggtcgcttgctgcatacgcagtaccacgccgtggagaaggccagcactggcctgggcatccggtggtaggggctgcaggaccaggactcccaggaggccgtgtccatgtgtgacagcagaaccacatgccccaagaccccagggcttcccccaaaattctgagtgagctgcagggtgtgctgggacccgagtaagagctaggactagccaggacccgcagccgcctcgtcacctccagttgggtgcctctgggttcccactggctctgcccaggtggggtggggtgacccaggccagcaaaaagg

SEQ ID NO: 186143 - DNA, 822 bp, Homo Sapiens
gcagactgcctaagaggatggacagatggacactgggtgagcagagtggcctggccgctggcacacctccctgggcaggaccaggcagcctccagaggggcttcaggagtgaccgggcctggcctccccaccacgggctagggtggacatttggggccttctggggccaaagtgcagactgctggggatgcaggtggcttggatgttctctgactttgttgctgggatctccgctaaagagtgtctgcgctgtggcttctttgcaggagaagttttcaggttgctggaggaagagggcgtctccctccccgacctggaaccagcccctctggacagcctgtgcagcggtgcctctgcagaggagcccaccagccatcggggagggggctcggggggctacctggagcatgtgttccggcacgcggcccgagagctctttggaatccatgtggctgaggttacctacaaacccctgaggaacaaagacttccaggaggtgacactggagaaggagggccaggtgctgctgcacttcgcaatggcgtacggcttccgcaacatccagaacctggtgcagaggctcaaacgagggcgctgcccctaccactacgtggaggtcatggcctgcccctcaggctgcctgaacggcgggggccagctccaggccccagacaggcccagcagagagctcctccagcacgtggagagactgtacggcatggtccgggctgaggcgcccgaggacgcgcctggggttcaggagctgtacacacactggctgcagggcacggactcggagtgtgcaggtcgcttgctgcatac

SEQ ID NO: 186144 - DNA, 1414 bp, Homo Sapiens
actttgtacaaaaaagttggagttaatggcctctaatgattttgataaaggagatggttctcatttaagcaaaaacattccaaatcataaaacttccaatcatgtaggaaatggtgagatatctccaatggaggcacaagggactttagatatcactcagcaagatactgccaaaggtgatcaactagaaagaatttctaatggacctgtattaactttgggtggttcatctgtgagcagtatacaggaggcttcaaatgcggcaacacagcaatttagtggtactgatttgcttaatggacctctagcttcaagtttgaattcagatgtgcctcagcaacgcccaagtgtagttgtctcaccacattctacaacctctgttatacagggacatcaaatcatagcagttcccgactcaggatcaaaagtatcccattctcctgccctatcatctgacgttcggtctacaaatggcacagcagaatgcaaaactgtaaagaggccagcagaggatactgatagggaaacagtcgcaggaattccaaataaagtaggagttagaattgttacaatcagtgaccccaacaatgctggctgcagcgcaacaatggttgctgtgccagcaggagcagatccaagcactgtagctaaagtagcaatagaaagtgctgttcagcaaaagcaacagcatccaccaacatatgtacagaatgtggtcccgcagaacactcctatgccaccttcaccagctgtacaagtgcagggccagcctaacagttctcagccttctccattcagtggatccagtcagcctggagatccaatgagaaaacctggacagaacttcatgtgtctgtggcagtcttgtaaaaagtggtttcagacaccctcacaggttttctaccatgcagcaactgaacatggaggaaaagatgtatatccagggcagtgtctttgggaaggttgtgagccttttcagcgacagcggttttcttttattacccacttgcaggataagcactgttcaaaggatgccctacttgcaggattaaaacaagatgaaccaggacaagcaggaagtcagaagtcttctaccaagcagccaactgtagggggcacaagctcaactcctagagcacaaaaggccattgtgaatcatcccagtgctgcacttatggctctgaggagaggatcaagaaaccttgtctttcgagattttacagatgaaaaagagggactaataactaaacacatctcgactaacagctgccttaatattaaaaaatattggtaaatattcagaatgtggtcgcagattgttaaagagacatgaaaataacttatcagtgctagccattagtaacatggaagcttcctccactcttgccaaatgcctttatgaacttaattttac

SEQ ID NO: 186145 - DNA, 1049 bp, Homo Sapiens
  misc_feature (704)..(734): n is a, c, g, or t
  misc_feature (737)..(787): n is a, c, g, or t
gcccaaccatgcaaagggacacacacgttcacacatgcacacacatgcgctttggcgagacccttctgccaagcgcagcacctggaattaccagtgttcagagcaaggcggtgccgggaacacagcacttacatggagaccacacaaacggcttcacacagtctcacagcccatggagatgcaattagaaaatgtcttccttaatagagaaaaacaaactggaaagtgacaattagtgacgtcacctgtgctggagcatcaaggattgacctctgtccaaggtgaggcctttggagaggcactattaaaacatgagtacttcagtataatggaactcgaaatacagggtactgtggacacattactgaaggaaatagaaaactatcttacaagtagaacagccatagacaactttaacagagattagtgtgcacaccgtgacagctaacacagacaagagccacgcagggttggtgcaaagcacgtgcctgaaaatgtctatatacaaaacagttctttgtaaacatggtgaggtgaatgctcagaaccacggcaaaagatcataaatacaggcagcaatgcatccccacacagcacaaaagacaacacctgaggcctgggaagagcctgacaacacagtactaaaaactcaggtggctgggctcagacaccctacgggtcctctcaaattagtgtgtgtgttnnnnnnnnnnnnnnnnnnnnnnnnnnnnnnntcnnnnnnnnnnnnnnnnnnnnnnnnnnnnnnnnnnnnnnnnnnnnnnnnnnntttagttatatgacagtcaaaaaatgtacacaccatctatgatcaactgagaaaacgcactgtgcccacaccagtgggtggcagccagtgggcttgctgtttcttagcaggatggaggtgtttacccttcttgtggcccagggttgcaggcacaagggtttcctacatccatccacccaaggggagcaagcacaaaacagcaagagcagcggcatgaagaattttcagaagacatgagcaatggtcagatgcagtggctcat

SEQ ID NO: 186146 - DNA, 1202 bp, Homo Sapiens
ttggagaaacaccaatgctggttgctgtgctcacgtatgtggggtatggcgtactcaccctctttggatatcttcgagatttcttgaggtattggagaattgaaaagtgtcaccatgcaacagaaagagaagaacaaaaggactttgtgtcattgtatcaagattttgaaaacttttatacaaggaatctgtacatgaggataagagacaactggaatcggccaatctgtagtgtgcctggagccagggtggacatcatggagagacagtctcatgattataactggtccttcaagtatacagggaatataataaagggtgttataaacatgggttcctacaactatcttggatttgcacggaatactggatcatgtcaagaagcagccgccaaagtccttgaggagtatggagctggagtgtgcagtactcggcaggaaattggaaacctggacaagcatgaagaactagaggagcttgtagcaaggttcttaggagtagaagctgctatggcgtatggcatgggatttgcaacgaattcaatgaacattcctgctcttgttggcaaaggttgcctgattctgagtgatgaactgaaccatgcatcactggttctgggagccagactgtcaggagcaaccattagaatcttcaaacacaacaatatgcaaagcctagagaagctattgaaagatgccattgtttatggtcagcctcggacacgaaggccctggaagaaaattctcatccttgtggaaggaatatatagcatggagggatctattgttcgtcttcctgaagtgattgccctcaagaagaaatacaaggcatacttgtatctggatgaggctcacagcattggcgccctgggccccacaggccggggtgtggtggagtactttggcctggatcccgaggatgtggatgttatgatgggaacgttcacaaagagttttggtgcttctggaggatatattggaggcaagaaggagctgatagactacctgcgaacacattctcatagtgcagtgtatgccacgtcattgtcacctcctgtagtggagcagatcatcacctccatgaagtgcatcatggggcagatggcaccagccttgggtaaagagtgtgtacaacagttagctgaaacaccaggtatttcaggagacgccctgaaggagatgggcttcatcatctatggaaat

SEQ ID NO: 186147 - DNA, 1280 bp, Homo Sapiens
ttggggcttttttctagctgctgtggctgggacaggccctccgctgctcctgtcccaatgtccctggaaagagtacaagtcggacacaggcaaaccttattactataacaaccagagtaaagagtcccgctggacccggcccaaggatctggatgacctagaggttctagtcaaacaagaggctgcagggaaacagcagcagcagctgccacagacacttcagccacagccacctcagccacagcctgaccccccacctgtgcctcctggccccaccccagtgcccacaggcctcctggaacctgagccaggtgggagtgaagattgtgatgtgttggaggccacccagcccctggaacaggggttcctgcagcagctggaggagggccccagcagttctggacagcatcagccacagcaggaggaggaggaatcaaagccagaaccagagaggtctggcctcagttggagcaaccgggagaaggcaaagcaggcattcaaggaactgctgagggacaaggctgtcccctccaatgcctcatgggaacaggccatgaagatggtggtcaccgacccccgttacagtgccttgcctaaactgagtgagaaaaagcaggcattcaatgcctacaaggcgcagcgggagaaggaggagaaggaggaggcccggctaagggccaaagaggccaagcagaccctgcagcatttcctggagcagcatgaacgcatgacctccaccacccgctaccggcgggcagaacagacctttggggagctggaggtctgggctgtggtccctgagagggatcgaaaagaggtttatgatgatgtcctcttcttcctggccaagaaggagaaggaacaggccaagcagctccggcgccgcaatatccaggccctaaagagcatcctggatgggatgagtagtgtcaacttccaaaccacgtggtcccaggcccagcagtacctcatggataaccccagctttgctcaggaccatcagctgcagaacatggacaaggaagatgcactgatctgttttgaggagcacatccgagctttggagagggaagaggaggaggaacgggagcgggcccggcttcgggagcgacgccaacaacgcaagaatcgggaggcgttccagaccttcctggacgagctgcatgagacagggcagctgcactctatgtccacctggatggagctatatccagcagtcagcactgatgtccgctttgccaacatgctgggccagccgggctccacccctctggacttat

SEQ ID NO: 186148 - DNA, 1617 bp, Homo Sapiens
aactttgtacaaaaaagttgggtcgtgctgctcatgggcctcgtgttcgcctctgtctacatctacagatacttcttccttgcgcagctggcccgagataacttcttccgctgtggtgtgctgtatgaggactccctgtcctcccaggtccggactcagatggagctggaagaggatgtgaaaatctacctcgacgagaactacgagcgcatcaacgtgcctgtgccccagtttggcggcggtgaccctgcagacatcatccatgacttccagcggggtctgactgcgtaccatgatatctccctggacaagtgctatgtcatcgaactcaacaccaccattgtgctgccccctcgcaacttctgggagctcctcatgaacgtgaagagggggacctacctgccgcagacgtacatcatccaggaggagatggtggtcacggagcatgtcagtgacaaggaggccctggggtccttcatctaccacctgtgcaacgggaaagacacctaccggctccggcgccgggcaacgcggaggcggatcaacaagcgtggggccaagaactgcaatgccatccgccacttcgagaacaccttcgtggtggagacgctcatctgcggggtggtgtgaggccctcctcccccagaaccccctgccgtgttcctcttttcttctttccggctgctctctggccctcctccttccccctgcttagcttgtactttggacgcgtttctatagaggtgacatgtctctccattcctctccaaccctgcccacctccctgtaccagagctgtgatctctcggtggggggcccatctctgctgacctgggtgtggcggagggagaggcgatgctgcaaagtgttttctgtgtcccactgtcttgaagctgggcctgccaaagcctgggcccacagctgcaccggcagcccaaggggaaggaccggttgggggagccgggcatgtgaggccctgggcaaggggatggggctgtgggggcggggcggcatgggcttcagaagtatctgcacaattagaaaagtcctcagaagctttttcttggagggtacactttcttcactgtccctattcctagacctggggcttgagctgaggatgggacgatgtgcccagggagggacccaccagagcacaagagaaggtggctacctgggggtgtcccagggactctgtcagtgccttcagcccaccagcaggagcttggagtttggggagtggggatgagtccgtcaagcacaactgttctctgagtggaaccaaagaagcaaggagctaggacccccagtcctgccccccaggagcacaagcagggtcccctcagtcaaggcagtgggatgggcggctgaggaacggggcaggcaaggtcactgctcagtcacgtccacgggggacgagccgtgggttctgctgagtaatggagctcattgctttctccaagcttggaactgttttgaaagataacacagagggaaagggagagccacctggtacttgtccaccctgcctcctctgttctgaaattccatccccctcagcttaggggaatgcacctttttccctttccttctcacttttgcatgtttttactgatc

SEQ ID NO: 186149 - DNA, 2002 bp, Homo Sapiens
  misc_feature (1768)..(1806): n is a, c, g, or t
ttggaaataaccacccacagacatctgttcccaacgcatctgctcttcacccttcgctccgtctgttttcccttagcaacccatctctttccaccacaaacctgagcggcccgtctcggcgtcggcagcctcccgtcagccctctcacgctttctcctggccctgaagcacatcaaggtttcagcagacagctgtcttcaaccagcccactggccccatatcctacctcccagatggtgtcctcagaccgaagccaactttcctttctgcccacagaagctcaagcccaggtgtcgccgccacccccttaccctgcaccccaggagctcacccagcccctcctgcagcagccccgcgcccctgaggcccctgcccagcagccccaggcagcctcctcactgccacagtcagactttcagcttctcccggcccagggctcatctttgaccaacttcttcccagatgtgggttttgaccagcagtccatgaggccaggccctgcctttcctcaacaggtgcctctggtgcaacaaggttcccgagaactgcaggactcttttcatttgagaccaagcccgtattccaactgcgggagtctcccgaacaccatcctgccagaagactccagcaccagcctgttcaaagacctcaacagtgcgctggcaggcctgcctgaggtcagcctgaacgtggacactccatttccactggaagaggagctgcagattgaacccctgagcctggacggactcaacatgttaagtgactccagcatgggcctgctggacccctctgttgaagagacgtttcgagctgacagactgtgaacagaaggcagtggaacagaagaatgtttttctgcaacagccaaaatagaatggaatagaatgaagccagctgataccacgggctttcgttatcttgacatagaaggaagcaatgccacggctccagggtttcagatgagatcccatctcagacactgtggcttcctccagatcacacagctttgtactgcctctcccgcctgtggccaaagtcgtgttgcagcaggcaggctgcttggagcttcccatgaactggaaagctcacctccactgcatctttttactggccatccagtcagccgatgtgtaagagtaggaaatactgtgtcactggaggcctccgtagcattgtgtagtgtgctcagaaccactgatctccgtccgcaccgaaggcgggcccggagtgggaggctcggcctggggcggcggcaccggagagggcacctcgatgcctgctctgacctgacccagagggcgaggccctccagcgggggacattcccaggctgagtggaccccacggctctctcccacgcctggattacgacatgaagtttttaccacaagcccgagggcaggcttgagttaggcagactgaaggctaattttcattttctcccagctggtttctgctgcttcagaaaagtacaccttttccttatggaccagaggaagaggaagaccattttatcagtcactgaaaagagtcccctggcactgatgagcctgaagagaactgtgctcctcctcgggggctggggaaggaagacagggactgcaggtgtctcatactcagtggcctccagacaaactccagacaagcacagacctccccactaagagcagccagagggagctggtgaggccctaaccccacccaccgagcaactgagcttccccatccctccccagagctgtgtctctgtgggctgggagtctaannnnnnnnnnnnnnnnnnnnnnnnnnnnnnnnnnnnnnncagtgccttatcattgttgaacccgtagcacctaacacgtgcgtggcagcacagtcgtgtgctggagtgagtgctgcagaaccgtgcgtgcagcgcatgatgaatgagtgcgtccgccatgccgtaaggcaaggctcacctgtagctatctccttccctgccagatcttctcagagctttagcttttctagcactc

SEQ ID NO: 186150 - DNA, 1710 bp, Homo Sapiens
ttggctcagaaatggcggcctccatgttctacggcaggctagtggccgtggccacccttcggaaccaccggcctcggacggcccagcgggctgctgctcaggttctgggaagttctggattgtttaataaccatggactccaagtacagcagcaacagcaaaggaatctctcactacatgaatacatgagtatggaattattgcaagaagctggtgtctccgttcccaaaggatatgtggcaaagtcaccagatgaagcttatgcaattgccaaaaaattaggttcaaaagatgtcgtgataaaggcacaggttttagctggtggtagaggaaaaggaacatttgaaagtggcctcaaaggaggagtgaagatagttttctctccagaagaagcaaaagctgtttcttcacaaatgattgggaaaaaattgtttaccaagcaaacgggagaaaagggcagaatatgcaatcaagtattggtctgtgagcgaaaatatcccaggagagaatactactttgcaataacaatggaaaggtcatttcaaggtcctgtattaataggaagttcacatggtggtgtcaacattgaagatgttgctgctgagtctcctgaagcaataattaaagaacctattgatattgaagaaggcatcaaaaaggaacaagctctccagcttgcacagaagatgggatttccacctaatattgtggaatcagcagcagaaaacatggtcaagctttacagcctttttctgaaatacgatgcaaccatgatagaaataaatccaatggtggaagattcagatggagctgtattgtgtatggatgcaaagatcaattttgactctaattcagcctatcgccaaaagaaaatctttgatctacaggactggacccaggaagatgaaagggacaaagatgctgctaaggcaaatctcaactacattggcctcgatggaaatataggctgcctagtaaatggtgctggtttggctatggccacaatggatataataaaacttcatggagggactccagccaacttccttgatgttggtggtggtgctacagtccatcaagtaacagaagcatttaagcttatcacttcagataaaaaggtactggctattctggtcaacatttttggaggaatcatgcgctgtgatgttattgcacagggtatagtcatggcagtaaaagacttggaaattaaaatacctgttgtggtacggttacaaggtacacgagtcgatgatgctaaggcactgatagcggacagtggacttaaaatacttgcttgtgatgacttggatgaagctgctagaatggttgtaaagctctctgaaatagtgaccttagcgaagcaagcacatgtggatgtgaaatttcagttgccaatatgatctgaaaacccagtggatggctgaaggtgttaaatgtgctataatcattaagaatactgtgttctgtgttattgttctttttctttttagtgtgtggagattgtaattgccatctaggcacacaaacatttaaaaggatttggactgcatttaattgtaccattcagaatggactgtttgtacgaagcatgtataatgcagttatcttctttctttcgtcgcagccagtcttttttgcttctcctacaaaacgtaacttgcaatttgccagtttattattgttggatacaaagttcttcattgataa

SEQ ID NO: 186151 - DNA, 1064 bp, Homo Sapiens
ttggcaagcttcatctctgcttacagaatctcaccttattgagtgggttccactttatttttcatttgttatctacattttgaagggtttatgtgcaaagtgaaaacaaattttgaaaaataagacaaatccattctcttcttcaattcagtctaatatgcattgtagtgtcttttaatcagtcttatcctctaagtcaacttcattttcctctttgtgaatacccatagcaatatgtaagattttattgaagtttcctgtgataactgaggaacactttgctatgcctcactgcccaatagggtgggtcatcaattaggagaaatcccaaattataaaagccaacatatgccgtgacctacgtaggaaaagatgtatttgtgcatcttctttctgggtagttaaaaattactccctcttttctctagcattttgacatttcagactcaatgctctgatctctagggagtgtgattattcaaactaatgagaggacaagaagacacagttttagaatctactgctgctaaagcacattaaaaacaaatcctggtttttaatgtatgcatagtttcatatttaatgaatatgctttcattaaatagggaggtagatttgaaaaaactgttataaagaaatgtgccttttggggaatgaatacttttgttcatgtctagcccactgggaattttgttttcaccttatactgagtcctttttctaatgtaaaaatatttcttccaagtttgatttctgtatcagggtaacattgagaacacacatatttctgtttgaggatttgtgacttcctatggaaacagtcttgcatctatgtatttacaaatgaaatttaaagtattctaaagctttgccttaaatactgcttgcatactgatttacttaatgctaagcatggcagggttataaatttaaatactataagacctggctgattcccagatgtatcaataaattgttatagtaccttatgggacaatgctattaaagataaattttcatacattgtatttttagccaataaaatatgggatgaaaattaataaa

SEQ ID NO: 186152 - DNA, 2146 bp, Homo Sapiens
tcatttatcacaaaatgaacaatttcaattcttaaacatacaatcactttttttcatactaactcaaaatgagtaaacagaattttattcaaactttacaaatatcatttacatttagcctgagattaaacatgagaaagttcaacctgaagttagacttcattgcccagttaagcatctgaaaataaagctgagaatgaacatacatcatcaaacaaagcattccaatgaagtctggcaatgaattgtgacacaaactgaactttaatttgctctggtccacatgatcttcagagcctaaaagttcctgttttttaataatgatggaaaaatatctgcaaatgataaatgcatgaaggtatgaccagatgcaaaattttagttcaacatttctatagcagctgctttaggtgaccattaaaaaacaactccccaatccttactgttcaacatgtacttgaaaacatgcagcagcatggtacagtttattaaatttataaatatcagtacctgtaataaaatataaaatactgactattcctttttcaaatattaagtctctgaatgcttcattcatcctttggtttcaaacccatacaatgcactcatattacattgtagatttcgaatggagacagaacactgtacatctgttggggaaggtggggtgctgtaggaataccaaagcactacatcatagaaagtaaacgttgaagcaaaaatactttctgaatatatactgtacattatgtaaacacacattcagaataagaatcaacacaggccaaaatattgttttctaggaaaccagaatcttctttcttttaaatcacacactgaagatgcttttttgttaagaaaaagaatgaagtctgttcctgtatttgcttatgtgcttagatatcttggaaatgagtaattattacattcatttgctaacggtttatcctctgcttagttggctggctgttgcaaacacggaatacagaactatttcagtccctgtttttcatttaatactagttaagtaatatataattaattcatctttattaatccattattagtaatataaatagattaagtgaagcagtgaatttcaaaatttgtgcaggggaaactagttgataatttgtttccaataaggctggtagcaattaattactacaaagtttgtccaagctagtattgaacccctgatttagcaggctgaatcaaagtgtatagttaggtacttctaattcctctattactgtgcaaatctagaatttcctatgtaaaagacagtgctggcagcatcaaagccctgtaatagtatgaaatagtgattaggatttgaaatgaagagatattatatgaagacatgtgaatgtcttaatgatggtatcatagcaacggcctcagaattcccttactgaaacagaaactaagacaaatcattattcaataatcttctgagccaaaagcctaagttggaagcaagtgataaaaacacaaaaccaaagatgcattttctatgaccatatgcaagaattttaagctttatatcaacattctgtaccagcaccagcccctctgaaaggaaaaagtgtagtcatgactgtccatctcttttcaaagcttccagtctttgaagcagtgcgtttccaaatgcttctcggtaggcggggctgagtgtatccaacaaggagtagactgtttcatggtagggagtctgtaaatgatcatctacctggtcaaaagcatagcctaccaccttgagccctgcttcagtgagttctaggcaatatctgtttctttcctttgtttccacattgatataggccacatcatccgcacaccgcaggcttttcgagacaaacatgttgttaacagcaaagagaacatcatttacaactgcttcagcttcgagcctcatgtctttcatgtcagttccttcaaaaccgttcagctctgaaccttcttcaaatcctgacatactgcttagctccatgggattacagtctgtttccattcttgatgatgcagaaagatcaagaatccagtacttgaagggaaggaatcctcacaggtcagtgaagtaggtcaccaaacagttgtgataatcagcaccgagctgcgcgcccggcgtcctcttcttccccaa

SEQ ID NO: 186153 - DNA, 2218 bp, Homo Sapiens
ttggcccgcctgggaagggatgcaaggaagccctccggcgctgcgctccgaggcgggagacagcgtccccctccgcccctcgggtcctggcgcctcagagcccggcccaggccgcggaacggtgatgctcgggccggacgggcgggcgcggatccctgcgtcccgctgaaaatgtgtgtctgacatgcaagctcagtggggcagagacccgtggattgctgtgccctgccctccggacccggatcatgaaggtgttgggaagaagcttcttctgggtgctgtttcccgtccttccctgggcggtgcaggctgtggagcacgaggaggtggcgcagcgtgtgatcaaactgcaccgcgggcgaggggtggctgccatgcagagccggcagtgggtccgggacagctgcaggaagctctcagggcttctccgccagaagaatgcagttctgaacaaactgaaaactgcaattggagcagtggagaaagacgtgggcctgtcggatgaagagaaactgtttcaggtgcacacgtttgaaattttccagaaagagctgaatgaaagtgaaaattccgttttccaagctgtctacggactgcagagagccctgcagggggattacaaagatgtcgtgaacatgaaggagagcagccggcagcgcctggaggccctgagagaggctgcaataaaggaagaaacagaatatatggaacttctggcagcagaaaaacatcaagttgaagcccttaaaaatatgcaacatcaaaaccaaagtttatccatgcttgacgagattcttgaagatgtaagaaaggcagcggatcgtctggaggaagagatagaggaacatgcttttgacgacaataaatcagtcaagggggtcaattttgaggcagttctgagggtggaggaagaagaggccaattctaagcaaaatataacaaaacgagaagtggaggatgacttgggtcttagcatgctgattgactcccagaacaaccagtatattttgaccaagcccagagattcaaccatcccacgtgcagatcaccactttataaaggacattgttaccataggaatgctgtccttgccttgtggctggctatgtacagccataggattgcctacaatgtttggttatattatttgtggtgtacttctgggaccttcaggactaaatagtattaagtctattgtgcaagtggagacattaggagaatttggagtgttttttactctttttcttgttggcttagaattttctccagaaaagctaagaaaggtgtggaagatttccttacaagggccgtgttacatgacactgttaatgattgcatttggcttgctgtgggggcatctcttgcggatcaaacccacgcagagcgtcttcatttccacgtgtctgtccttgtcaagcacacccctcgtgtccaggttcctcatgggcagtgctcggggtgacaaagaaggcgacattgactacagcaccgtgctcctcggcatgctggtgacgcaggacgtgcagctcgggctcttcatggccgtcatgccgactctcatacaggcgggcgccagtgcatcttctagcattgtcgtggaagttctccgaatcctggttttgattggtcagattcttttttcactagcggcggtttttcttttatgtcttgttataaagaagtatctcattggaccctattatcggaagctgcacatggaaagcaaggggaacaaagaaatcctgatcttgggaatatctgcctttatcttcttaatgttaacggtcacggagctgctggacgtctccatggagctgggctgtttcctggctggagcgctcgtctcctctcagggccccgtggtcaccgaggagatcgccacctccatcgaacccatccgcgacttcctggccatcgttttcttcgcctccatagggctccacgtgttccccacgtttgtggcgtacgagctcacggtgctggtgttcctcaccttgtcagtggtggtgatgaagtttctcctggcggcgctggtcctgtctctcattctgccgaggagcagccagtacatcaagtggatcgtctctgcggggcttgcccaggtcagcgagtttttctttgtcctggggagccgggcgcgaagagcgggcgtcatctctcgggaggtgtacctccttatactgagtgtgaccacgctcagcctctgctcgccccggtg

SEQ ID NO: 186154 - DNA, 2456 bp, Homo Sapiens
actttgtacaaaaaagttgggcaaacattgaggaaagccaggcagtagaggccgctatggcgaacgttccgtgggcagaggtctgcgagaaattccaggcggcgctcgctctgtcgcgggtggaactgcataaaaatccggagaaggaaccatacaagtccaaatacagcgcccgggcgctactggaagaggtcaaggcgctgctcggccctgcgcctgaggacgaggatgagcggcctgaggccgaggacagcccgggtgccggtgaccacgccctggggctgccggctgaggtggtggagcccgaggggcccgtcgcccagcgagcggtgaggctggcagtcatcgagttccacctcggggtgaaccacatcgacacggaggagctgtcggcgggggaggagcacctggtgaaatgcctgcggctgctgcgcaggtaccggctctcgcacgactgcatctctctctgcatccaggcgcagaataacctgggtatcttgtggtctgaaagagaagaaattgaaactgcacaggcttacctagagtcatcagaagcactatataatcagtatatgaaagaggttgggagtcctcctcttgatcctactgagcgttttcttcctgaagaagagaaacttactgaacaagagagatcaaaaagatttgaaaaggtttatactcataacctatattacctagctcaagtctaccagcatctggaaatgtttgagaaggctgctcactattgccatagtacactaaaacgccagcttgagcacaatgcctaccatcctatagagtgggctatcaatgctgctaccttgtcacagttttacatcaataagctatgctttatggaggccaggcactgtttatcagctgctaatgtcatttttggtcaaactggaaagatctcagccacagaagacactcctgaagctgaaggagaagtgccagagctttatcatcaaagaaagggggaaatagcaaggtgctggatcaaatactgtttgactctcatgcagaatgcccaactctccatgcaggacaacataggagagcttgatcttgataaacagtctgaacttagagctttaaggaaaaaagaactagatgaggaggaaagcattcggaaaaaagctgtgcagtttggaaccggtgaactgtgtgatgccatctctgcagtagaagagaaagtgagctacttgagacctttagattttgaagaagccagagaacttttcttattgggtcagcactatgtctttgaggcaaaagagttctttcagattgatggttatgtcactgaccatattgaagttgtccaagaccacagtgctctgtttaaggtgcttgcattctttgaaactgacatggagagacggtgcaagatgcataaacgcagaatagccatgctagagcccctaactgtagacctgaatccacagtattatctgttggtcaacagacagatccagtttgaaattgcacatgcttactatgatatgatggatttgaaggttgccattgctgacaggctaagggatcctgattcacacattgtaaaaaaaataaataatcttaataagtcagcactgaagtactaccagctcttcttagactccctgagagacccaaataaagtattccctgagcatataggggaagatgttcttcgccctgccatgttagctaagtttcgagttgcccgtctctatggcaaaatcattactgcagatcccaagaaagagctggaaaatttggcaacatcattggaacattacaaatttattgttgattactgtgaaaagcatcctgaggccgcccaggaaatagaagttgagctagaacttagtaaagagatggttagtcttctcccaacaaaaatggagagattcagaaccaagatggccctgacttaatccttgtttttaaagaaaggaaatgtgcaatattgaagtgatctttttccctagtcagacaggcccaattccattgtgatgtttacctttatagccaggtgagtgcagtttgaacttgagatacagtcaactgagtgtttgctaggatcctaaggaacataaagttaattaaaaacttacacctaattatgtaaattgccttgttaaagacatgtgatttgtattttagatgcttgtttcctattaaaatacagacatttctaccctcagtttctaaatgtagactatttgttggctagtacttgatagattccttgtaagaaaaaatgctgggtaatgtacctggtaacaagcctgttaatatattaagattgaaaaagtaacttctatagttactccttctaaatatttgacttcctaaattccccccacccaaatcttcccttttgaaaatactaaaaaactaatttatgtttattataaagtgtaaaatggtttgtcttaattataggagaaaaaggccttgttagaata

SEQ ID NO: 186155 - DNA, 1231 bp, Homo Sapiens
aaatatatgattactcaaatatcctaagccatacggcaggccctataacaataagttacaaatagtctgaatttaataacttaagtgtgatatggttaatataatacatactgtgtgaatatcttaactaacctctttcaggtaaggtgataattaaaaggtttaaatttacagtttcaacttctgctcagaagaatcatgccagtattctagcaatggtgatgacatcccattattgtaatgcagaacatgataatgtccatattattttgaattatacttgaagaaataattctatgtacaagtgagtctatattctatgtgcaaattttcaatggtgcaggtttataaccaaagctgcgtttaacaaatgctttctggcttctgaaaacatgtcatgaaaatacttcctaaaagtgaacaaactaaagtcagaagcaggtggcaccagttcttttttgcctttatgtgtgatggacttcatgaagcattaactcccgaggtatatttgtttctggaccatacagcttacatgctcttctttcaaaggcagctaccatctgcttcacaacttcatcaaaaaagagtgtggcaagctgggaatgtagaagtgatcgaaattcaaaagaaattgaaaaatccaaggtacaagttcttgggtagccaggaagacctgggctaaaacgccaaatagtctccaaatgattgaaaagtctcccatcagtacaagatgcctttactaaatgaggtttcaccaaggttactactgatgtatatcgctccaacacaggtggaaatccaatttctaatcttgttttacaatatccagatctctttgatataacatctgattttttgcaccaaggaacaaaatgcttgtaatcctccactcccgatactacatcatacatttcctgcattgaatatcctaaaattcttctctctgaatattctttccttttgtttattaatggtgcagtgattttgaagaaagttcgtgcacatatctccttaggcaaaattgaggtatgtagtggaagagttctgctcatcagtataccacaggaagctaaatatctgccattccgcacgggcgcctgcgccccggccgctgtcgccgacttcggacggcatcccgagactacccttctcaaggccgtatgaccagtccgagctgccatgatagactctccgaagccggtcgtcacctcccaacttttttgtacaaagt

SEQ ID NO: 186156 - DNA, 3147 bp, Homo Sapiens
  misc_feature (1831)..(1863): n is a, c, g, or t
  misc_feature (2959)..(2981): n is a, c, g, or t
tttgtacaaaaaagttggtgaactgcaccttataaaaagaattgcttttacttgtcaaatgctcgtcctgacaactggttctgttatccttgtatacctaatcatgagctggtttgggctaaaatgaaaggttttgggttttggccagccaaagtcatgcagaaagaagacaatcaagtcgacgttcgcttctttggccaccaccaccagagggcctggattccttctgaaaacattcaagatatcacagtcaacattcatcggctgcacgtgaagcgcagtatgggttggaaaaaggcctgtgatgagctggagctgcatcagcgtttcctacgagaagggagattttggaaatctaagaatgaggaccgaggtgaggaagaggcagaatccagtatctcctccaccagtaatgagcagctaaaggtcactcaagaaccaagagcaaagaaaggacgacgtaatcaaagtgtggagcccaaaaaggaagaaccagagcctgaaacagaagcagtaagttctagccaggaaatacccacgatgcctcagcccatcgaaaaagtctccgtgtcaactcagacaaagaagttaagtgcctcttcaccaagaatgctgcatcggagcacccagaccacaaacgacggcgtgtgtcagagcatgtgccatgacaaatacaccaagatcttcaatgacttcaaagaccggatgaagtcggaccacaagcgggagacagagcgtgttgtccgagaagctctggagaagctgcgttctgaaatggaagaagaaaagagacaagctgtaaataaagctgtagccaacatgcagggtgagatggacagaaaatgtaagcaagtaaaggaaaagtgtaaggaggaatttgtagaagaaatcaagaagctggcaacacagcacaagcaactgatttctcagaccaagaagaagcagtggtgctacaactgtgaggaggaggccatgtaccactgctgctggaacacatcctactgctccatcaagtgccagcaggagcactggcacgcggagcacaagcgcacctgccgccggaaaagatgaagctggcccttcccggagtcaccccgatgattactcttttcagacacagcggtttttgtttccaagaagccaaaattgtttagaatttgcttcccattttgcaccagcctttaaacacttttcgtgaagaaattttgcacagtagtttaaatcttttgttaatgctcctccgaagtttttcagggggtaaaagtaacatcagtggagggtattattttaaataaattttaattgagaatttgttgcattttcagcaaattttaaaacatttttaggttttacagagattttaacctttaaacaacagatctttaaaaaacaggtgaatacaagtgagtttaacaaagaaacatttagaatagatctgaatgtaagaactacagaactgtttcagaaataaaacatactaccttgatgtgacatttttttcttaaccttgttgagctggttttgttcagcttaatttactgttcaaaggcattatctgttggtcacaccagtgggtatatgattgaatttagggaacagggttgacacagcagggctagtcctgcatattttttcttaaatatttcccaattgtgtttttcattatttcttttcaatatataacttttataacaaattattagctttgatcttgtagtttaaaattgcagggaactggggtaatcttttactgagctggatcttagagaaaatgaatatttaaattttaaagtttgcacatttcatctttgtcctaacatgagtgcttgtnnnnnnnnnnnnnnnnnnnnnnnnnnnnnnnnntacctttatccatatgtgaaattatagatgaggcatacgaatttgtttaatgcttcccttcccttcccacatatcatctcactgcctattatctggtgtcacctcatgtatcgtaagttaatactaaaagaagagaaagcacttaagtttcacagaagccgttatgtttgtagtaatgggtcattgcctactaatgaactccatcactgtacacagaatgaagaataatgcatgttaattttcttgtattaaagatgccgtgatttgtaaaaagtctgtattttgcggaatgtctggattaagaagcattaccaataggaatggatcgatagttgaataatgattttttatacatagatatataaaatacagccaggaaaacttaaattacttttcttttaaaatatctcacaatttatgtggtatttttaaagactgatcttagaccaagtcaaattcccatttatcatttagttattttttgaggttagagaataatttgtacatatttatttagacctttgatatttattaaagcaattactcacaatggaagtgaaagaatcaggagaaaagccttttaaaaagtattctccaggtttgtcagggtcactctaaagataaaaatgtaactaagtcttctgtgaaatatcatccatctaatcttgatgctgttgcagatggtggtgacacaagttaattgacaaactactgccaaatggtgcacaatattttgtaaaaagtacccagtagccccatttcatacaatgtacctaaattatgcagtaacttggcatcatcgttccctccttgttgctgtgtaattagtcagtgttgccacagtgtgtggcgctgatggagatgtcagaaccgagaacacttaaccttctttgattgtttttcaagttttaagacttcgatccacccctatgagagcaagtaattgtggaaatatttttggtgtaaaatcattccagagtatgtaatatttaactgatagctgcatgaaagtgagattcgtgttactttggcttttctgtctctgttgacacggttgcacatttccaagttactacagcgtgaaactgtgtgtttnnnnnnnnnnnnnnnnnnnnnnngagattgtggcctgttttgtaaaagttttacgtaaaattacaattgattgttttaggaatcattattaaaaattttctgcaaatcataaagctatatcgaggtgttgagcttagccactatgcacattgtaattattcattgtggctgtccagttctatgatgcat

SEQ ID NO: 186157 - DNA, 950 bp, Homo Sapiens
  misc_feature (680)..(702): n is a, c, g, or t
tttgtacaaaaaagttggctgatcttagaccaagtcaaattcccatttatcatttagttattttttgaggttagagaataatttgtacatatttatttagacctttgatatttattaaagcaattactcacaatggaagtgaaagaatcaggagaaaagccttttaaaaagtattctccaggtttgtcagggtcactctaaagataaaaatgtaactaagtcttctgtgaaatatcatccatctaatcttgatgctgttgcagatggtggtgacacaagttaattgacaaactactgccaaatggtgcacaatattttgtaaaaagtacccagtagccccatttcatacaatgtacctaaattatgcagtaacttggcatcatcgttccctccttgttgctgtgtaattagtcagtgttgccacagtgtgtggcgctgatggagatgtcagaaccgagaacacttaaccttctttgattgtttttcaagttttaagacttcgatccacccctatgagagcaagtaattgtggaaatatttttggtgtaaaatcattccagagtatgtaatatttaactgatagctgcatgaaagtgagattcgtgttactttggcttttctgtctctgttgacacggttgcacatttccaagttactacagcgtgaaaactgtgtgtttnnnnnnnnnnnnnnnnnnnnnnngagattgtggcctggttttgtaaaagttttaggtaaaattacaattgattgttttaggaatcattattaaaaattttctgcaaatcataaagctatatcgaggtgttgagcttagccactatgcacattgtaattattcattgtggctgtccagttctatgatgcattctgggcattttgtaagctgctctgactagccaatatatagattcatttaatgtgttaacattgggttaataaatgtattt

SEQ ID NO: 186158 - DNA, 896 bp, Homo Sapiens
  misc_feature (183)..(205): n is a, c, g, or t
ttacaaaatgccagaatgcatcatagaactggacagccacaatgaataattacaatgtgcatagtggctaagctcaacacctcgatatagctttatgatttgcagaaaatttttaataatgattcctaaaacaatcaattgtaattttacctaaaacttttacaaaaccaggccacaatctcnnnnnnnnnnnnnnnnnnnnnnnaaacacacagttttcacgctgtagtaacttggaaatgtgcaaccgtgtcaacagagacagaaaagccaaagtaacacgaatctcactttcatgcagctatcagttaaatattacatactctggaatgattttacaccaaaaatatttccacaattacttgctctcataggggtggatcgaagtcttaaaacttgaaaaacaatcaaagaaggttaagtgttctcggttctgacatctccatcagcgccacacactgtggcaacactgactaattacacagcaacaaggagggaacgatgatgccaagttactgcataatttaggtacattgtatgaaatggggctactgggtactttttacaaaatattgtgcaccatttggcagtagtttgtcaattaacttgtgtcaccaccatctgcaacagcatcaagattagatggatgatatttcacagaagacttagttacatttttatctttagagtgaccctgacaaacctggagaatactttttaaaaggcttttctcctgattctttcacttccattgtgagtaattgctttaataaatatcaaaggtctaaataaatatgtacaaattattctctaacctcaaaaaataactaaatgataaatgggaatttgacttggtctaagatcagtctttaaaaataccacataaattgtgccaa

SEQ ID NO: 186159 - DNA, 835 bp, Homo Sapiens
  misc_feature (610)..(632): n is a, c, g, or t
tgtacaaataatttgtacatatttatttagacctttgatatttattaaagcaattactcacaatggaagtgaaagaatcaggagaaaagccttttaaaaagtattctccaggtttgtcagggtcactctaaagataaaaatgtaactaagtcttctgtgaaatatcatccatctaatcttgatgctgttgcagatggtggtgacacaagttaattgacaaactactgccaaatggtgcacaatattttgtaaaaagtacccagtagccccatttcatacaatgtacctaaattatgcagtaacttggcatcatcgttccctccttgttgctgtgtaattagtcagtgttgccacagtgtgtggcgctgatggagatgtcagaaccgagaacacttaaccttctttgattgtttttcaagttttaagacttcgatccacccctatgagagcaagtaattgtggaaatatttttggtgtaaaatcattccagagtatgtaatatttaactgatagctgcatgaaagtgagattcgtgttactttggcttttctgtctctgttgacacggttgcacatttccaagttactacagcgtgaaaactgtgtgtttnnnnnnnnnnnnnnnnnnnnnnngagattgtggcctggttttgtaaaagttttaggtaaaattacaattgattgttttaggaatcattattaaaaattttctgcaaatcataaagctatatcgaggtgttgagcttagccactatgcacattgtaattattcattgtggctgtccagttctatgatgcattctgggcattttgtaagctgctcctgactaacaata

SEQ ID NO: 186160 - DNA, 1463 bp, Homo Sapiens
  misc_feature (301)..(568): n is a, c, g, or t
actttgtacaaaaaagttggtgaggttaaaatccaagaaccaacatttagagctttgtgcttttctctcattccatcactttgtaatgatgatacttaacatgagcagggtgaatgacaggtactgacgaagtccaacacaaaggtataatacagcctgttgtctaaagccaaggagtcataaaaccatgagaaataaataggaatcaatagttagtagtgacattggtgctctctagaaatctcagcatgagctgctatagaataccctcccagcaacaaaacctaatcagtaaggccannnnnnnnnnnnnnnnnnnnnnnnnnnnnnnnnnnnnnnnnnnnnnnnnnnnnnnnnnnnnnnnnnnnnnnnnnnnnnnnnnnnnnnnnnnnnnnnnnnnnnnnnnnnnnnnnnnnnnnnnnnnnnnnnnnnnnnnnnnnnnnnnnnnnnnnnnnnnnnnnnnnnnnnnnnnnnnnnnnnnnnnnnnnnnnnnnnnnnnnnnnnnnnnnnnnnnnnnnnnnnnnnnnnnnnnnnnnnnnnnnnnnnnnnnnnnnnnnnnnnnnnnnnngaccctgtctcagaaaaaaagaaaattcaaggccagttaagacaaaatgctatgactttgaaattcacagaaagaaataacagtttagattaggtcttcaggtattcaggatagagataatctcctgaaaaacctgaatttcagagattcttagactggctgccaaaggatgaagctagtgaaggagaaaaagcttaaattccatcttgagctcttggattgtgataatacaatgatttcattaacttttcatttctgtatacctgttcatttggaatttaatgcttgacttctttgttcattttggatctaaacttctcttttcttccttccccattcacatctattagaagactgcatcaccatttctttggcccccttactctgttgtcctttcccttttctttcagtttttttaatcgcatgtctagtatattaagtctccatagccctcctgatgcagtagacagtgctatgctgtggatataataccaaccagaaattggcatttataaacctgttaagagactttaagcatgcttcaagaggcagttgacccactggaatttctataaggctggtacccttcccagagttacagaatcttaggtgccgtctctagtctgtgagggaggaactcccagcatccccattgcccacaaatggaatcctcactgtatccactaggagattagaaattaaggtttcttcactacttctatggtagggttgtctgaaattccctttcaggctgtgggtactggtcttgggttctagtcataaggggttccttataaggagcaggcggaggggagtacactttcatgtgatttaattttgatcctgccctctccagctgctccttcaaaagatacatcaaaagatagaaactctg

SEQ ID NO: 186161 - DNA, 1597 bp, Homo Sapiens
ttggggaactcccgttaccgcagtgccaccagcattactcattcatccccattcaggctttcctcagcatttattaaggactctctgctccagcctctcactctcactctcctccgctcaaactcagctcacttgagagtctcctcccgccagctgtggaaagaactttgcgtctctccagcaatgcatctccttgcgattctgttttgtgctctctggtctgcagtgttggccgagaactcggatgattatgatctcatgtatgtgaatttggacaacgaaatagacaatggactccatcccactgaggaccccacgccgtgcgcctgcggtcaggagcactcggaatgggacaagctcttcatcatgctggagaactcgcagatgagagagcgcatgctgctgcaagccacggacgacgtcctgcggggcgagctgcagaggctgcgggaggagctgggccggctcgcggaaagcctggcgaggccgtgcgcgccgggggctcccgcagaggccaggctgaccagtgctctggacgagctgctgcaggcgacccgcgacgcgggccgcaggctggcgcgtatggagggcgcggaggcgcagcgcccagaggaggcggggcgcgccctggccgcggtgctagaggagctgcggcagacgcgagccgacctgcacgcggtgcagggctgggctgcccggagctggctgccggcaggttgtgaaacagctattttattcccaatgcgttccaagaagatttttggaagcgtgcatccagtgagaccaatgaggcttgagtcttttagtgcctgcatttgggtcaaagccacagatgtattaaacaaaaccatcctgttttcctatggcacaaagaggaatccatatgaaatccagctgtatctcagctaccaatccatagtgtttgtggtgggtggagaggagaacaaactggttgctgaagccatggtttccctgggaaggtggacccacctgtgcggcacctggaattcagaggaagggctcacatccttgtgggtaaatggtgaactggcggctaccactgttgagatggccacaggtcacattgttcctgagggaggaatcctgcagattggccaagaaaagaatggctgctgtgtgggtggtggctttgatgaaacattagccttctctgggagactcacaggcttcaatatctgggatagtgttcttagcaatgaagagataagagagaccggaggagcagagtcttgtcacatccgggggaatattgttgggtggggagtcacagagatccagccacatggaggagctcagtatgtttcataaatgttgttaaactccacttgaagccaaagaaagaaactcacacttaaaacacatgccagttgggaaggtctgaaaactcagtgcataataggaacacttgagactaatgaaagagagagttgagaccaatctttatttgtactggccaaatactgaataaaacagttgaaggaaagacattggaaaaagcttttgaggataatgttactagactttatgccatggtgctttcagtttaatgctgtgtctctgtcaataaactctcaaa

SEQ ID NO: 186162 - DNA, 1534 bp, Homo Sapiens
  misc_feature (244)..(358): n is a, c, g, or t
ctttgtacaaaaaagttggctactgttagtccccttgttagatgcagtcactcctcctggtcacctagtgagcagggacagagccaggagtcaagtgcagtgccaaggtgcatgaccctctgagaagtcactgggctgatttgacctccgactcattggttgtgcaaatgccatgtgcagcctttcctgaggccataggagggcttcctgcagctgagatctatgcaggccatcctctcaacannnnnnnnnnnnnnnnnnnnnnnnnnnnnnnnnnnnnnnnnnnnnnnnnnnnnnnnnnnnnnnnnnnnnnnnnnnnnnnnnnnnnnnnnnnnnnnnnnnnnnnnnnnnnnnnnnnggggtgtggcatctgtgtttctgatgcttactacaatatgtgaaccactactttagaaaatctgctttaacttggtattcctctaattgtgttccctaggaaatgactgtcccaagagccagtgattattccaggtgttccctggaaaggtcaagtgagtctgggaaacactatgtctgtacacctcttgaaggtgtcgaatgtatgtttatacatcagtggaacccatttttctagcctagcaagtcccaaacacattacactgaagagattttggtgaggaaacttgctggagttttcagggaacactgttctaggcttaggtgaccttaggatcactcaagtagacccttcactccctgcgagaaattaggatgaataactacctgtggcattgttggttctgaacttttacagttcaggcctgctgtgaatctttgatgaagctttaaggtgacactgttgtacaagatgtcagctttgctgaaacgcacattacctggaataagtgctttaattgtagaattagaatgggatttactgtactgttttaaatgagattggcttcagaatccattacagttaccttacatagcacttgatacgtgttaaatgaacatatgaatgtaatttatatattcctagaatttaagttactttgtgagatttgggcctgtccctcaatgccagtttaggatttctttttttctataccttgaaatgattataaaatagattttcatgggaattttaaaaactctatccaaaacatttttggagcattttaaagccccatacacagaagtatacgaaagcacacaaaacactccaagtttcagcagttttagcgccaccattaacccactttgcttgtctcatgaaaaatctttgttaaagtttgtacacaggtaacaaaaagttactttaaaagatatataaagggctgtaagctaattgtggtgtctagtaagtagcataatgagatgtgaggagttggaactttgcgtgttttgcgtattttcatctgcattcagcttcttactctgggtttgtactcgagtgttatttctttacaaatgcccttgtaattaccactctgaagtctgctgactgtgtctcttgaacatacttaggatattctgcacattatggaaaaaggtaaattttagaagtttc

SEQ ID NO: 186163 - DNA, 766 bp, Homo Sapiens
  misc_feature (59)..(75): n is a, c, g, or t
ttgggaacgatctcagctaaattttttaggtgtaattcatatgtatttgagtggaggannnnnnnnnnnnnnnnnctagtgttaaattttaaccagcattaacatggtagagtggaggagtgagtgtgttcaaagatcaacatatttaacttttaaacactatctcaaagccagcataattaactactttgactgtgggctgaccttggtttttttaacaatcaggcatttttaattagataatccactcatgtatttccccctcactgcagttgtctgcatttttagcctcttttctcttcgttagttgtcagaatatgccttcgtcaaggctcagaggtaacaagacagaaaattcatctgggattttcctgctgtggctggcacattcttctgattaacagacacttgtatgatgctttaggctagttagtgcattttttagcaaacatttatcttaaacatcacagatccactggggggtgcaaggggctactgttagtcctcttgttagatgcagtcactcctcctggtcacctagtgagcagggacagagccaggagtcaagtgcagtgccaaggtgcatgaccctctgagaagtcactgggctgatttgacctccgactcattggttgtgcaaatgccatgtgcagcctttcctgaggccataggagggcttcctgcagctgagatctatgcaggccatcctctcaacaggtgccactccaagggcggtcctcggtgcggcagcagcagcttcacttgt

SEQ ID NO: 186164 - DNA, 1675 bp, Homo Sapiens
ttggggcgtctctgagggcaaagctctcagaggagcagaagaaacaagtggatctggagagggaaagagcttcccaggaagagcagatcgcccggaaagaggaggagctctcgcgggtgaaggaaagggtggtgcagcaggaggtggtcaggtatgaggaggagccaggcctccgggccgaggcgagtgcctttgccgagagcatcgatgtggagctgcggcagattgacaagctgcgggcagagctgcggcggctgcagcgccggcgcaccgagcttgagcggcagctggaggagctagagcgcgagcggcaggcccgcagggaggccgagcgcgaggtacagcggttgcagcagcggctggcagcgctggagcaggaagaagctgaggcccgtgagaaggtaacccatacgcagaaggtggtgctgcagcaggacccgcagcaggcgcgagagcatgccctgctccgactccagctggaagaagagcagcaccggcggcagctcctggagggggagctcgagaccctccggaggaaactggctgcactggagaaggcggaggtcaaggagaaggtggtgctctccgagagtgtccaggtggagaagggcgacaccgagcaagagatccagaggctcaagagcagcctggaggaggagagccgcagcaagcgcgagctggacgtcgaggtgagccggctggaagccaggctttcggagctggaattccataactccaagtcatccaagaactagactttctgagggaagagaaccacaaattacagctggagagggaaaacctgcagctggagacccgaaggctccaatcggaaatcaacatggcagcgacggaaacacgagacctgcggaacatgaccgtggcggactctgggaccaaccatgactccagactgtggtccctggagagggaactggatgacctcaagaggctctccaaggacaaagacctcgagatcgacgagctgcagaagcgcctgggctccgtggccgtcaagcgggagcagcgggagaaccacctgcggcgctccatcgtagtcatccaccctgacacaggccgcgagctgtccccggaggaagcccaccgtgccgggctcattgactggaacatgttcgtgaaactcagaagccaggagtgcgactgggaggagatctcagtgaagggtcccaatggggagtcctcagtgatacacgacaggaagtctggcaagaagttctccatcgaagaggccctgcagagtggcaggctgacccctgctcagtatgaccgctatgtcaacaaggatatgtccatccaggagctggcggtcttggtatctgggcagaagtaggcacagctcttgcaactcttcgtaacggcagacgctggccctctcctacgacgcagtgacctccttggtgtcgtcctctccctagccctggtgcaggccaagcattttatacataccctcgctgccaggctgctcagagtcccgcccacatatgagacaggcactggctgaagacaggcaactctcgtcccaaccatcattcaccctgagtgacgtacttcatcctccaatgactggacaactgcgatgccttttcctcccttttcctgtacactcccagcaacaaactcctcatgataactgcacacaatctgaaaaccactg

SEQ ID NO: 186165 - DNA, 862 bp, Homo Sapiens
taaaagagcaactttgtacaaaaaagttggcttaaaagcgtttctttacctactcattttccctcaggcctttccatttttatcttgtatttttccactcttttggcagacctgcatgggcaaggacgtaacccttcacgtctcagcaagcaaccccgctatgctactgtaccagaagtttggattcaagactgaagaatatgtattagatttctatgataaatattacccattggagagtacagagtgtaaacacgcattctttctgaggctccggcgctgatgcgaatacagctcacagagaaacgcatgtgctattggagaacaggtctttgtggagatctaaaggcagtgattgatttcacagggagctctaatctctgtgattacatggtccttcaaactcccaaccaaagtgagaaaagcggcatgcagtgaaatgagcagtgagcagccctttagcaaaatcgccctccagtccttcctggagatgccttcagccagcatcccagactccacagttatttatgaacgatgtcgtgattctccctccacctgacagtttgtaagagtgaaagagcatctaacctgatgctcttggagagagataacctgtctgtcataacttaaaggatgagaaaatgtggtgtagctattaaagattcatgcagtcccaaaaggcactgtcctggggatgatgagagattataaagtgatttcataaaaggaatccaaccctgtgcccggccattgatgtgttgtcattgaatccagaaggatttctagggcactgaagttttgttggttccttttgctgactttggttacagtcagaaaaaaataaactagatgatttgtgtct

SEQ ID NO: 186166 - DNA, 1042 bp, Homo Sapiens
tgtcaaaaaagttgggaattggttataagaactctcagaacaacactgagaagaagttagatctccttgtcatggaaaatcttttctacgggagaaagttggcacaggtttttgatttgaagggctctcttaggaatcggaatgtaaaaactgacactggaaaagagagttgtgatgtggtcctgctagatgaaaatctcctaaagatggttcgagacaaccctctatatattcgttctcattccaaagctgtgctgagaacctcgatccatagtgactcccatttcctttctagccacctcattatagattattctttgctggttgggcgagatgatactagcaatgagctagtagttggaattatagattatattcgaacatttacatgggacaaaaagcttgagatggttgtgaaatcaacaggaattttaggtggacaaggtaaaatgccaacagtggtgtctccggagttgtacaggactaggttttgtgaggcaatggacaagtatttcctaatggtaccagaccactggacaggcttgggtctgaattgctgaaatcaagcacatattttgaaatggactgtgaaggaaaaggggacaggaacaaaggaccaaaaataagctacatgttttatttcttcatcgtgttcaccactgtatgccaaggcttttcagttctgtgtctgtttagactgtccgtaatggaatggtaaaactccatgaatttgcactttggtttttgatacctgtggagctgtctgtacgttgggaagtggcatgaaaattttcttaagctaaaatacagacatgtttcaaagggctaaagttggagatgagtagatagggtgaaaaatgggttaaatttgctagcttaattgttttaagaagaaaacagtgtctcataaattgactatcctggcatcacatttaacatgttatctacttagaaagcatttgtagagctgctgaatttgttttgtgtttttctgtaaaatttaatgttacttattatcagaatttctgaaacctttacaaaa

SEQ ID NO: 186167 - DNA, 2501 bp, Homo Sapiens
  misc_feature (1942)..(2050): n is a, c, g, or t
  misc_feature (2252)..(2266): n is a, c, g, or t
actttgtacaaaaaagttggggcagtcatgtaggggaggatattttgattgaacacaggcttgacagaatcttcttttcttcttagaaatcctagaaaacagaaagcaacaggaagatgtcttattgggaactacccccatcaacttcaccatgagtcaaacaaggaagaaaacttcctcagaaggagaaactaagccccagacttcaactgtcaacaaatttctcaggggctccaatgctgaaagcagaaaagaggacaatgaccttaaaacaagtgattcccaacccagcgactggatacagaagacagccacctcagagactgctaagcctctcagttcagaaatggaatggagatccagtatggagaaaaatgagcatttcctgcagaagctgggcaaaaaggctgtcaacaagtgtctagatttgaataactgtggattaacaacagcggacatgaaagaaatggttgccttgctgccttttctcccagacttggaagaactggatatctcctggaatggttttgtaggtggaaccctcctttccatcactcagcaaatgcatctggtcagcaagttaaaaatcttgaggctgggtagctgcagactcaccactgacgatgttcaagcactgggagaagcatttgagatgattcctgaacttgaagagctaaatttgtcttggaacagtaaagtgggaggaaatttgcctctgatccttcagaagttccaaaaagggagcaagatacaaatgattgagcttgtggattgctccctcacgtcagaagatgggacatttctgggtcaactgctacctatgctgcaaagtctcgaagtacttgatctttccattaacagagacattgttggcagtctgaacagtattgctcagggattaaaaagcacctcaaatctgaaagtactgaagttacattcatgtggattatcacaaaagagtgtcaaaatattggatgctgcttttaggtatttgggtgagctgaggaaattagatctttcctgcaataaggatctaggtggaggttttgaagactcgccggctcagttggtcatgctaaagcatctacaagtcctagatcttcaccagtgctcactaacagcagatgacgtgatgtcactgacccaggtcattcctttactttcaaatcttcaagaattggatttatcagccaacaaaaagatgggcagttcttctgaaaacttactcagcaggctccgatttttaccagcattgaagtcattagttatcaacaactgtgctttggagagtgagacttttacagctcttgctgaagcctctgttcacctctctgctctggaagtattcaacctttcttggaacaagtgtgttggtggcaacttgaagctgcttctggaaacactaaagctttccatgtctcttcaagtgctgaggctgagcagctgttccctggtgacagaggatgtggctctcctggcatcggtcatacagacgggtcatctggccaaactgcaaaagctggacctgagctacaatgacagcatctgtgatgcggggtggaccatgttctgccaaaacgtgcggttcctcaaagagctaatcgagctggatattagccttcgaccatcaaattttcgagattgtggacaatggtttagacacttgttatatgctgtgaccaagcttcctcagatcactgagataggaatgaaaagatggattctcccagcttcacaggaggaagaactagaatgctttgaccaagataaaaaaagaagcattcactttgaccatggtgggtttcagtaaactgatttcccatgtcctactaagctacaaaccattctccaaaggaaaagaacatgaacgaattccagagtcatgaactgaatttcaacttctgggccatttaatgggacttatattacaagagctttgtannnnnnnnnnnnnnnnnnnnnnnnnnnnnnnnnnnnnnnnnnnnnnnnnnnnnnnnnnnnnnnnnnnnnnnnnnnnnnnnnnnnnnnnnnnnnnnnnnnnnnnnnnnnngagcatgccattattctctgtctatgaaacaaaaatggcatttttcaatggatttgttttggatatataattagttcatttgctgtttagaagccttgccaaaagtgtttagattttggtactgcaactgctttcctcttgcccagaaatgttttgcctcttcttttcctacaagttaaatgttctaaatataaaggggtannnnnnnnnnnnnnnaattctaatgtgaaaggcactagctgtctaatagtttcatgtatcattactattactatatgtatcttaatgtagtctatgtagggtttttatcagaaagtgtacctttctatggtttattattttatattctggtgccttttatctcagatataaaccatgaacagtaatgatagtcactgacatataaatcttagtaaaaagtgattaaaaatctaaaactcagtatgaaaaa

SEQ ID NO: 186168 - DNA, 889 bp, Homo Sapiens
  misc_feature (185)..(199): n is a, c, g, or t
ttggctatgaaacaaaaatggcatttttcaatggatttgttttggatatataattagttcatttgctgtttagaagccttgccaaaagtgtttagattttggtactgcaactgctttcctcttgcccagaaatgttttgcctcttcttttcctacaagttaaatgttctaaatataaaggggtannnnnnnnnnnnnnnaattctaatgtgaaaggcactagctgtctaatagtttcatgtatcattactattactatatgtatcttaatgtagtctatgtaggtttttatcagaaagtgtacctttctatggtttattattttatattctggtgccttttatctcagatataaaccatgaacagtaatgatagtcactgacatataaatcttagtaaaaagtgattaaaaatctaaaactcagtatgaaaaacatatcttgttagaataaattaaaaccttttattgtttaaaaaattgttaacatattgcctccaggcatttctttgaaatggaatttgcttcataaaactaatttaattcgttaatgacagttttgtgttgctctaaactatttttgaaatttttgattttcttttgctagagcatgaaagtcattgcatggcagagatgtttgtctgcacatttctattctgacaagctctagtcaaattatgttttgctttcttctactacactaataattagtattgcaatcactgcctgaaagacatgcaaatgtaaaatcaacactactccaaattaaaaggttttcaggatgaggaggttttgaatgatgtaaaggggatattttgggttacatgatataaaagaataccatgaatatcatgagcattcccatgcattccatgagtatctatgcatatgc

SEQ ID NO: 186169 - DNA, 1940 bp, Homo Sapiens
  misc_feature (255)..(275): n is a, c, g, or t
  misc_feature (423)..(465): n is a, c, g, or t
  misc_feature (553)..(566): n is a, c, g, or t
  misc_feature (1687)..(1695): n is a, c, g, or t
ttggtctttggcatcccgatggcactcatctggggcatttacttcgccattctctctttcctgcacatctgggcagttgtaccatgcattaagagcttcctgattgagattcagtgcatcagccgtgtctattccatctacgtccacaccgtctgtgacccactctttgaagctgttgggaaaatattcagcaatgtccgcatcaacttgcagaaagaaatataaatgacatttcaaggatagaagtatacctgnnnnnnnnnnnnnnnnnnnnncctggtgccaatttcaagttccaagttgctaatacagcaacaatttatgaattgaattatcttggttgaaaataaaaagatcactttctcagttttcataagtattatgtctcttctgagctatttcatctatttttggcagtctgannnnnnnnnnnnnnnnnnnnnnnnnnnnnnnnnnnnnnnnnnngcatgtggatcaaccatcgctttattggctgagatatgaacatattgttgaaaggtaatttgagagaaatatgaagaactgaggaggnnnnnnnnnnnnnngaaaagaaccaacaacctcaactgcctactccaaaatgttggtcattttatgttaagggaagaattccagggtatggccatggagtgtacaagtatgtgggcagattttcagcaaactcttttcccactgtttaaggagttagtggattactgccattcacttcataatccagtaggatccagtgatccttacaagttagaaaacataatcttctgccttctcatgatccaactaatgccttactcttcttgaaattttaacctatgatattttctgtgcctgaatatttgttatgtagataacaagacctcagtgccttcctgtttttcacattttccttttcaaatagggtctaactcagcaactcgctttaggtcagcagcctccctgaagaccaaaattagaatatccatgacctagttttccatgcgtgtttctgactctgagctacagagtctggtgaagctcacttctgggcttcatctggcaacatctttatccgtagtgggtatggttgacactagcccaatgaaatgaattaaagtggaccaatagggctgagctctctgtgggctggcagtcctggaagccagctttccctgcctctcatcaactgaatgaggtcagcatgtctattcagcttcgtttattttcaagaataatcacgctttcctgaatccaaactaatccatcaccggggtggtttagtggctcaacattgtgttcccatttcagctgatcagtgggcctccaaggaggggctgtaaaatggaggccattgtgtgagcctatcagagttgctgcaaacctgacccctgctcagtaaagcacttgcaaccgtctgttatgctgtgacacatggcccctccccctgccaggagctttggacctaatccaagcatctctttgcccagaaagaagatgggggaggaggcagtaataaaaagattgaagtattttgctggaataagttcaaattcttctgaactcaaactgaggaatttcacctgtaaacctgagtcgtacagaaagctgcctggtatatccaaaagctttttattcctcctgctcatattgtgattctgcctttggggacttttcttaaaccttcagttatgannnnnnnnncatacacttattggaactctgcttgatttttgcctcttccagtcttcctgacactttaattaccaacctgttacctactttgactttttgcatttaaaacagacactggcatggatatagttttacttttaaactgtgtacataactgaaaatgtgctatactgcatactttttaaatgtaaagatatttttatctttatatgaagaaaatcacttagaaatggctttgtgattcaatctgtaaa

SEQ ID NO: 186170 - DNA, 706 bp, Homo Sapiens
  misc_feature (190)..(216): n is a, c, g, or t
ttggctttggatttgtttttagttatgagccgcattctttacttgatagaactcagatttgtcttagcctattgccatatagtactcaccttataactatgtaactttctcgtaatgtatctgtttgtgcaatatggaagctgtgagtggattcatagctttttggtttaattgtacattattgtgtgtnnnnnnnnnnnnnnnnnnnnnnnnnnnaggaccaaaattcttagctcgcttacactgttgctagtgtaaacattgttacacttaattttacagggcacaaattatggaattacttcataaattcatggtaatgttttcataaattattgcattaacatacaattgccatttaattatgaagtccatcagtattgacagaagacgttacagtgaagtgctaaaaccacactatatggtaattatattttgggttatgtagtaaatcaaatatgcatgtcattgtgacactttatgtgttaaaacatggtagataatcacattttctgggccctgtaaaatagtgttactgtaatactctgttttgcctcctgccttgtttacattaaacaggatatttggtaaatttttttgtattgaaagttgtgtaggttactgacagtgttaccagcgtctggaattcttggtccctccgtggagaaactcttcagatggtcattgtgtacctactctctcttca

SEQ ID NO: 186171 - DNA, 1768 bp, Homo Sapiens
tcgcgccgggtcccgcttccgctgctgctgctcggcggccttgcgctgctggcggccggagtggacgcggatgtcctcctggaggcctgctgtgcggacggacaccggatggccactcatcagaaggactgctcgctgccatatgctacggaatccaaagaatgcaggatggtgcaggagcagtgctgccacagccagctggaggagctgcactgtgccacgggcatcagcctggccaacgagcaggaccgctgtgccacgccccacggtgacaacgccagcctggaggccacatttgtgaagaggtgctgccattgctgtctgctggggagggcggcccaggcccagggccagagctgcgagtacagcctcatggttggctaccagtgtggacaggtcttccgggcatgctgtgtcaagagccaggagaccggagatttggatgtcgggggcctccaagaaacggataagatcattgaggttgaggaggaacaagaggacccatatctgaatgaccgctgccgaggaggcgggccctgcaagcagcagtgccgagacacgggtgacgaggtggtctgctcctgcttcgtgggctaccagctgctgtctgatggtgtctcctgtgaagatgtcaatgaatgcatcacgggcagccacagctgccggcttggagaatcctgcatcaacacagtgggctctttccgctgccagcgggacagcagctgcgggactggctatgagctcacagaggacaatagctgcaaagatattgacgagtgtgagagtggtattcataactgcctccccgattttatctgtcagaatactctgggatccttccgctgccgacccaagctacagtgcaagagtggctttatacaagatgctctaggcaactgtattgatatcaatgagtgtttgagtatcagtgccccgtgccctatcgggcatacatgcatcaacacagagggctcctacacgtgccagaagaacgtgcccaactgtggccgtggctaccatctcaacgaggagggaacgcgctgtgttgatgtggacgagtgcgcgccacctgctgagccctgtgggaagggacatcgctgcgtgaactctcccggcagtttccgctgcgaatgcaagacgggttactattttgacggcatcagcaggatgtgtgtcgatgtcaacgagtgccagcgctaccccgggcgcctgtgtggccacaagtgcgagaacacgctgggctcctacctctgcagctgttccgtgggcttccggctctctgtggatggcaggtcatgtgaagacatcaatgagtgcagcagcagcccctgtagccaggagtgtgccaacgtctacggctcctaccagtgttactgccggcgaggctaccagctcagcgatgtggatggagtcacctgtgaagacatcgacgagtgcgccctgcccaccgggggccacatctgctcctaccgctgcatcaacatccctggaagcttccagtgcagctgcccctcgtctggctacaggctggcccccaatggccgcaactgccaagacattgatgagtgtgtgactggcatccacaactgctccatcaacgagacctgcttcaacatccagggcggcttccgctgcctggccttcgagtgccctgagaactaccgccgctccgcagccacccgctgtgagcgcttgccttgccatgaaaatcgggagtgctcaaagctgcctctgagaataaacctactaccacctcctctttcccacc

SEQ ID NO: 186172 - DNA, 1732 bp, Homo Sapiens
  misc_feature (1580)..(1592): n is a, c, g, or t
ttggatatcaatgagtgtttgagtatcagtgccccgtgccctattgggcatacatgcatcaacacagagggctcctacacgtgccagaagaacgtgcccaactgtggccgtggctaccatctcaacgaggagggaacgcgctgtgttgatgtggacgagtgcgcgccacctgctgagccctgtgggaagggacatcgctgcgtgaactctcccggcagtttccgctgcgaatgcaagacgggttactattttgacggcatcagcaggatgtgtgtcgatgtcaacgagtgccagcgctaccccgggcgcctgtgtggccacaagtgcgagaacacgctgggctcctacctctgcagctgttccgtgggcttccggctctctgtggatggcaggtcatgtgaagacatcaatgagtgcagcagcagcccctgtagccaggagtgtgccaacgtctacggctcctaccagtgttactgccggcgaggctaccagctcagcgatgtggatggagtcacctgtgaagacatcgacgagtgcgccctgcccaccgggggccacatctgctcctaccgctgcatcaacatccctggaagcttccagtgcagctgcccctcgtctggctacaggctggcccccaatggccgcaactgccaagacattgatgagtgtgtgactggcatccacaactgctccatcaacgagacctgcttcaacatccagggcggcttccgctgcctggccttcgagtgccctgagaactaccgccgctccgcagccacgctccagcaggagaagacagacacggtccgctgcatcaagtcctgccgccccaacgatgtcacatgcgtgttcgaccccgtgcacaccatctcccacaccgtcatctcgctgcctaccttccgcgagttcacccgccctgaagagatcatcttcctccgggccatcacgccaccgcatcctgccagccaggctaacatcatcttcgacatcacggaagggaacctgcgggactcttttgacatcatcaagcgttacatggacggcatgaccgtgggtgtcgtgcgccaggtgcggcccatcgtgggcccatttcatgccgtcctgaagctggagatgaactatgtggtcgggggcgtggtctcccaccgaaatgttgtcaacgtccacatcttcgtctctgagtactggttctgagggctggtctgccgcacagccgcaggtgcacctccaggccaaatcattgctgccagtgactgtggtctgtacttgtttataccctcagacttttttaatgttaggtatttgtagcattaggccaacatgtattaagctgagccagatgaataagtccatctgatgtattttcggtgtttaaaaaatgagcccagttgctcaactgtttggttgaaaaccttgctcattttttaatgcgaaggctaagtgtcaccccctttctctgcctctggctgggccttgctaagggccaaggaaagaaagacattttttagggggcagccagtccaaatgccaaaagaagacagttcttgccctgattgtatgaaatttgacattttggcacnnnnnnnnnnnnnggccaatcagattttctatgttctaaggacatggctgctgtagaatagcacagacgtggatgataaattatccccagaagcagcatgacagatgcctcgggagcacatgggaggggaaattgcagttctgttgaaataga

SEQ ID NO: 186173 - DNA, 1489 bp, Homo Sapiens
  misc_feature (139)..(200): n is a, c, g, or t
tacaaaaaagttggcagccatggccagtgaaggctgctgtgtgaagttgagaaaatcagcggtcctactggatgaagagaagatggacaccagccctcagcatgaggaaattcagggtcccctaccagatgagagagannnnnnnnnnnnnnnnnnnnnnnnnnnnnnnnnnnnnnnnnnnnnnnnnnnnnnnnnnnnnntttagtgaatctgctctcccagctcacacactcccctgcctcccatggcttacacactaggatccagactccatggtttgacaccagcctgcgtttgcagcttctctgtcacttccatgactctatcctcataccaccactgctgcttcccacccagctgagaatgccccctcctccctgactcctctctgcccatgcaaattagctcacatctttcctcctgctgcaatccatcccttcctcccattggcctctccttgccaaatctaaatactttatatagggatggcagagagttcccatctcatctgtcagccacagtcatttggtactggctacctggagccttatcttctgaagggttttaaagaatggccaattagctgagaagaattatctaatcaattagtgatgtctgccatggatgcagtagaggaaagtggtggtacaagtgccatgattgattagcaatgtctgcactggatacggaaaaaagaaggtgcttgcaggtttacagtgtatatgtgggctattgaagagccctctgagctcggttgctagcaggagagcatgcccatattggcttactttgtctgccacagacacagacagagggagttgggacatgcatgctatggggaccctcttgttggacacctaattggatgcctcttcatgagaggcctccttttcttcaccttttatgctgcactcctcccctagtttacacatcttgatgctgtggctcagtttgccttcctgaatttttattgggtccctgttttctctcctaacatgctgagattctgcatccccacagcctaaactgagccagtggccaaacaaccgtgctcagcctgtttctctctgccctctagagcaaggcccaccaggtccatccaggaggctctcctgacctcaagtccaacaacagtgtccacactagtcaaggttcagcccagaaaacagaaagcactctaggaatcttaggcagaaagggattttatctaaatcactggaaaggctggaggagcagaagcagaggccaccactggactattggtttcaatattagaccactgtagccgaatcagagccagagagcagccactgctactgctaatgccaccactacccctgccatcactgccccacatggacaaaactggagtcgagacctaggttagattcctgcaaccacaaacatccatcacggatggccagctgccagagctgcgggaagacggatcccacctccctttcttagcagaatctaaattacagccaga

SEQ ID NO: 186174 - DNA, 1043 bp, Homo Sapiens
ttgggaaagatgctggtttcgagttttggagatccttgttttttatggaacacagttctgtaaaattttcataagattccttggcaataacatacgcttgtgatggaccctagaaatactgctatgttaggattggggttctgattccgaaggtttttcaagaaagagtccttctgccatcagtactggcacattggtcagtaagagagaagtagagctagaaaaaaacacaaaggaggaagaggaccttcgcaaacggaatcgagaaagaaacatcgaagctgggaaagatgatggtttgactgatgcacagcaacagttttcagtgaaagaaacaaacttttcagagggaaatttaaaattgaaaattggcctccaggctaagagaactaaaaaacctccaaagaacttggagaactatgtatgtcgacctgccataaaaacaactattaagcacccaaggaaagcacttaaaagtggaaagatgacggatgaaaagaatgaacactgtccttcaaaacgagacccttcaaagttgtacaagaaagcagatgatgttgcagccattgaatgccagtctgaagaagtcatccgtcttcattcacagggagaaaacaatcctttgtctaagaagctgtctccagtacactcagaaatggcagattatattaatgcaacgccatctactcttcttggtagccgggatcctgatttaaaggacagagcattacttaatggaggaactagtgtaacagaaaagttggcacagctgattgctacctgtcctccttccaagtcttccaagacaaaaccgaagaagttaggaactggcactacagcagattggttagcaaggatttgatcagaaagcacgtgttggctctgtagctggaataatacataagacttaataaaaaagccaaccatcagcacagcagttggattggtaactaaagatcctgggaaaaagccagtgtttaatgcagcagtagattggtcaataagactctgtgaaaaaactgggaactggcactacagcggta

SEQ ID NO: 186175 - DNA, 1639 bp, Homo Sapiens
gccaactttgtacaaaaaagttgggaagtctgctctgacagttcagtttgttcagggaatttttgttgaaaaatatgacccaacgatagaagattcctacagaaagcaagttgaagtcgattgccaacagtgtatgctcgaaatcctggatactgcagggacagagcaatttacagcaatgagggatttgtatatgaagaacggccaaggttttgcactagtatattctattacagctcagtccacgtttaacgacttacaggacctgagggaacagattttacgggttaaggacacggaagatgttccaatgattttggttggcaataaatgtgacctggaagatgagcgagtagttggcaaagagcagggccagaatttagcaagacagtggtgtaactgtgcctttttagaatcttctgcaaagtcaaagatcaatgttaatgagatattttatgacctggtcagacagataaataggaaaacaccagtggaaaagaagaagcctaaaaagaaatcatgtctgctgctctaggcccatagtcagcagcagctctgagccagattacaggaatgaagaactgttgcctaattggaaagtgccagcattccagacttcaaaaataaaaaatctgaagaggcttctcctgttttatatattatgtgaagaatttagatcttatattggtttgcacaagttccctggagaaaaaaattgctctgtgtatatctcttggaaaataagacaatagtatttctcctttgcaatagcagttataacagatgtgaaaatatacttgactctaatatgattatacaaaagagcatggatgcatttcaaatgttagatattgctactataatcaaatgatttcatattgatctttttatcatgatcctccctatcaagcactaaaaagttgaaccattatactttatatctgtaatgatactgattatgaaatgtcccctcaaactcattgcagcagataacttttttgagtcattgacttcattttatatttaaaaaattatggaatatcatctgtcattatattctaattaaaattgtgcataatgctttggaaaaatgggtcttttataggaaaaaaactgggataactgatttctatggctttcaaagctaaaatatataatatactaaaccaactctaatattgcttcttgtgttttactgtcagattaaattacagcttttatggatgattaaattttagtacattttcatttggtttgtgtgtttttgttattgtttatagattaaagcgtttattttataatgaccacattgttttaaatgcgacagtagctcctttctgcctagtatctgcagaacactggctttaaactatactaagtaactggtgatttctctaggaacagacctcgcactttctgttctaaatatatttattcctactatacagtaaaatacatcagacaacatagaatagttttgtatattctctcttgatcttaaagattgtatcttattgaatatcccactgtatattatttttatatgtaaaaagataagtttaatactgtatcacggtttaacttttactatttcagatcttccacagcttgtaatttcatcaagggaatccttttgcat

SEQ ID NO: 186176 - DNA, 1858 bp, Homo Sapiens
tacatcagttaaaagtcaacatgtgttgctaagtgatccttttgaaaggatcccttttaaaagttcctaggcatcagcttcactgacaaatctggtatgattctgaagccagcattcaactcttggaaagatatacaatagtcacagcttgaattagtaactaataaaataaaatgccctcttattctccaaaatgtaataattcaggagtaatgacatcaagatttttctcctcaaactgaggagaaaaaagccccaccgtggcttgtttaaatgacttaaaatacaagtggtaactatggtgactagggaaccaatgtttaaaacatcaaaagattattacaaaaatccaatttcccatgaatttctaaaaattaaaattctgagatgttgtgtctgagaaactgcttcttcagcaaaatatttagcacagactacatcatcccaaatctatggtatggccaggtatttaggtccttcaaccaacgtttttagaaagggtcccgttgctctttacttgcaaaatgactatctctagggcctcaaaattcaagagacaacctagcttttataatgttaaaaagggaagactttggcatgtaaactagaactacatgattgtgaatatttggcaaattgatctctatgtgtatatacaagctatagctaacatgattattacaagttttttggaagcttgaaggccaaggaaaataatctgcacatataactttctgatttatcaagtactgagatattaatgaattcttcatattgttactcctgtatcagttctttagaatttcttagcctttgggtactctaagccttggatggaaccatttagggagtagctagatatatgcaaagaatattaggatttagaaacatttctggtttatcaaagtgaaaagataaatattacaaacactgaaaatgtgaaaataaggttcaagagagctgcaaactatgtgggtaccagttagaaagtatcttcatctgactcatcactcttgggtttggtaagtctttctagttcttctccatccccactggaacgctcccaaagattgccacttagatctcggatcctttcttgcctaggtgcgtattccggaacttgaggcttgctggcattataaataaatatagagagaaggactgatggggcttccaagaaaaattccagggagggcctgaagtcaaagaccaggacagacactgttgtgataatgacagtggtaacctgggccatcaagacatggaacatgttatccaggaacttcagaatgaaagccactgaaaggccctggaatgcagttacaaaaataagggctactgaaaatgcactgtggccataaaaaaatccacagttcttaatctgatcacggttactcctctgaaggcccagagtcagcccattaaacagaatgccaaagaaatagagtttgctgttctgtatgaagatgctttcagtgagctggttcccttccttcagtatcttttcattatagatattagccattgaagaaataaaacactggactataataagaacatggcccatgccaagacggatgtgactgaaaactctggctgtggtgttccatttagcttcaggaaaagtccattcctttgctgtacaattgtcttttctgggacactcacttctgaaaagaaggcaggaattggaagggctgaaaaaggcatcgtgatgaaatccacgtcctgccaagttgtgctgtaaagttttagtcccggcagtcaaggccacaatagacaaaaataaagtcaggagggaagcccactggatccagtttagacgcctcttcagccaacttttttgtacaaagttggc

SEQ ID NO: 186177 - DNA, 1288 bp, Homo Sapiens
ccaggaatcaaacgaacctcgaaagtggaacagggaggccgcctcccatggctgcctggatggcaggcacagtgggagagtaatgctctgaacctcccaatgtgatgaagccgaaagccgaggcggggccagcaggcctcccgggcacagagccacagagcccagcgtcacacgcaccgtgcacgcaagacagacgtgcacgagactgacgcacacacggccggaggtgcatgtcacagtcgactagacgggccgtggctccctgaggctggctgtggtgtggctagggcacagcccacacttcctgatccttcagctgatccccagatccccacaaacaaggagcaaaaagcacagaatcaaatgacgacacgttccacagggccaggtgggctttctgcggagggcgtggcggtggtggcagcggttctgggagagggaaaccccagcgccacttgtctatgggccgggacggcgtgcatctcactttgccggctctgcgctcttccttctcttctccctcccaaaggctgcggctttgcatgggcagcttgctggcgccactgggcgcgtcccgcagactttaaatggaatgagtggaggtctcggactgctgccggatgtagttctggaagctcttgtctccgatggggtgctcctggcttccatatttcgtcttcttgaacttgtccctcttatactgggcgtgctcctgctccaaagccccaaccccagcgatgacttgctttagcgtcttgtaggtctcctgggggtcgtcaatgacgaacgtcgaatactcctcctgctccgggccgtcatacacagatttgctcccacaggcctcctgcatcttctccagcttgctcatgtacaagttgaagagggagtagatacgctccgtctcacggtccccatcaatgtccagctggatgttggctgggaggccgccagtgcagggcgagcagcccggagccgagtcggatggcgccctacagcacagccagtggccgctcaggtaggcggacgggtggtagacggtgaggcgcttctggttgcactggctcactttggtgagaatgtcgatccagtccttggcctccacgcagttgttggcctggatgtacagcgcacgctctggctggatgacctggaacatgtttttcattttgaaagactcctcctccagcttctccactgccaggatgttctcgatgggaatgctgtagagaggctggtcccctttgcttttgtggtaggtaaattcatggttggtcaagcgaaaccccaa

SEQ ID NO: 186178 - DNA, 955 bp, Homo Sapiens
ttggctttaaatatggtctttcttgggcgcgcgcgacaatgtgaggagtggggtggagcgtgtgtggtgtgtggctgcggcctgggcaagagccgccgcggaccatgagctgagtaagttctggagggatcctgcctcttggagccttcgcagccaggcatctgtgaactgtgagctagagtgaagcagaaatctaggaagatgagctccaagatggtcataagtgaaccaggactgaattgggatatttcccccaaaaatggccttaagacatttttctctcgagaaaattataaagatcattccatggctccaagtttaaaagaactacgtgttttatccaacagacgtataggagaaaatttgaatgcctcagcaagttctgtagaaaatgagccggcagttagttcagcaactcaagcaaaggaaaaagttaaaaccacaattggaatggttcttcttccaaaaccaagagttccttatcctcgtttctctcgtttctcacagagagagcagaggagttatgtggacttgttggttaaatacgcaaagattcctgcaaattccaaagctgttggaataaataaaaatgactacttgcagtacttggatatgaaaaaacatgtgaacgaagaagttactgagttcctaaagtttttgcagaattctgcaaagaaatgtgcgcaggattataatatgctttctgatgatgcccgtctcttcacagagaaaattttaagagcttgcattgaacaagtgaaaaagtattcagaattctatactctccacgaggtcaccagcttaatgggattcttcccattcagagtagagatgggattaaagttagaaaaaactcttctcgcattgggcagtgtaaaatatgtgaaaacagtatttccctcaatgcctataaagttgcagctgtcaaggacgatatagctaccattgaaacgtc

SEQ ID NO: 186179 - DNA, 1759 bp, Homo Sapiens
  misc_feature (115)..(126): n is a, c, g, or t
  misc_feature (479)..(501): n is a, c, g, or t
  misc_feature (1023)..(1033): n is a, c, g, or t
ttggagtgagacgatgagaaaagtcccaggctaatggcagaaatttgcactttgaacatgtgtgtttttgtgttgtggaacctgagattccttatttattaacaggaagtctgannnnnnnnnnnnggagtctttgttgctatattttgtggggctgggagagagagattagattattttgacatgggatcccttccataacaggtactttgaaggcaagacatagggttgaagaagcacagccagcctctgaaatcatagctctccagtggcttttaaagaaagctggtcctcagcactaacaaaatcactacaatagcctagtgcttttttggaagcctttttagggaagaatgttaggttcatggtaactagtatgctctttgagatttttacagtgttgaaacttaagaattttgagagggtgaggagggttgttcagaatctaaattacagatagatgattgtttcttgtgaannnnnnnnnnnnnnnnnnnnnnngtccctaccatttccttacatttcccttggggcccatctctggctccttgctttttgtttcttgctttgctttatcagttcattccagctccctgttagtgaaggacactgctgttagtgaaggaacaaagtctatgagtcctaaaattttaagtcaaagaaaactgctctgtttcccctttagtaacacttctgaagaggaaaaacttcaatagccaaagttaataatcctatataataatctgctttggctttcacctaaaattctgggcatcacaatttccttgggatagaggttgtgttggggaatagattgcttattgctgttcactggagagaaaaggtagtgtttttgtacaaggtcataccgccagaagccccaaatcctattttggctcatcttcaggtaaagagtaattcctatcctgtgtgcctcagaagctagaatcgaaggcttaccctattcattgtttattgtcagaaatgcatgatggctcttggaaagaatgacgttttgctggnnnnnnnnnnngaacatgttgtgtttcacaaacatggcttatcaattttttcaaagaattcttttttcccaaaaagaggagtaacaaaatgtcatttctgaaagaggcttactttataccaactagtgtcagcatttgggatgccagggaacagagagtgagacacctgcaatcaccagtctcaaatgcgctattgtttcttttcagagtgttgcagatttgccatttctccataatatggggatagaaaatggaataaagatagaagggatgtagaatatgctttcctgccaacatggtttggagtcgactttggtatattgactagatttgaaaatacaagattgattagatgaatctacaaaaaagttgtcctcctctcaggtcccttttacactttttgactaactagcatctatattccacacttagcttttttgtcacacttatcctttgtctccgtaaatttcatttgcagtggttagtcatcagatattttagccacctacacaaaagcaaactgcatttttaaaaatctttctgagatgggagaaaatgtattctcctttcctataccgctctccccacaaaaaacaactagttagttctactaaataagaaacttgctgtactttttcttttcttttaagggtcaaaggaccctctttatagctaccatttgcctacataaattattgcagcagtttgccatactaaatattttttataagacttta

SEQ ID NO: 186180 - DNA, 1367 bp, Homo Sapiens
  misc_feature (80)..(91): n is a, c, g, or t
actttgtacaaaaaagttggattcattgtttcttgtcagaaatgcatgatggctcttggaaagaatgacgttttgctggnnnnnnnnnnnngaacagtttgtgtttcacaaacatggcttatcaattttttcaaagaattcttttttcccaaaaagaggagtaacaaaatgtcatttctgaaagaggcttactttataccaactagtgtcagcatttgggatgccagggaacagagagtgagacacctacaatcaccagtctcaaatgcgctattgtttcttttcagagtgttgcagatttgccatttctccataatatggggatagaaaatggaataaagatagaagggatgtagaatatgctttcctgccaacatggtttgggtcgactttggtatattgactagatttgaaaatacaagattgattagatgaatctacaaaaaagttgtcctcctctcaggtcccttttacactttttgactaactagcatctatattccacacttagcttttttgtcacacttatcctttgtctccgtaaatttcatttgcagtggttagtcatcagatattttagccacctacacaaaagcaaactgcatttttaaaaatctttctgagatgggagaaaatgtattctcctttcctataccgctctcccaacaaaaaaacaactagttagttctactaattagaaacttgctgtactttttcttttcttttaggggtcaaggaccctctttatagctaccatttgcctacaataaattattgcagcagtttgcaatactaaaatattttttatagactttatatttttccttttgataaagggatgctgcatagtagagttggtgtaattaaactatctcagccgtttccctgctttcccttctgctccatatgcctcattgtccttccagggagctcttttaatcttaaagttctacatttcatgctcttagtcaaattctgttacctttttaataactcttcccactgcatatttccatcttgaattggtggttctaaattctgaaactgtagttgagatacagctatttaatatttctgggagatgtgcatccctcttctttgtggttgcccaaggttgttttgcgtaactgagactccttgatatgcttcagagaatttaggcaaacactggccatggccgtgggagtactgggagtaaaataaaaatatcgaggtatagactagcatccacatagagcacttgaacctcctttgtacctgtttggggaaaaagtataatgagtgtactaccaatctaactaaaaattattatagtctggttgtttgaaataccattttttccccttttgtggtttcccactttccca

SEQ ID NO: 186181 - DNA, 1495 bp, Homo Sapiens
  misc_feature (57)..(68): n is a, c, g, or t
  misc_feature (1312)..(1343): n is a, c, g, or t
ttgggtttattgtcagaaatgcatgatggctcttggaaagaatgacgttttgctggnnnnnnnnnnnngaacagtttgtgtttcacaaacatggcttatcaattttttcaaagaattcttttttcccaaaaagaggagtaacaaaatgtcatttctgaaagaggcttactttataccaactagtgtcagcatttgggatgccagggaacagagagtgagacacctacaatcaccagtctcaaatgcgctattgtttcttttcagagtgttgcagatttgccatttctccataatatggggatagaaaatggaataaagatagaagggatgtagaatatgctttcctgccaacatggtttggagtcgactttggtatattgactagatttgaaaatacaagattgattagatgaatctacaaaaaagttgtcctcctctcaggtcccttttacactttttgactaactagcatctatattccacacttagcttttttgttacacttatcctttgtctccgtaaatttcatttgcagtggttagtcatcagatattttagccacctacacaaaagcaaactgcatttttaaaaatctttctgagatgggagaaaatgtattctcctttcctataccgctctcccaacaaaaaaacaactagttagttctactaattagaaacttgctgtactttttcttttcttttaggggtcaaggaccctctttatagctaccatttgcctacaataaattattgcagcagtttgcaatactaaaatattttttatagactttatatttttccttttgataaagggatgctgcatagtagagttggtgtaattaaactatctcagccgtttccctgctttcccttctgctccatatgcctcattgtccttccagggagctcttttaatcttaaagttctacatttcatgctcttagtcaaattctgttacctttttaataactcttcccactgcatatttccatcttgaattggtggttctaaattctgaaactgtagttgagatacagctatttaatatttctgggagatgtgcatccctcttctttgtggttgcccaaggttgttttgcgtaactgagactccttgatatgcttcagagaatttaggcaaacactggccatggccgtgggagtactgggagtaaaataaaaatatcgaggtatagactagcatccacatagagcacttgaacctcctttgtacctgtttggggaaaaagtataatgagtgtactaccaatctaactaagattattatagtctggttgtttgaaataccannnnnnnnnnnnnnnnnnnnnnnnnnnnnnnnccaatgtactcaagaaaattgaacaaatgtactggatcaatttaaaatattttatttcttaaagccttttttgcctgttttaatgtgcaggacccttctcctttcatgggagagacaggtagttacctgaatataaggttgaaaaggtatgt

SEQ ID NO: 186182 - DNA, 1069 bp, Homo Sapiens
  misc_feature (800)..(812): n is a, c, g, or t
tctaaagcatttaaaatctagtgaaataactgaagggcctgctctttccattgtggatcacagcacacacatacatacaccctccacctccccatcccctgttctccctctgttgctccccttataaaattgatgttgtctttaccagaaaggtagacaaaaaagaagcagcagcagctcttaaagtgagggttattctcatactcggttccagccatcagcagacttcctgctcatcggcagatccccctttccaacctgtaactctgatgtgctctggatcagcttttaacttttaatcatatattactgtcttctaaatcccttctcctcctctactgctgccctatggttctggctcctaccccctgcggcacacttatcttcaaataccatagaattctaatctctggaggctggcagcttgacttggcactttagggccccttagcagggtgagctgttaaaacagcacacatctctcatcccctcttcctttattcccccctgggtttcagaaaggaaggatatatggggaccacctcccccttctttgatcccagcatctcagtccccctcccaaccctccatatggctctcaatggtgctcacttgcttggaagcaggctcccaatagggagggggctgccctctacagtctctttgactgtaagacagggctctgtatcagtgagacgatgagaaaagtcccaggctaatggcagaaatttgcactttgaacatgtgtgtttttgtgttgtggaacctgagattccttatttattaacaggaagtctgannnnnnnnnnnnnggagtctttgttgctatattttgtggggctgggagagagagattagattattttgacatgggatcccttccataacaggtactttgaaggcaagacatatggttgaagaagcacagccagtctctgaaatcatagctctccagtggcttttaaagaaagctggtcctcagcactaacaaaatcactacaatagcctagtgcttttttggaagcctttttaggaagaatgttagttcatggtaactagtatgctcttt

SEQ ID NO: 186183 - DNA, 2014 bp, Homo Sapiens
ttggagaagcagcggctggcgtgggccatccggggaatgggcgccctcgtgacctagtgttgcggggcaaaaagggtcttgccggcctcgctcgtgcaggggcgtatctgggcgcctgagcgcggcgtgggagccttgggagccgccgcagcagggggcacacccggaaccggcctgagcgcccgggaccatgaacggggaggccatctgcagcgccctgcccaccattccctaccacaaactcgccgacctgcgctacctgagccgcggcgcctctggcactgtgtcgtccgcccgccacgcagactggcgcgtccaggtggccgtgaagcacctgcacatccacactccgctgctcgacagtgaaagaaaggatgtcttaagagaagctgaaattttacacaaagctagatttagttacattcttccaattttgggaatttgcaatgagcctgaatttttgggaatagttactgaatacatgccaaatggatcattaaatgaactcctacataggaaaactgaatatcctgatgttgcttggccattgagatttcgcatcctgcatgaaattgcccttggtgtaaattacctgcacaatatgactcctcctttacttcatcatgacttgaagactcagaatatcttattggacaatgaatttcatgttaagattgcagattttggtttatcaaagtggcgcatgatgtccctctcacagtcacgaagtagcaaatctgcaccagaaggagggacaattatctatatgccacctgaaaactatgaacctggacaaaaatcaagggccagtatcaagcacgatatatatagctatgcagttatcacatgggaagtgttatccagaaaacagccttttgaagatgtcaccaatcctttgcagataatgtatagtgtgtcacaaggacatcgacctgttattaatgaagaaagtttgccatatgatatacctcaccgagcacgtatgatctctctaatagaaagtggatgggcacaaaatccagatgaaagaccatctttcttaaaatgtttaatagaacttgaaccagttttgagaacatttgaagagataacttttcttgaagctgttattcagctaaagaaaacaaagttacagagtgtttcaagtgccattcacctatgtgacaagaagaaaatggaattatctctgaacatacctgtaaatcatggtccacaagaggaatcatgtggatcctctcagctccatgaaaatagtggttctcctgaaacttcaaggtccctgccagctcctcaagacaatgattttttatctagaaaagctcaagactgttattttatgaagctgcatcactgtcctggaaatcacagttgggatagcaccatttctggatctcaaagggctgcattctgtgatcacaagaccactccatgctcttcagcaataataaatccactctcaactgcaggaaactcagaacgtctgcagcctggtatagcccagcagtggatccagagcaaaagggaagacattgtgaaccaaatgacagaagcctgccttaaccagtcgctagatgcccttctgtccagggacttgatcatgaaagaggactatgaacttgttagtaccaagcctacaaggacctcaaaagtcagacaattactagacactactgacatccaaggagaaaatttgccaaagttatagtacaaaaattgaaagataacaaacaaatgggtcttcagccttacccggaaatacttgtggtttctagatcaccatctttaaatttacttcaaaataaaagcatgtaagtgactgtttttcaagaagaaatgtgtttcataaaaggatatttatatctctgttgctttgactttttttatataaaatccgtgagtattaaagctttattgaagttctttgggtaaatattagtctccctccatgacactgcagtattttttttaattaatacaagtaaaaagtttgaattttgctacatagttcaatttt

SEQ ID NO: 186184 - DNA, 1126 bp, Homo Sapiens
ttgggtcaggggcagagcagggcggtctgagcgtgcgggcgacgcgggtctcactcgtccgctccgctctggactgcgcgccacgctctggggtccggcgccctggttcctgcttctgccgctgccgccgccggatcccagtggcccggcgtgctcggctcccacaggcctgcagccagcatcgcaccgaaccttcggggggccgcggctggagcgctcggccggcgtgggagcgccaaggccgcagatgcaatcttcttaccgcgaagaagccaggggaataggtagccacatcttgtttgcagataagaaaggaagctaacgcagtatctgcaaagccaggagtctgactcagtacttttctcactcatgcatacaaagcagctaaaaatgacacagcttatttaccatgcccctgacactgcactgagcactttatgagcttgaactctgttaatcctcacgaccacctcatgagactctccagaaagagcaacagtaatggagtacatgagcactggaagtgacaataaagaagagattgatttattaattaaacatttaaatgtgtctgatgtaatagacattatggaaaatctttatgcaagtgaagagccagcagtttatgaacccagtctaatgaccatgtgtcaagacagtaatcaaaacgatgagcgttctaagtctctgctgcttagtggccaagaggtaccatggttgtcatcagtcagatatggaactgtggaggatttgcttgcttttgcaaaccatatatccaacactgcaaagcatttttatggacaacgaccacaggaatctggaattttattaaacatggtcatcactccccaaaatggacgttaccaaatagattccgatgttctcctgatcccctggaagctgacttacaggaatattggttctgattttattcctcggagcgcctctggaaaggtatacttggcacaagatataaagacgaagaaaagaatggcgtgtaaactgatcccagtagatcaatttaagccatctgatgtggaaatccaggcttgctttctggcacgagaacatcgcagagctgtatggcgcagtcctgtggggtgaaactgtccatctctttatggaa

SEQ ID NO: 186185 - DNA, 1607 bp, Homo Sapiens
tatttccacaagctcctgctctggggaaacagttatggtcaaaaggtgaagtgcaaataaggggctgtcactgacttaaagtgccctaggtagtagccttccctatcataaagtgagatgccagtgactagagccaattggggaagaatctctctctggtgcggctgcatggtcagcagggcatcatgtagaaaaggattcaggagagggaggaaccactgcatctttcaaaccagaaagcaattagtgactaaagcaacagtaagcagtaggtgcactgaagtacatactgccgcaggtcaccaatgggtgacacacacagggctgccaggaggaattctctggactgaagaaattctttgaaagcataaaagccacaactaccagaaaccgcccctccaaacggctcaaaggagtcaaagtggataagccaagacgggctggagacaggaccaggggtcaagaactgggaagaagaacaccgatgtctgagcacgtccagtcctctgagcccttgtcctgacaaatttaagatctgtatcctggctggaatctagcagtctcttcaaaaattagttctttgagcttttccttaggcaagtcatccaattccatgtcgaacttgaatggtgcttcggcgatgggctcgtcactcgggtcgtaatactgctccagatatgggtgggccagagcctgttctacttcaatcctcttgtgtgggttgaatgtcaacattttgtccaataagtccagagctttggagtcagcatttgggaacagcctgttccatggcaccttatttttgtgtggaagagaaagcaaatagttcctagcttttaaatttattatacaattcaggtcttcttgtgatggggatccaagaatacccaaaatgtggttcagctggtcaagataatgcttccctggaaagatgggcctgttagaaagcatttctgccagaatgcagcctacagaccaaatatcaatggacttggtgtagcccttggaattcaacataatttctggagccctgtaccaacgtgtggccacatattctgtcaggaaccctgtgtgatcatggtctggatctgcaacacgggccaggccaaagtcacagatcttgagatcacaggtggtgttgagcagcaggttggaaggcttgaggtcacggtgcagaacgttagctgaatggatatattttaaccctctgaggatctggtagagaaaatagcagatatggtcattgctgaggtgttgtgtcttcaagagcttgtaaagatctgtttccatgaggtcctgtactatatatacatctttcatttgctcgatggttggtgctcgaataatgtcattgattccaatgatgttctcatgtctgaagcgcagtaagatttttatctccctcagggttctctggcagtaggtctggtgctcaaaggggctgattttcttgatagctactcgaactttgttgacattatcataagcagagcacaccatgccgtaggcgccctcgccgatgtacgagaggttggtgtagcgcggccccacgtcgaacacctgcccgcggaccgattgcctgcctgcctgccagactgacgggccaa

SEQ ID NO: 186186 - DNA, 1396 bp, Homo Sapiens
  misc_feature (404)..(480): n is a, c, g, or t
ttagacttcgctatggggccacaccaccgggtggacagtaactctagaagtctgtcttcccttttcttcattaataaaaacacagaacaatgactaagtgtccaagcatgttcttacagttcagtacctccccagatgcttacaaacagtgatagcatacctctaactcaccgactggcctgggcgcaagagcatattttggtttgttttttcatagactaggggtaaaggtctgcactactaagaaaatatctgaattttcccattgtcatttccatgtaaaaactccccttgacaataaacgtaagtccaagccacagaggggagagcaatttcccacctgtgggagggctttccctaaactaaattttctacttcttaaccatctatcccagagcctcttnnnnnnnnnnnnnnnnnnnnnnnnnnnnnnnnnnnnnnnnnnnnnnnnnnnnnnnnnnnnnnnnnnnnnnnnnnnnntgaattggaggaaaagaaaattcacctacaactctaaattagatttccagatgcatgggcacggacaggcagccgcgtctcggggacgcccggcattaccgccgtttggggaggatgaggtttctcagcatgtcgaaggagttgccgtccgggtgcacagtcacaacctcgccgccctcctggtgaacctggaggaagccagaatcgtccaggccaacgatggacacctttggtccctctgcgctgcccagatggacttgctgaccactgtggacccagtatcggtaataaaggggaaggacgctgttgggccctttgtcctgaaactctttgatcagtttctccagcacagtcacgactctggcgatgagataatcggctcttaagggcttcagttctgccttgtgttgtttattgtattctgtgatgaggtcgttgatgcagatggtagggttactgttagtcacattaaatccacagccaataagtatataaaatgtttctcccatgagtgttgagttaaccagaactccgccgatcttcatgaggtcactgtaataaatatcgttgggccacttcactcgtaagttgatatcctgatactcgggaatggacctcactgcttccacgacagccacggacatcagatgctggacaaacgggatcctctgtcccagctgggatctcagtggaatggagatgagcagagtagaaagagcacatcccacagggctcagccacacattccctccccgtcctttgccctcggtctgccgggccgcgatcactattaagcccatttcctgcggtgtctgaaacatcagcccatccaggagacgcatcgttgtgggggtcacttcggcaaacaaaattactttccccaactgcttggtctgcagattttggcgatagccaa

SEQ ID NO: 186187 - DNA, 1061 bp, Homo Sapiens
  misc_feature (503)..(540): n is a, c, g, or t
  misc_feature (750)..(781): n is a, c, g, or t
ccctttatgaatgaagccacttgccccagcttccctctgctgcccctatctgcaggcttgctaagatctcctgactaggcgctgtcacccacagtgggctgcagagctggctcttcctagctggctaactatccctgaatcagtaaaaatttctagtggagagtgatgggaaatcgaatccaaactggcttaaacaaaaatgagaatttattgattaacatgactcaggagaccagaactctatagagaacatggcctgacagtgggggaagagaggtgtttcctcaaaaagaaactgggtgcagctttcccagaagaatcagttgctcaatatataataccctgatgaatttagttaccattctatgtctcttacttcctcattcgtcaaagtacatctgtgatatttaaatgcaggtctgttttcaaggtcagtttccggaaacagtgaccctgagaaggcttcctcctgagtatgcataaacattcacagcttgcatgcnnnnnnnnnnnnnnnnnnnnnnnnnnnnnnnnnnnnnnatgtttgcttgcactgcataaaaacaattgcaacatcaacagaaataaaaattaaaggaataattctcctccgactctgccgttccatccagtgaaactcttcattctggggtaaagttccttcagttcttgttcatagataggtatatacttcataagtcaaacaatcaggctgggcgcagtagctcatgcctgtaatcccagcccttnnnnnnnnnnnnnnnnnnnnnnnnnnnnnnnnatacatctcttttctttcctgcatcataaatcctctcccagttttctattcctcccttaggtggtaaaccttcaaatttgaaaccttaaggtctggactaacaatgaatacaagtattctatttgtgataattatcatgtattttctttctacacattactctcctcacctcttgtcccctgacaaagtgctcctagaaactgtcacaggacacttctgcttatatttctttaatcagaacttagttggatgggccgggcatggtggctcacgcctgtaa

SEQ ID NO: 186188 - DNA, 1685 bp, Homo Sapiens
ttggcagcgggccatgacaagctccaggctttggttttcgctgctgctggcggcagcgttcgcaggacgggcgacggccctctggccctggcctcagaacttccaaacctccgaccagcgctacgtcctttacccgaacaactttcaattccagtacgatgtcagctcggccgcgcagcccggctgctcagtcctcgacgaggccttccagcgctatcgtgacctgcttttcggttccgggtcttggccccgtccttacctcacaggttggccgcaccaagcttaccctgtcttcctagggaaacggcatacactggagaagaatgtgttggttgtctctgtagtcacacctggatgtaaccagcttcctactttggagtcagtggagaattataccctgaccataaatgatgaccagtgtttactcctctctgagactgtctggggagctctccgaggtctggagacttttagccagcttgtttggaaatctgctgagggcacattctttatcaacaagactgagattgaggactttccccgctttcctcaccggggcttgctgttggatacatctcgccattacctgccactctctagcatcctggacactctggatgtcatggcgtacaataaattgaacgtgttccactggcatctggtagatgatccttccttcccatatgagagcttcacttttccagagctcatgagaaaggggtcctacaaccctgtcacccacatctacacagcacaggatgtgaaggaggtcattgaatacgcacggctccggggtatccgtgtgcttgcagagtttgacactcctggccacactttgtcctggggaccaggtatccctggattactgactccttgctactctgggtctgagccctctggcacctttggaccagtgaatcccagtctcaataatacctatgagttcatgagcacattcttcttagaagtcagctctgtcttcccagatttttatcttcatcttggaggagatgaggttgatttcacctgctggaagtccaacccagagatccaggactttatgaggaagaaaggcttcggtgaggacttcaagcagctggagtccttctacatccagacgctgctggacatcgtctcttcttatggcaagggctatgtggtgtggcaggaggtgtttgataataaagtaaagattcagccagacacaatcatacaggtgtggcgagaggatattccagtgaactatatgaaggagctggaactggtcaccaaggccggcttccgggcccttctctctgccccctggtacctgaaccgtatatcctatggccctgactggaaggatttctacgtagtggaacccctggcatttgaaggtacccctgagcagaaggctctggtgattggtggagaggcttgtatgtggggagaatatgtggacaacacaaacctggtcctcaggctctggcccagagcaggggctgttgccgaaaggctgtggagcaacaagttgacatctgacctgacatttgcctatgaacgtttgtcacacttccgctgtgagttgctgaggcgaggtgtccaggcccaacccctcaatgtagcttctgtgagcaggagtttgaacagacctgagcccagcaccgaggagggtgctggctgtagtgaatggtagtggagccagg

SEQ ID NO: 186189 - DNA, 3154 bp, Homo Sapiens
  misc_feature (2922)..(2960): n is a, c, g, or t
ttggagaaaaaccagcaagaaggcggcgggggaagatggcggtcctggggtagagtttgcaagctttctgactaggctagtcgagtaactattcgggtcatggcgtcaaactcaactaagtctttcctggcagatgccggctatggcgaacaggaactggatgccaactctgcccttatggaattggacaaaggcctaagatctggcaaacttggtgaacagtgtgaagcagttgttcgctttcccagactttttcagaagtatccattccctattcttatcaattctgcattcctaaagttagctgatgttttcagagttggaaataatttcctgaggctatgtgttcttaaagttacccaacaaagtgagaaacatttggagaagattctaaatgtggatgaatttgtgaagagaattttttctgtgattcatagtaatgatcctgtggcaagagccatcaccctccggatgttgggaagtctggcatcaataattcctgagaggaagaatgctcatcatagtattcgtcagagtttagattcacatgataatgtagaagttgaagctgctgtttttgctgctgcaaacttctctgcacagtcaaaggattttgctgtaggaatctgtaacaaaatcagtgaaatgattcaaggtttagcgacaccagtagacttgaagctaaaattgatacccattctacagcacatgcaccatgatgcaatcttggcttccagtgctcgtcagcttttacaacagctggtcacatcctatccgtccaccaaaatggtgattgtgtctttgcacactttcactctgcttgcagcgtcatctttggttgatacacctaagcagattcagcttctgttgcagtatttgaagaatgatcccaggaaggcagtaaagagacttgctattcaagatctgaaattacttgctaataaaacaccacatacttggagtagggagaatattcaggcactttgtgagtgtgccctccagactccttatgacagcttaaaactagggatgttgtctgtcctttccacactatcagggaccatcgccatcaaacattacttcagtatagttccaggaaatgtgagttcttctcccagatcttctgatttagtcaaattagcccaagagtgctgttaccataataacaggggcattgcagctcatggagttagagtcctaactaatataactgtttcttgtcaagaaaaggatcttttggcactggaacaagatgctgtctttggcctggaatccctactggtactttgtagtcaagatgatagtccaggtgctcaggccactttaaagattgctctaaactgtatggtgaagttggccaagggcaggccccatcttagccagtcagtagttgagaccttgttgactcaattgcacagtgctcaagacgctgcccggattttgatgtgccattgcctggcagccattgccatgcaactgccggtgctgggtgatgggatgcttggtgacctcatggagctgtacaaggtgattggatcagccacagacaagcaacaagaacttctggtgagtttggctactgtgatttttgttgcaagtcagaaggcattgtctgtggaaagtaaggcagtaattaagcagcagcttgaaagtgtctccaatggatggactgtataccgtattgccagacaggcttccagaatgggtaatcatgacatggccaaagagctttatcagagtttgctgactcaggttgcctcagaacatttctacttctggctaaatagtttgaaggagttttcacatgcagaacagtgtctcactgggttgcaagaggaaaattatagttcagcactttcttgcattgctgaatctttaaaattctatcacaaagggattgcttccttaacagcagctagtacaccactgaatcctttaagctttcagtgtgaatttgtaaaactcaggattgaccttttacaagccttctctcaacttatctgtacttgtaatagcctgaagacaagcccaccacctgcaattgccacaacaattgccatgaccttaggaaatgacctccagaggtgtggtcgcatctccaatcagatgaaacagtccatggaagaatttcgaagccttgcttctcgatatggagatctttaccaggcatcttttgatgctgactcagcaactttgaggaatgttgaactacagcagcagagctgtttactgatatctcatgcaatagaagccctgattttggatccagaatcagcaagtttccaggaatatggatctactggaacagcccatgctgatagtgaatatgaaagaagaatgatgtctgtatataatcatgtcttggaggaggtagaatcactcaatcggaaatatacccctgtttcttatatgcacacagcatgcctctgcaatgccatcattgctttgctgaaagttcccctttctttccagagatattttttccagaaactacagtctaccagcatcaagcttgctctgtcaccatcgccccggaatcctgcagagcccattgctgtccagaataaccagcagctggcgctaaaggtagagggagtggttcagcacggatctaaaccaggactcttccgcaaaattcagtctgtctgtctgaatgtttcttccacactgcagagtaaatctggacaagactacaagatacccattgacaacatgaccaatgagatggagcaaagggttgaacctcataatgattacttcagtactcaatttctgttgaactttgctatccttggaacacacaacattacagtggaatcttctgtgaaagatgccaatggtatagtatggaagactggtcccagaactaccatatttgtaaaatccctggaagacccttattcccagcaaattcgcttacannnnnnnnnnnnnnnnnnnnnnnnnnnnnnnnnnnnnnnacgcaatgcctacacacggttttaaccatggaatgaatgcactgcagactctcaagagatcaatcaaattgccagaaacagtttggtttttcatatggaataagtattaaagttacagtgtagttcatttattcattgatttttgtaatgtaatattctggaaaaaattttgttttcttaaaattttgtctgac

SEQ ID NO: 186190 - DNA, 1967 bp, Homo Sapiens
  misc_feature (320)..(341): n is a, c, g, or t
  misc_feature (425)..(433): n is a, c, g, or t
  misc_feature (670)..(714): n is a, c, g, or t
  misc_feature (968)..(985): n is a, c, g, or t
  misc_feature (1572)..(1602): n is a, c, g, or t
  misc_feature (1631)..(1694): n is a, c, g, or t
ttggatttgtgaatagccacttcactccagccctggaacatagtgtgaccccttctcttaaaagtaaaaattaagaaaatctcaatctctttgctgtattccagtgattaatttgaacatagggaggtttttacagaagaaattttaccaaaaaatagagactgcaagagatgatacagattgtttaaaaagcagaattcactcaccactgagcaacacttagttggtagaatagaaaggagggatactaagttaagacttttcaaatggatcagtttggctgaatagatagatatactcatgtatgtagttgtgggagnnnnnnnnnnnnnnnnnnnnnnacttatgaaataagttttgacctagacacaaggggtatatgaaggaggaaaaaaatttctttgcaaaatctcccaaaacttgcnnnnnnnnncccttccacacaggcactattataattttcagtgccatgttaaattggattatttcatttactttaagttaggaattactgtgtaatttattaattcatgattctcataacattcagcataagtgtagcaaagttgctaataacggaaggggatcatagtggtgttgaatgtaactttgaagtagggaatggccttttaagtctgagagagaacatttgaatccttttcagggattnnnnnnnnnnnnnnnnnnnnnnnnnnnnnnnnnnnnnnnnnnnnnagataagtgtatatacataaatacactcttctaaagttgtatatacatatgcacattacatacattttaatttattgacaaaattaaccaaattaagatttggagatgtgggatgttcttgttttaaaatagcatgtttgaaaccatcagtttgtgtctaaaattagctgtagcacatggatgttgtccatattaagctatttgctgtttgaattatagaggtctacagtatttgtgttggcatagtttttgtnnnnnnnnnnnnnnnnnntatcaggatggtggaaaaactagatctgtgtatctctgttttgggcatttattcagtatcttctagcaatggtttttctctgttgatctaccgtagtatcctatttttaagtttattttatttttaaggagtattgtcatcacttttcaaggtgtcttgacttctacacaaagtatatatattcaggactttaaaaaatagcagtacacatttaacagtagcgaattacaccaaaatgatttactttgagatttgaataatttgcatagcagtaaaatgtgttttgtgtaacatacaaatagaaaaatgacccagtatcttaattgatacttactggagagtatcagaattacccagcagctcttacagaatgccataaattctttaagactaaatattgaaatcaattatttgaagtaatgtttctgatttactgttaaaagttgctgagctcagtttttggagatatcatttctgcctgcctgttcccttatgacagtgaggccttctttggctccacctagtatgataatcatgggttctgttttagttgatgagaagtggctcctatgaatgcctctgctcannnnnnnnnnnnnnnnnnnnnnnnnnnnnnnaggggtctcgccaactcctgggctcaagnnnnnnnnnnnnnnnnnnnnnnnnnnnnnnnnnnnnnnnnnnnnnnnnnnnnnnnnnnnnnnnnctctgttcttttcaatgtctccgtgccatcagtcagcagtgcttacatgtttagcatattgtcatgcagtttctcttctgttcccacgagatatttttgggcaaaaaattgacaaaagtacatgtgtttttccccacctatcccttagaaaacctaatgtgtactgctatttttaaaaccaaaaagagacagcgtgacgatgcgtaaagcatttttcttagcctttcctttgtcttgatctgttaatgagacaaaactgccagactcaaaata

SEQ ID NO: 186191 - DNA, 1501 bp, Homo Sapiens
  misc_feature (327)..(390): n is a, c, g, or t
  misc_feature (923)..(969): n is a, c, g, or t
tttcaaattttggtgcaatctaaattgtatttctttcagcacaatagtagagtattttgagtctggcagttttgttctcattaacagatcaagacaaaggaaaggctaagaaaaatgctttacgcatcgtcacgctgtctctttttggttttaaaaatagcagtacacattaggttttctaagggataggtggggaaaaacacatgtacttttgtcaattttttgcccaaaaatatctcgtgggaacagaagagaaactgcatgacaatatgctaaacatgtaagcactgctgactgatggcacggagacattgaaaagaacagagnnnnnnnnnnnnnnnnnnnnnnnnnnnnnnnnnnnnnnnnnnnnnnnnnnnnnnnnnnnnnnnncttgagaatctgaaaagtgtaaaaggggtagacaaaaaaatgacccttttgacaaattctgctttaaaaaattctgatcaacaattgaagaaataatagcaaagtttcttattaaaaagaaacaattttacattatacaatcactgaagcaacattaaaatgtactcttacattcaatgaaaaagagagggacagagtatgagaaataacccaccttctcatactccaaatacgtgggtactcagtaatgaaagtcacattaacaaagaaaagcaagttctcgcttgaggactgagaaaaaccaagtaatcctgagacaaattctgatgggtgaaaaagatgaaactgagattgcactctacagccccaaattgatatgcaataacccctatcagtcacaatgtaaagaggcctacaggtgtgcactgaattattcccaaaaccattcacccttccccacaccgtctctgcaccaagcaccaaaaatttgataaaaactattacttattgaaaaccacttaaaattgcaatgnnnnnnnnnnnnnnnnnnnnnnnnnnnnnnnnnnnnnnnnnnnnnnngcttaccaagcccacaatatagctttcaagatatttagattaaactctaacctattgtatcttaagcacataataaggcacataataagaaattaagtaaatacacagtaattctgagtaagtattagagattatagtggtacaaaaaacccttgagattaatttttttctaaaagaagaccttaccaaaaataacttttaaaaaatctgtcaaaccatatgatagacctgaatattttccttaagactgtaaactttttttctgaaaacaattataaaaaagtagtttataagtaggattatttttctttaaaattttccaagatcatattacttgacaaataagtgtcattttgaaatttaaaacatgattttttcctaataaaattattagttattctgacatcttattaacagatcttagttgaattccacttaatttccctggggacagctgagacactgcatttttccaaatagtcttaaaaagttaaagataggcattatttaaaccaacttttttgtacaaagt

SEQ ID NO: 186192 - DNA, 1060 bp, Homo Sapiens
  misc_feature (101)..(118): n is a, c, g, or t
  misc_feature (705)..(735): n is a, c, g, or t
  misc_feature (764)..(827): n is a, c, g, or t
ttggctaaaattagctgtagcacatggatgttgtccatattaagctatttgctgtttgaattatagaggtctacagtatttgtgttggcatagtttttgtnnnnnnnnnnnnnnnnnntatcaggatggtggaaaaactagatctgtgtatctctgttttgggcatttattcagtatcttctagcaatggtttttctctgttgatctaccgtagtatcctatttttaagtttattttatttttaaggagtattgtcatcacttttcaaggtgtcttgacttctacacaaagtatatatattcaggactttaaaaaatagcagtacacatttaacagtagcgaattacaccaaaatgatttactttgagatttgaataatttgcatagcagtaaaatgtgttttgtgtaacatacaaatagaaaaatgacccagtatcttaattgatacttactggagagtatcagaattacccagcagctcttacagaatgccataaattctttaagactaaatattgaaatcaattatttgaagtaatgtttctgatttactgttaaaagttgctgagctcagtttttggagatatcatttctgcctgcctgttcccttatgacagtgaggccttctttggctccacctagtatgataatcatgggttctgttttagttgatgagaagtggctcctatgaatgcctctgctcannnnnnnnnnnnnnnnnnnnnnnnnnnnnnnaggggtctcgccaactcctgggctcaagnnnnnnnnnnnnnnnnnnnnnnnnnnnnnnnnnnnnnnnnnnnnnnnnnnnnnnnnnnnnnnnnctctgttcttttcaatgtctccgtgccatcagtcagcagtgcttacatgtttagcatattgtcatgcagtttctcttctgttcccacgagatatttttgggcaaaaaattgacaaaagtacatgtgtttttccccacctatcccttagaaaacctaatgtgtactgctatttttaaaaccaaaaagagacagcgtgacgatgcgtaaagcattttttcttagcctttcctttg

SEQ ID NO: 186193 - DNA, 3096 bp, Homo Sapiens
ttggcttagatggcgggggtaagaggaaaacgattgtgaggcgggaacggctttctgctgccttttttgggccccgaaaagggtcagctggccgggctttggggcgcgtgccctgaggcgcggagcgcgtttgctacgatgcgggggctgctcggggctccgtcccctgggctggggacgcgccgaatgtgaccgcctcccgctccctcacccgccgcggggaggaggagcgggcgagaagctgccgccgaacgacaggacgttggggcggcctggctccctcaggtttaagaattgtttaagctgcatcaatggagcacatacagggagcttggaagacgatcagcaatggttttggattcaaagatgccgtgtttgatggctccagctgcatctctcctacaatagttcagcagtttggctatcagcgccgggcatcagatgatggcaaactcacagatccttctaagacaagcaacactatccgtgttttcttgccgaacaagcaaagaacagtggtcaatgtgcgaaatggaatgagcttgcatgactgccttatgaaagcactcaaggtgaggggcctgcaaccagagtgctgtgcagtgttcagacttctccacgaacacaaaggtaaaaaagcacgcttagattggaatactgatgctgcgtctttgattggagaagaacttcaagtagatttcctggatcatgttcccctcacaacacacaactttgctcggaagacgttcctgaagcttgccttctgtgacatctgtcagaaattcctgctcaatggatttcgatgtcagacttgtggctacaaatttcatgagcactgtagcaccaaagtacctactatgtgtgtggactggagtaacatcagacaactcttattgtttccaaattccactattggtgatagtggagtcccagcactaccttctttgactatgcgtcgtatgcgagagtctgtttccaggatgcctgttagttctcagcacagatattctacacctcacgccttcacctttaacacctccagtccctcatctgaaggttccctctcccagaggcagaggtcgacatccacacctaatgtccacatggtcagcaccaccctgcctgtggacagcaggatgattgaggatgcaattcgaagtcacagcgaatcagcctcaccttcagccctgtccagtagccccaacaatctgagcccaacaggctggtcacagccgaaaacccccgtgccagcacaaagagagcgggcaccagtatctgggacccaggagaaaaacaaaattaggcctcgtggacagagagattcaagctattattgggaaatagaagccagtgaagtgatgctgtccactcggattgggtcaggctcttttggaactgtttataagggtaaatggcacggagatgttgcagtaaagatcctaaaggttgtcgacccaaccccagagcaattccaggccttcaggaatgaggtggctgttctgcgcaaaacacggcatgtgaacattctgcttttcatggggtacatgacaaaggacaacctggcaattgtgacccagtggtgcgagggcagcagcctctacaaacacctgcatgtccaggagaccaagtttcagatgttccagctaattgacattgcccggcagacggctcagggaatggactatttgcatgcaaagaacatcatccatagagacatgaaatccaacaatatatttctccatgaaggcttaacagtgaaaattggagattttggtttggcaacagtaaagtcacgctggagtggttctcagcaggttgaacaacctactggctctgtcctctggatggccccagaggtgatccgaatgcaggataacaacccattcagtttccagtcggatgtctactcctatggcatcgtattgtatgaactgatgacgggggagcttccttattctcacatcaacaaccgagatcagatcatcttcatggtgggccgaggatatgcctccccagatcttagtaagctatataagaactgccccaaagcaatgaagaggctggtagctgactgtgtgaagaaagtaaaggaagagaggcctctttttccccagatcctgtcttccattgagctgctccaacactctctaccgaagatcaaccggagcgcttccgagccatccttgcatcgggcagcccacactgaggatatcaatgcttgcacgctgaccacgtccccgaggctgcctgtcttctagttgactttgcacctgtcttcaggctgccaggggaggaggagaagccagcaggcaccacttttctgctccctttctccagaggcagaacacatgttttcagagaagctgctgctaaggaccttctagactgctcacagggccttaacttcatgttgccttcttttctatccctttgggccctgggagaaggaagccatttgcagtgctggtgtgtcctgctccctccccacattccccatgctcaaggcccagccttctgtagatgcgcaagtggatgttgatggtagtacaaaaagcaggggcccagccccagctgttggctacatgagtatttagaggaagtaaggtagcaggcagtccagccctgatgtggagacacatgggattttggaaatcagcttctggaggaatgcatgtcacaggcgggactttcttcagagagtggtgcagcgccagacattttgcacataaggcaccaaacagcccaggactgccgagactctggccgcccgaaggagcctgctttggtactatggaacttttcttaggggacacgtcctcctttcacagcttctaaggtgtccagtgcattgggatggttttccaggcaaggcactcggccaatccgcatctcagccctctcagggagcagtcttccatcatgctgaattttgtcttccaggagctgcccctatggggcggggccgcagagccagccttgtttctctaacaaacaaacaaacaaacagccttgtttctctagtcacatcatgtgtatacaaggaagccaggaatacaagttttcttgatgatttgggttttatttttgttttatttg

SEQ ID NO: 186194 - DNA, 922 bp, Homo Sapiens
ttggggcagggaatctggcttgattggcgtgctgagacgcacctggcgcaaccctcccttctgaatcgaagttcaagtcccgcggacactgcaaccatgaaggagagacgggccccccagccagtcgtggccagatgtaagctcgttctggtcggggacgtgcagtgtgggaagaccgcgatgttgcaagtgttagcgaaggattgctatccagagacctatgtgcccaccgtgttcgaaaattacacagcctgtttggagacagaggaacagagggtggagcttagtctctgggatacctcaggatctccctactacgataatgtccgtccactctgctacagcgactcggatgcagtattactatgttttgacatcagccgtccagagacagtggacagcgcactgaagaagtggaggacagaaatcctagattattgtcccagcacccgcgttttgctcattggctgcaagacagacctgcgaacagacctgagtactctgatggagctgtcccaccagaagcaggcgcccatctcctatgagcagggttgtgcaatagcaaagcagctgggtgcagaaatctacctggaaggctcagctttcacctcagaaaagagcatccacagcatctttcggacggcatccatgctgtgtctgaacaagcctagcccactgccccagaagagccctgtccgaagcctctccaaacgactgctccacctccccagtcgctctgaactcatctcttctaccttcaagaaggaaaaggccaaaagctgttccattatgtgaagtggaaattggaggggggagacaaccccctacttcctcccttggggtgcagaggcacggggagagggaggatgagacaatttagacactggacatgagtttttcagatggccacggtgagggcttg

SEQ ID NO: 186195 - DNA, 1397 bp, Homo Sapiens
  misc_feature (161)..(174): n is a, c, g, or t
gagcaatgcttacttataaaagccaactttgtacaaaaaagttgggtttgtaataccaaaaaacacttccatcacttctgcccttaacccttgcctctattacctaagcttagtaagtagttttcttaatattgtccaatgtttggtgttatctgcattgnnnnnnnnnnnnnnaattgtggttgttctgacgtgtgaaatttaaggaaagagccattttttaaaaatgccgagcagggcaatgcaagtacagccaaatattagacttgatgtgcaatcttcggtcctttttaatctggggtattataggcagtactttaaattgcaaagtcttccgggcctattttcctctacatttttgtaattaactctgggggcttacttgttttggcagtactgaaatcaaaggagctggttcttcttttctcccaattattttcatatgaaagcacctacaattagcctgttagtcctattcagatacatcaaatatcagtgaatgctttactattcgcacatttaagcatctttgttttacataaaattagagtatgaaaaccagtgttcaattttttatcttgttgagcttgtaaaatgccagcaatttaaaactaggacttttccccccataagccaaggaggtagaattactaatacaagggttaaagaaggtagattttgttttcaatatttgggtaatattagaaagattcttcccacagggaagaactagcaagtgtcccaattttttccaaacgttggggaggggaaaattcactgtatcatgaaaccctaagggtttgttgcacttcctgctttttaggcctggataacagtatcaccatccttatttacagaagggtaaaactgactcttaatgagaaaagctttataagttcaagggctgtaaaatatgaactacttagggtcgtttgccttccatgggaacttggctagacttagaaaaagctgtttgttgtgctaatgtaaaagtgtcatacaatttagaagatttttgaagatggtaaacttagaagaattctatgttctgaaatgcacacttttagaatgtttttctttgaaaacaggctaatagttctttctttttttgacaaagtttcagctcctctttaaagttattgtgtcatttttctggtttaaatttcccttatatttccacctgtaatgtcagtggcaacaacatcatacttcacttacttgttaatttactttttacccttattctaagagcaagttgagttgaactgaatctctccttgtcttagtaacaatgtataaatagtggcttttctgtacaaaaaggttgtaatgcctcctgatgggatataattttgtgattgtatttaaaagttgaataaattcacaccagcttcctg

SEQ ID NO: 186196 - DNA, 1808 bp, Homo Sapiens
  misc_feature (267)..(280): n is a, c, g, or t
gaaaataattgggagaaagaagaaccagctcctttgatttcagtactgccaaaacaagtaagcccccagagttaattacaaaaatgtagaggaaaataggcccggaagactttgcaatttaaagtactgccctataataccccagattaaaaaggaccgaagattgcacatcaagtctaatatttggctgtacttgcattgccctgctcggcatttttaaaaaatggctctttccttaaatttcacacgtcagaacaaccacaattnnnnnnnnnnnnnncaatgcagataacaccaaacattggacaatattaagaaaactacttactaagcttaggtaatagaggcaagggttaagggcagaagtgatggaagtgtttctttgtattacaaaccctcaccctaaacctggggtttgggctctaaaaaagtaatttagggaagcagatcaagagcctgattatcagttctcacatggaaatctcaacagatttcaaaagcaactcaccacaagtgtcagacacaaaagaatcttaataatcatctagcaaactacactaagaactcaatgaccaaaaataatcaatcaaacttcaagacacaccaaagcaacagtaaaagagaaataactacacaagctaagctctgtagagaaatcaactaaaaattaggcaattctagtaaattaaagacagcaaaaaacttaagattgaacttcaatttccaagggtactttgaagaggttgtttgtaggttattctgtaccccctgattcttaaagaaagtggaggagagggggaggcgacagaggaatggagggaaagggggaggcaagagagagaaacaggagaggatccctggttttccacaggtattttatcaaaaatgtatgacttcataactacagcactctaacttttctcagtctaactgctgaggtctcttacgaaagttcaaatggcaagtcaccttgtagaatgacttaacagaggaagccaaactatacagaccagggccttgtccagagtgcagtaaggagcaggcttttgaagtcatctattacatctgccttacaaccaaacccactgtgtatgccacattattcttggagggaccactttaaaacaaaagtgatggataatttaccagaggcacatgcttttgaagtaaagctgttttttgtttttgcttgagtaaggtgccaggtacctctgaagcctgaaaacacaggcaataaaattcacctatttatcttctttaccaaagagaaagcaatttctgaatactatctatagtgctaaactaatgtgaactgactatcattgcgataaaagtttttccttatgatgacaataaagaatgttgctgaaagactttaatcttgagagagcagaggtaatgtgatgaatgtaatttgctcccagagcctctagaaaataaagcagtgtgcaaaatacaatatggcattattattccagctaggttttttgcgaaaataaggttccaaatgaatgaagaaaacaaaatttgatgcgctaggttccttaacttgctattggacacatgggtatttcaaaaaaatccaccgtgcctacaatacttgttaaagtaccaaaaaagcactgatactgaaacacattctttcatgggtacttaacgattacagattaacgtggcaatcagaatacaaaaaaggcccagagctatgtggaattttttccttaatacctttcaagtttgtctgtgaagacggcaactagaaagtgaccactgtcctaatctctaaaatgcagggaaaatgtacccaa

SEQ ID NO: 186197 - DNA, 1339 bp, Homo Sapiens
  misc_feature (309)..(364): n is a, c, g, or t
  misc_feature (872)..(885): n is a, c, g, or t
ttggggtaaattatccatcacttttgttttaaagtggtccctccaagaataatgtggcatacacagtgggtttggttgtaaggcagatgtaatagatgacttcaaaagcctgctccttactgcactctggacaaggccctggtctgtatagtttggcttcctctgttaagtcattctacaaggtgacttgccatttgaactttcgtaagagacctcagcagttagactgagaaaagttagagtgctgtagttatgaagtcatacatttttgataaaatacctgtggaaaaccagggatcctctcctgtnnnnnnnnnnnnnnnnnnnnnnnnnnnnnnnnnnnnnnnnnnnnnnnnnnnnnnnncactttctttaagaatcagggggtacagaataacctacaaacaacctcttcaaagtacccttggaaattgaagttcaatcttaagttttttgctgtctttaatttactagaattgcctaatttttagttgatttctctacagagcttagcttgtgtagttatttctcttttactgttgctttggtgtgtcttgaagtttgattgattatttttggtcattgagttcttagtgtagtttgctagatgattattaagattcttttgtgtctgacacttgtggtgagttgcttttgaaatctgttgagatttccatgtgagaactgataatcaggctcttgatctgcttccctaaattacttttttagagcccaaaccccaggtttagggtgagggtttgtaatacaaagaaacacttccatcacttctgcccttaacccttgcctctattacctaagcttagtaagtagttttcttaatattgtccaatgtttggtgttatctgcattgnnnnnnnnnnnnnnaattgtggttgttctgacgtgtgaaatttaaggaaagagccattttttaaaaatgccgagcagggcaatgcaagtacagccaaatattagacttgatgtgcaatcttcggtcctttttaatctggggtattataggcagtactttaaattgcaaagtcttccgggcctattttcctctacatttttgtaattaactctgggggcttacttgttttggcagtactgaaatcaaaggagctggttcttcttttctcccaattattttcatatgaaagcacctacaattagcctgttagtcctattcagatacatcaaatatcagtgaatgctttactattcgcacatttaagcatctttgttttacataaaattagagtatgaaaaccagtgttcaattttttatcttgttgagcttgtaaaatgccagcaatttaaaactaggacttttcccccc

SEQ ID NO: 186198 - DNA, 1243 bp, Homo Sapiens
  misc_feature (88)..(101): n is a, c, g, or t
  misc_feature (1018)..(1031): n is a, c, g, or t
tacaaaaaagttggcccttgcctctattacctaagcttagtaagtagttttcttaatattgtccaatgtttggtgttatctgcattgnnnnnnnnnnnnnnaattgtggttgttctgacgtgtgaaatttaaggaaagagccattttttaaaaatgccgagcagggcaatgcaagtacagccaaatattagacttgatgtgcaatcttcggtcctttttaatctggggtattataggcagtactttaaattgcaaagtcttccgggcctattttcctctacatttttgtaattaactctgggggcttacttgttttggcagtactgaaatcaaaggagctggcttcttttctcccaattattttcatatgaaagcacctacaattagcctgttagtcctattcagatacatcaaatatcagtgaatgctttactattcgcacatttaagcatctttgttttacataaaattagagtatgaaaaccagtgttcaattttttatcttgttgagcttgtaaaatgccagcaatttaaaactaggacttttccccccataagccaaggaggtagaattactaatacaagggttaaagaaggtagattttgttttcaatatttgggtaatattagaaagattcttcccacagggaagaactagcaagtgtcccaattttttccaaacgttggggaggggaaaattcactgtatcatgaaaccctaagggtttgttgcacttcctgctttttaggcctaacagtatcaccatccttatttacagaagggtaaaactgactcttaatgagaaaagctttataagttcaagggctgtaaaatatgaactacttagggtcgtttgccttccatgggaacttggctagacttagaaaaagctgtttgttgtgctaatgtaaaagtgtcatacaatttagaagatttttgaagatggtaaacttagaagaattctatgttctgaaatgcacacttttagaatgtttttctttgaaaacaggctaatagnnnnnnnnnnnnnngacaaagtttcagctcctctttaaagttattgtgtcatttttctggtttaaatttcccttatatttccacctgtaatgtcagtggcaacaacatcatacttcacttacttgttaatttactttttacccttattctaagagcaagttgagttgaactgaatcttccttgtcttagtaacatgtataattagtgatttttctgtacaaaggtg

SEQ ID NO: 186199 - DNA, 3127 bp, Homo Sapiens
ttggcaccagtctgtttttaacaggttctattacccagaacttttttgtaaatgcggcagttacaaattaactgtggaagttttcagttttaagttataaatcacctgagaattacctaatgatggattgaataaatctttagactacaaaagcccaacttttctctatttacatatgcatctctcctataatgtaaatagaataatagctttgaaatacaattaggtttttgagatttttataaccaaatacatttcagtgtaacatattagcagaaagcattagtctttgtactttgcttacattcccaaaagctgacattttcacgattcttaaaaacacaaagttacacttactaaaattaggacatgttttctctttgaaatgaagaatatagtttaaaagcttcctcctccatagggacacattttctctaacccttaactaaagtgtaggattttaaaattaaatgtgaggtaaaataagtttatttttaatagtatctgtcaagttaatatctgtcaacagttaataatcatgttatgttaattttaacatgattgctgacttggataattcattattaccagcagttatgaaggaaatattgctaaaatgatctgggcctaccataaataaatatctccttttctgagctctaagaattatcagaaacaggaaagaatttagaaaacttgagaaaacctaatccaaaataaaattcacttaagtagaactataaataaatatctagaatctgactggctcatcatgacatcctactcataacataaatcaaaggagatgattaatttccagttagctggaagaaactttggctgtaggtttttattttctacaagaattctggtttgaattatttttgtaagcaggtacattttataaaatgtaagccctactgtaaggtttagcactgggtgtacatatttattaaaaatttttattataacaacttttattaaaatggcctttctgaacactttatttattgatgttgaagtaaggattagaaacatagactcccaagttttaaacacctaaatgtgaataacccatatatacaacaaagtttctgccatctagctttttgaagtctatgggggtcttactcaagtactagtaatttaacttcatcatgaatgaactataatttttaagttatgcccatttataacgttgtttatgactacattgtgagttagaaacaaacttaaaatttggggtatagaacccctcaacaggttagtaatgctggaattcttgatgagcaataatgataaccagagagtgatttcatttacactcatagtagtataaaaagagatacatttccctcttaggcccctgggagaagagcagcttagatttccctactggcaaggtttttaaaaatgaggtaaatgccgtatatgatcaattaccttaattggccaagaaaatgcttcaggtgtctaggggtatcctctgcaacacttgcagaacaaaggtcaataagatccttgcctatgaatacccctcccttttgcgctgttaaatttgcaatgagaagcaaatttacagtaccataactaataaagcagggtacagatataaactactgcatcttttctataaaactgtgattaagaattctacctctcctgtatggctgttactgtactgtactctctgactccttacctaacaatgaatttgttacataatcttctacatgtatgatttgtgccactgatcttaaacctatgattcagtaacttcttaccatataaaaacgataattgctttatttggaaaagaatttaggaatactaaggacaattatttttatagacaaagtaaaaagacagatatttaagaggcataaccaaaaaagcaaaacttgtaaacagagtaaaaatctttaatatttctaaagacatactgtttatctgcttcatatgctttttttaatttcactattccatttctaaattaaagttatgctaaattgagtaagctgtttatcacttaacagctcattttgtctttttcaatatacaaattttaaaaatactacaatatttaactaaggcccaaccgatttccataatgtagcagttaccgtgttcacctcacactaaggcctagagtttgctctgatatgcatttggatgattaatgttatgctgttctttcatgtgaatgtcaagacatggagggtgtttgtaattttatggtaaaattaatccttcttacacataatggtgtcttaaaattgacaaaaaatgagcacttacaattgtatgtctcctcaaatgaaaattctttatctgaaattttaaaagacattgattccgcatgtaaggatttttcatctgaagtacaataatgcacaatcagtgttgctcaaactgctttatacttataaacagccatcttaaataagcaacgtattgtgagtactgatatgtatataataaaaattatcaaagaaaattacctgccagtcatttgtaaatgctgtctactcctgaaagccttccttcatctctatttagttaataatgtgctctctcctcctgttttgaaaccccatagctctctacacctcttattgtacatcactctactttgcattggagttctgtttctatatgtacttattcacctgttgcctaaacatgcactgttcctaaaaggtacagtttttgctcaaaatatatgaaaggaaagataatcagttcttaaagtttggtatgctaaataagcacccagggaacttacctgctccacctcaccccagaaattgattattcaggtctggaatatggctcaggattcttaattttcaaccaacacaatatagaatcctgtcagttatccttggatcatttgctaagtgatcttgcaaaatcaaaactcctttgagactatttcattttcagaaatattttaaaacttgttcagaaacatcttaaaacttgttagcatatatgaaaagtacaatgcttggtgtacgtaggttattatttggtcatttccctcaaaccatccagacaagccactcttctaccacaagctggtagaaatccttagcacctttctgcttctgcactgctatcactt

SEQ ID NO: 186200 - DNA, 1225 bp, Homo Sapiens
  misc_feature (1127)..(1137): n is a, c, g, or t
ttggctttttttccccaaggcactttaaaaatcagcaggacaaccctgaggcaaactggaagttgcctgaagattttgctgtggtgtttggagaagcagagggtgaacttgctgttggaggagtcttcttgaggatctttattgcacaaccagcctgggttctaagaaagcctagagaatttcttattgccctgttagaaaaattaactgagctcctagagaagaacaatcctcatggagaaactctggaaaccttgacaatggcaacagtgtgtctcttcagcgcacaacctcagctggcagatcaggtcccgccattgggccatcttcccaaagttatctaggcaatgaatcataggaacaatgccattcctaagagtgccattcgggttatccatgccttgtctgaaaatgagctgtgtgttcgagccatggcatctttagagaccattggcccactgatgaatggaatgaaaaagcgagcagatactgttggtctagcctgtgaagcaattaatcgaatgtttcagaaggagcagagtgaattagtagcacaagccctgaaagcagatttggttccatacctcttaaaattactcgaaggcattggccttgaaaacctggacagcccagcagccactaaggctcagattgttaaagctctcaaggcaatgactcgaagtttgcagtatggagaacaggtgaatgaaatcctgtgccgttcttcagtctggagtgccttcaaagatcagaaacatgatttgttcatttctgagtcacaaacagcaggatacctcacaggacctggagttgctggctaccttaccgcaggtacatctacatcagtcatgtctaacctgccacctcctgtagaccatgaggcaggcgaccttggctatcagacttgaaatattcacgagagacaataaacgctgaaaggccagtgccaagtccacattcctccagctgatacgttgaagcaaactcttactgcctttctcctggtttcatgacagtgttattcctttttctataaatatatttttaggaaaaaaagtcagtgatcctaattgtatcacattataagaaagcactctgtggatcaacataagtgggtacacaagaannnnnnnnnnncttggtgtatgtaagcacatttgttccctttatatctgtttacaaaactgtgaatcaaaaagacaaactttcttcctagtttttgtaa

SEQ ID NO: 186201 - DNA, 983 bp, Homo Sapiens
cacacagctcattttcagacaaggcatggataacccgaatggcactcttaggaatggcattgttcctatgattcattgcctggataactttgggaagatggcccaatggcgggactgatctgccagctgaggttgtgcgctgaagagacacactgttgccattgtcaaggtttccagagtttctccatgaggattgttcttctctaggagctcagttaatttttctaacagggcaataagaaattctctaggctttcttagaacccaggctggttgtgcaataaagatcctcaagaagactcctccaacagcaagttcaccctctgcttctccaaacaccacagcaaaatcttcaggcaacttccagtttgcctcagggttgtcctgctgatttttaaagtgctctagcatcatttccctaactgttgtggacactttatctctggaattatcattccaaattaactcaggattttcatgagttccttcaaaaatatgtacagcagcttcaggattgtctctcatagcatccatgaaaacgcttggtagaaatttcattaacgtaattcgaacctttggacctatcagtttatctgctgtcattttggcaaaaagttctgctgtttgggctcgaacctgtggatgtgttgaattgcagaacatatccagtaaatagatcaaagcaccctttgccattgcttctttgattatttttgtactcgatgtcaaagcataaagagtttccagaacaagctgacgacttgatggcaatgaatgtagaagagccaataaactggacaaaaccattgattcagcaatattgttgacacagtcttggttagatgtcactatattcacaacctctaaagccaactgctgcacttgaccagctccatgaactcggagaagagaaaatatcaacttaaagtgcccaatgcattcactctcagaacctagagaataagaataaaatggtttaccaa

SEQ ID NO: 186202 - DNA, 2136 bp, Homo Sapiens
ttggggagaatttgatactccagaagcaatctggagcagtgaaatgaggcgcctgatgatagagaagattgctgcccatctcgcggatttcacacctcgtcttcagagtaacacaagagcactttatcagtattgccccattcctataatcaactatccacaactcgaaaatgaactattttgtaatatttattacctcaaacaactgtgtgatacactccggtttccagattggccaattaaagacccggttaagcttctaaaagatacccttgatgcctggaagaaagaagtagaaaagaagccacctatgatgtcaatagatgatgcttatgaagtgcttaatctgcctcaaggacagggaccgcatgatgagagcaagattaggaaagcttacttcagacttgcacaaaagtaccaccctgataagaatccagaagggagggacatgtttgaaaaagtaaataaagcatatgaatttttatgtaccaaatcagcaaaaatagtggatgggccagatccagagaatataattttaattctaaaaacacagagcatcctcttcaaccgtcataaagaagatttacagccttataaatatgcaggataccccatgcttattcggactataacaatggaaacttcagatgacctccttttctcaaaagaatcaccattgttgcctgcggctacagagctagctttccatactgtcaactgttcagccctcaatgctgaagagctcagaagagagaatggactagaggtgttacaagaggcatttagtcgctgtgtggctgtcttgactcgtgctagtaaaccaagtgacatgtcagtacaggtgtgtggatacataagtaaatgctacagtgtggctgctcagtttgaggaatgccgagagaagatcacggaaatgcctagcatcatcaaggatctctgtcgggtactatattttggcaagagtattccccgcgtagctgctcttggggtagaatgtgtcagttcttttgctgtggatttctggctacagacacacctatttcaggctggaattttgtggtatctccttggttttctgtttaattatgactacacactagaagagagtggcattcagaaaagtgaagaaacaaaccagcaggaggtagcaaacagccttgccaaactgagtgtccatgctctgagtcgccttggagggtatttggctgaagaacaagcaactccagaaaatccaaccataaggaaaagcttagctggcatgctgacaccctatgttgctagaaaacttgctgtggctagtgtgactgagattttgaagatgcttaacagcaacacagaaagtccatatttgatatggaacaattctacaagagcagaattacttgaatttcttgaatcccaacaagaaaacatgattaaaaaaggtgattgtgacaaaacttatggatcagaatttgtctacagtgatcatgccaaagaacttattgtaggggagatttttgttagggtgtataatgaagttcctactttccaactggaggttccaaaagcatttgctgcaagtctcttggattatataggctcgcaggcccaatacttgcacacattcatggccatcacacacgcggcaaaagtggagtcagagcaacatggagatcgcttaccgagagtagaaatggctttggaggctctgagaaatgtcataaaatacaatccaggttctgagagtgaatgcattgggcactttaagttgatattttctcttctccgagttcatggagctggtcaagtgcagcagttggctttagaggttgtgaatatagtgacatctaaccaagactgtgtcaacaatattgctgaatcaatggttttgtccagtttattggctcttctacattcattgccatcaagtcgtcagcttgttctggaaactctttatgctttgacatcgagtacaaaaataatcaaagaagcaatggcaaagggtgctttgatctatttactggatatgttctgcaattcaacacatccacaggttcgagcccaaacagcagaactttttgccaaaatgacagcagataaactgataggtctaaaggttcgaattacgttaatgaatttctaccaagcgttttc

SEQ ID NO: 186203 - DNA, 1566 bp, Homo Sapiens
  misc_feature (203)..(211): n is a, c, g, or t
  misc_feature (1323)..(1345): n is a, c, g, or t
aaacagtgatttatgtgtttcttaaagggtaaaacaacaaaaacaaattctaaaattgtaaccttaaattaagtgttaaaatttcagatgacagagccgataactggtaacagcttcttgaagttcatattaagagtccaattagaaacactaacaactacctggcaatagtttgaaagaatcagaagggttcggtgaagggnnnnnnnnntccgaacatgcaaaataccccccaaaacacatgaccttctttttcattttataatctaaacttgtaaaatatttataaatacatgatcattctacacaatacagatcttctagagcatttctaaaggatattacagtttttggtcttaaggaataaagactaagatggaaaaggagatgaaaacagtgaaatctgaggaagcaatacactctctacacacaagcaaactagttcatccagtcaagttagcggttacagttcagtacatgattttcaaggcaactaagaaatcaagacacagatatttccccttcctagagtttacaattctttcaaaagctccaatgtatccataaaggagtgctgatttttgtggggttttttcccagaaggaaacaaagaataaataggggaaaaaaagtttccatccctaaattcacatacacaacaagttaagttaaactataagctagttttagactacccagtgaaacagaattgttggtactatctgaggcaggtgctaccctccctagtcagttcaaaacatgatccagtaaaacaaatacacattgttatgcctcaaacaactataaagcatttcattattcttcaaatatcatgtttaactcctaaggtaatagacttctagaatgttgtatcttaatggtgtacctgaatcaatactagcaacagaatgcaaaattcaaaattgctataaaggtaaaatcatcataaaaagaaactcaatccttatgtaaaaaaagggagaactgagtgtgaaatactaacaccaaatgtctgaaggcagaatttttgtttgtggaagacagagcgaagagatagatgcacctaatcaagaccaaatagaagacagtgaagaatatgaaaaatgcttaaaaaagaagaaggaaaatggagaagagacaggcagcaaaagaattactagatagatcaaaaataagagaaaatgaggcatgtgcatatggcttttttgtctgtcctttgtgttcctaaataacttaaaacgtaagtggcatgtaggccatactagcaggcaagaatgagccttgtgatgtatacagatgaagaatctgaggctaatgaattgnnnnnnnnnnnnnnnnnnnnnnnaattcatacctgaaagccttgaatccttgctaaatattccagttgttttgaaggttgtactggagaacaagggggagtaggagaacttccttttaaacctatggcttcagctgtagaagatgttccattcataaggagttccctggcaattgtagctgaactattcgatgtgggagatatactgaagaaagagcttgaaggttggttcatatctttgccaa

SEQ ID NO: 186204 - DNA, 1614 bp, Homo Sapiens
  misc_feature (176)..(184): n is a, c, g, or t
  misc_feature (1299)..(1321): n is a, c, g, or t
aggtaaaaccaccaaaacaaatctaaaatgtaactttaaattaagtggttaaaatttcagatgacagagccgataactggtaacagcttcttgaagttcatattaagagtccaattagaaacactaacaactacctggcaatagtttgaaagaatcagaagggttcggtgaagggnnnnnnnnntccgaacatgcaaaataccccccaaaacacatgaccttctttttcattttataatctaaacttgtaaaatatttataaatacatgatcattctacacaatacagatcttctagagcatttctaaaggatattacagtttttggtcttaaggaataaagactaagatggaaaaggagatgaaaacagtgaaatctgaggaagcaatacactctctacacacaagcaaactagttcatccagtcaagttagcggttacagttcagtacatgattttcaaggcaactaagaaatcaagacacagatatttccccttcctagagtttacaattctttcaaaagctccaatgtatccataaaggagtgctgatttttgtggggttttttcccagaaggaaacaaagaataaataggggaaaaaaagtttccatccctaaattcacatacacaacaagttaagttaaactataagctagttttagactacccagtgaaacagaattgttggtactatctgaggcaggtgctaccctccctagtcagttcaaaacatgatccagtaaaacaaatacacattgttatgcctcaaacaactataaagcatttcattattcttcaaatatcatgtttaattaactctaaggtaatagacttctagaatgttgtatcttaatggtgtacttgaatcaatactagcaacagaatgcaaaattcaaaattgctataaaggtaaaatcatcataaaaagaaactcaatccttatgtaaaaaaagggagaactgagtgtgaaatactaacaccaaatgtctgaaggcagaatttttgtttgtggaagacagagcgaagagatagatgcacctaatcaagaccaaatagaagacagtgaagaatatgaaaaatgcttaaaaaagaagaaggaaaatggagaagagacaggcagcaaaagaattactagatagatcaaaaataagagaaaatgaggcatgtgcatatggcttttttgtctgtcctttgtgttcctaaataacttaaaacgtaagtggcatgtaggccatactagcaggcaagaatgagccttgtgatgtatacagatgaagaatctgaggctaatgaattgnnnnnnnnnnnnnnnnnnnnnnnaattcatacctgaaagccttgaatccttgctaaatattccagttgttttgaaggttgtactggagaacaagggggagtaggagaacttccttttaaacctatggcttcagctgtagaagatgttccattcataaggagttccctggcaattgtagctgaactattcgatgtgggagatatactgaagaaagagcttgaaggttggttcatatctttgggtgacaaatagcctagagtagtgccagagattactttgtggcggctggcttccatctcttgataaacatcaccaa

SEQ ID NO: 186205 - DNA, 952 bp, Homo Sapiens
ttggctttcaaagccagctgaaggaaagaggaagtgctagagagagcccccttcagtgtgcttctgacttttacggacttggcttgttagaaggctgaaagatgatggcaggaatgaaaatccagcttgtatgcatgctactcctggctttcagctcctggagtctgtgctcagattcagaagaggaaatgaaagcattagaagcagatttcttgaccaatatgcatacatcaaagattagtaaagcacatgttccctcttggaagatgactctgctaaatgtttgcagtcttgtaaataatttgaacagcccagctgaggaaacaggagaagttcatgaagaggagcttgttgcaagaaggaaacttcctactgctttagatggctttagcttggaagcaatgttgacaatataccagctccacaaaatctgtcacagcagggcttttcaacactgggagttaatccaggaagatattcttgatactggaaatgacaaaaatggaaaggaagaagtcataaagagaaaaattccttatattctgaaacggcagctgtatgagaataaacccagaagaccctacatactcaaaagagattcttactattactgagagaataaatcatttatttacatgtgattgtgattcatcatcccttaattaaatatcaaattatatttgtgtgaaaatgtgacaaacacacttatctgtctcttctacaattgtggtttattgaatgtgatttttctgcactaatataaattagactaagtgttttcaaataaatctaaatcttcagcatgatgtgttgtgtataattggagtagatattaattaagtcacctgtataatgttttgtaattttgcaaaacatatcttgagttgtttaaacagtcaaaatgtttgatattttataccagcttatgagctcaaagtactacagcaaagcc

SEQ ID NO: 186206 - DNA, 1471 bp, Homo Sapiens
ttggcatcaaactatgtcctggaatacaggccaaactgattttcttgaatttcgtaagagttccctatttcattgatttgaaaaaaccacaggatcaaggtttgaatcacacgtgtaactactacctgcagccagaggaagacgtgaccattggagtctggcacaccgtccctgcagtctggtggaagaacgcccaaggcaaagaccagatgtggtatgaggatgccttggcttccagccaccctatcattctgtacctgcatgggaacgcaggtaccagaggaggcgaccaccgcgtggagctttacaaggtgctgagttcccttggttaccatgtggtcacctttgactacagaggttggggtgactcagtgggaacgccatctgagcggggcatgacctatgacgcactccacgtttttgactggatcaaagcaagaagtggtgacaaccccgtgtacatctggggccactctctgggcactggcgtggcgacaaatctggtgcggcgcctctgtgagcgagagacgcctccagatgcccttatattggaatctccattcactaatatccgtgaagaagctaagagccatccattttcagtgatatatcgatacttccctgggtttgactggttcttccttgatcctattacaagtagtggaattaaatttgcaaatgatgaaaacgtgaagcacatctcctgtcccctgctcatcctgcacgctgaggacgacccggtggtgcccttccagcttggcagaaagctctatagcatcgccgcaccagctcgaagcttccgagatttcaaagttcagtttgtgccctttcattcagaccttggctacaggcacaaatacatttacaagagccctgagctgccacggatactgagggaattcctggggaagtcggagcctgagcaccagcactgagcctggccgtgggaaggaagcatgaagacctctgccctcctcccgttttcctccagtcagcagcccggtatcctgaagccccggggggccggcacctgcaatgctcaggagcccagctcgcacctggagagcacctcagatcccaggcggggaggcccctgcaggcctgcagtgcccggaggcctgagcatggctgtgtggaaagcgtgggtggcaggcatgtggctctccttgccgcccctcaacctgagatcttgttgggagacttaatggcagcaggcagccatcactgcctgcttgatgctgcactgagctggacagggggagtccgggcaggggactcttggggctcgggaccatgctgagctttttggcaccacccacagagaacgtggggtccaggttctttctgcaccttcccagcacatgcagaatgactccagtgggttcaatcgttccctcctgccctgtgtaccctgcttgcctttctcagctgccccacctcccctgggctggcccactcaccacagtgggaa

SEQ ID NO: 186207 - DNA, 1617 bp, Homo Sapiens
  misc_feature (1441)..(1461): n is a, c, g, or t
ttaaaaaatataaatctgtggtcactaaaccttaagatgagcattgttttgtgttttcatttcagggaagaagtgaatgaaaaacttcgagatacagcagacgggacctttttggtacgagatgcgtctactaaaatgcatggtgattatactcttacactaaggaaagggggaaataacaaattaatcaaaatatttcatcgagatgggaaatatggcttctctgacccattaaccttcagttctgtggttgaattaataaaccactaccggaatgaatctctagctcagtataatcccaaattggatgtgaaattactttatccagtatccaaataccaacaggatcaagttgtcaaagaagataatattgaagctgtagggaaaaaattacatgaatataacactcagtttcaagaaaaaagtcgagaatatgatagattatatgaagaatatacccgcacatcccaggaaatccaaatgaaaaggacagctattgaagcatttaatgaaaccataaaaatatttgaagaacagtgccagacccaagagcggtacagcaaagaatacatagaaaagtttaaacgtgaaggcaatgagaaagaaatacaaaggattatgcataattatgataagttgaagtctcgaatcagtgaaattattgacagtagaagaagattggaagaagacttgaagaagcaggcagctgagtatcgagaaattgacaaacgtatgaacagcattaaaccagaccttatccagctgagaaagacgagagaccaatacttgatgtggttgactcaaaaaggtgttcggcaaaagaagttgaacgagtggttgggcaatgaaaacactgaagaccaatattcactggtggaagatgatgaagatttgccccatcatgatgagaagacatggaatgttggaagcagcaaccgaaacaaagctgaaaacctgttgcgagggaagcgagatggcacttttcttgtccgggagagcagtaaacagggctgctatgcctgctctgtagtggtggacggcgaagtaaagcattgtgtcataaacaaaacagcaactggctatggctttgccgagccctataacttgtacagctctctgaaagaactggtgctacattaccaacacacctcccttgtgcagcacaacgactccctcaatgtcacactagcctacccagtatatgcacagcagaggcgatgaagcgcttactctttgatccttctcctgaagttcagccaccctgaggcctctggaaagcaaagggctcctctccagtctgatctgtgaattgagctgcagaaacgaagccatctttctttggatgggactagagctttctttcacaaaaaagaagtaggggaagacatgcagcctaaggctgtatgatgaccacacgttcctaagctggagtgcttatccnnnnnnnnnnnnnnnnnnnnnggtgtaatttaaagccacaaccacatacaacacaaagagaaaaagaaatgcagaaatctctgcgtgcagggacaaagaggactttaaccatggtgcttgttaatgctttctgaagctttaccagctgaaagttgggactctggagagcggaggaga

SEQ ID NO: 186208 - DNA, 1327 bp, Homo Sapiens
  misc_feature (575)..(595): n is a, c, g, or t
ttggctggtggaagatgatgaagatttgccccatcatgatgagaagacatggaatgttggaagcagcaaccgaaacaaagctgaaaacctgttgcgagggaagcgagatggcacttttcttgtccgggagagcagtaaacagggctgctatgcctgctctgtagtggtggacggcgaagtaaagcattgtgtcataaacaaaacagcaactggctatggctttgccgagccctataacttgtacagctctctgaaagaactggtgctacattaccaacacacctcccttgtgcagcacaacgactccctcaatgtcacactagcctacccagtatatgcacagcagaggcgatgaagcgcttactctttgatccttctcctgaagttcagccaccctgaggcctctggaaagcaaagggctcctctccagtctgatctgtgaattgagctgcagaaacgaagccatctttctttggatgggactagagctttctttcacaaaaaagaagtaggggaagacatgcagcctaaggctgtatgatgaccacacgttcctaagctggagtgcttatccnnnnnnnnnnnnnnnnnnnnnggtttaatttaaagccacaaccacatacaacacaaagagaaaaagaaatgcaaaaatctctgcgtgcagggacaaagaggcctttaaccatggtgcttgttaatgctttctgaagctttaccagctgaaagttgggactctggagagcggaggagagagaggcagaagaaccctggcctgagaaggtttggtccagcctgggtttagcctggatgttgctgtgcacggtggacccagacacatcgcactgtggattatttcattttgtaacaaatgaacgatatgtagcagaaaggcacgtccactcacaagggacgctttgggagaatgtcagttcatgtatgttcagaagaaattctgtcatagaaagtgccagaaagtgtttaacttgtcaaaaaacaaaaacccagcaacagaaaaatgttagtttggaaaacaggacttaaaatgacattcagtatataaaatatgtacataatattggatgactaactatcaaatagatggatttgtatcaataccaaatagcttctgttttgttttgctgaaggctaaattcacagcgctatgcaattcttaatttttattaagttgttatttcagttttaaatgtaccttcagaataagcttccccaccccagtttttgttgcttgaaaatattgttgtcccggatttttgttaatattcatttttgttatccttttttaaaagtaaatgtacaggatgccagt

SEQ ID NO: 186209 - DNA, 943 bp, Homo Sapiens
actttgtacaaaaaagttggcttttcttataactgagctcagccaaggaaactcttgcacaaatgtacaatactgtttggaatatggaagacctggatttagaatatgccaagacagatataaattgtggcacagacttgatgttttatatagaaatggacccaccagcactgcctcctaaaccaccaaaacctactactgtagccaacaacggtatgaataacaatatgtccttacaagatgctgaatggtactggggagatatctcgagggaagaagtgaatgaaaaacttcgagatacagcagacgggacctttttggtacgagatgcgtctactaaaatgcatggtgattatactcttacactaaggaaagggggaaataacaaattaatcaaaatatttcatcgagatgggaaatatggcttctctgacccattaaccttcagttctgtggttgaattaataaaccactaccggaatgaatctctagctcagtataatcccaaattggatgtgaaattactttatccagtatccaaataccaacaggatcaagttgtcaaagaagataatattgaagctgtagggaaaaaattacatgaatataacactcagtttcaagaaaaaagtcgagaatatgatagattatatgaagaatatacccgcacatcccaggaaatccaaatgaaaaggacagctattgaagcatttaatgaaaccataaaaatatttgaagaacagtgccagacccaagagcggtacagcaaagaatacatagaaaagtttaaacgtgaaggcaatgagaaagaaatacaaaggattatgcataattatgataagttgaagtctcgaatcagtgaaattattgacagtagaagaagattggaagaagacttgaagaagcagcagctgagtatcgagaaattgacaaacgtatgaac

SEQ ID NO: 186210 - DNA, 1621 bp, Homo Sapiens
ttgggtctgtccccagcaataatgttcacgcgccttattccagtgacaaagaacacatgtgtactgtggtttattttgatgactgcatgtccatacatcagtgtaaaatatcctgtgagtccatgggagcatccaaatatcgctggtttcataatgcctgctgcgagtgcattggtccagaatgtattgactatggtagtaaaactgtcaaatgtatgaactgcatgttttaaagaagacaaatgcaaaccaaagcaacttagtaaaataataggtataaaaagttattctgtaagtctgttggttgtatcttgtatcagaatcccagtaagttaagttgtaaagactttggaataagtttcttttaaaaatatgacatagccagtgatgtgtttaattatataactgttcttactgattttattgccccctagcaataagccctttcctttgaatacatgtacaactttggtcatatgagaagcaggtgcgcagagaattccttgaaagatctgaggtttttaacatgaagtctgatgtggttttcctctagcattccaaaaggtttttgctttgaaagtgttagcagaagcatgttgatgtgaattatgatttcttcatgtgctactgttagcacactgagtttttatagttgcacatcattcctcattgtgccttgttttatccattttataaatagagtagatatttgatataccactctgataactcatataaaaatatcatcataaaaagcttaatttcatcccttttatgttggttttaaaaggtaaatgcttaccatattttataattgagaactcttacatagtagaatccattctataatacatgtgttgacaaagctttagagaaagtttcctattctcttccatttcccctgcccaaagtgctgacataggcagtgatgaagaatctttaccaagattttcagggtgtacctatgaaattgctttaaatgcactgctggtgtaaataattagcaagcaaaagcgtttctgtgacttcaggtaccagcttaaagagcactagggatggggaacgaatgccaaatcagactccacctagagcaccaggaaacagcttgtaccctggtagggaaatggtgttgctgaaaggggaggctgagccagtgcgagactgaacttgtgcagccttagccaagacaaagcagtgtttttcagcagacggctgatgggacaggaattgaagaagagaattgactcgtatgaacaggacagggtgaaaatgctgggaattataatgggaaacaaaactatctatgttcatattttgtaatatttcatttgttaagtttatatctggatataatgttctttttaaacaagtataatcatatcgtcggaggttaagattatgaaattttagaatctctattcagatgatgttcactccaaatacactacagaatttagtcaacattttatataatgtttcaataaatgtttctttcaataaagatactatgtgcccttcttagtaataaaatctcaatcttaaagcatgaatctaaaacataaatatttatattacagactcaattttacaaaattactaattgctctagtgcatatttgaa

SEQ ID NO: 186211 - DNA, 1640 bp, Homo Sapiens
  misc_feature (1317)..(1332): n is a, c, g, or t
  misc_feature (1383)..(1401): n is a, c, g, or t
actttgtacaaaaaagttgggtgcgtggagaggtgcccgtggaagggaatttgctggaagtggcctgtcactgtagcagcctgaggtccagaacttccatggtggtgcttaacgtcaacaaggccctcatctacctgtggcacggatgcaaagcccaggcccacacgaaggaggtcggaaggaccgctgcgaacaagatcaaggaacaatgtcccctggaagcaggactgcatagtagcagcaaagtcacaatacacgagtgtgatgaaggctccgagccactcggattctgggatgccttaggaaggagagacaggaaagcctacgattgcatgcttcaagatcccggaagttttaacttcgcgccccgcctgttcatcctcagcagctcctctggggattttgcagccacagagtttgtgtaccctgcccgagccccctctgtggtcagttccatgcccttcctgcaggaagatctgtacagcgcgccccagccagcacttttccttgttgacaatcaccacgaggtgtacctctggcaaggctggtggcccatcgagaacaagatcactggttccgcccgcatccgctgggcctccgaccggaagagtgcgatggagactgtgctccagtactgcaaaggaaaaaatctcaagaaaccagcccccaagtcttaccttatccacgctggtctggagcccctgacattcaccaatatgtttcccagctgggagcacagagaggacatcgctgagatcacagagatggacacggaagtttccaatcagatcaccctcgtggaagacgtcttagccaagctctgtaaaaccatttacccgctggccgacctcctggccaggccactcccggagggggtcgatcctctgaagcttgagatctatctcaccgacgaagacttcgagtttgcactagacatgacgagggatgaatacaacgccctgcccgcctggaagcaggtgaacctgaagaaagcaaaaggcctgttctgagtggggagacgccagaggagcctcacggtcacgtccaacaacaccactgcaccagggaaatggatatatatttttggactggtgtttttcacaaagtatttttcaatcagagttttcagaacctgacattgttaaagatactgcttgtcccggagttgtgtattttgtaaatgttcaagggaactgtttggaaacttctttccaccattcaggaggttatcagaattaataaaagtatctgttatgtgcacttaagccgcagctgctatagatagcactgccttcttgttccagctaggcaatgccnnnnnnnnnnnnnnnngaagcagttctctttataaagtgttattttgatagtttgtggattctaaannnnnnnnnnnnnnnnnnnaacaccatataagtcaaatatgtatttaacaaagcaatatgtattcattcactttcaagatttgttttggtgtcaaaataacatgaaaaggtagatggagttgcttctgttgaattagctctgccaccaatatgtatcttcatacacgtttggaaatgtttcctgcagcattacgtatgacttgttctgagtactgcttcccggtgctaaaatgaacaaagaaatttgtactttaatgg

SEQ ID NO: 186212 - DNA, 3100 bp, Homo Sapiens
  misc_feature (2649)..(2706): n is a, c, g, or t
  misc_feature (2809)..(2848): n is a, c, g, or t
ttggcggatgtagctgacctaaagataaaaagagaaaaaatttgcagacaagacacaagtttcatgaaaaagaatgggcaacagctgtatcggcacatatatttgggttgtaaagaggaagacaacgttcagaaaaactatgaactactttatacttctcttgctcttataactattgaactggctaatgaagaagtagttattgatctcattcgactggccattgctttacaggacagtgcaattatcaatgaggataatttgccaatgttccatcgttgtggaatcatggcactggttgcagcatacctcaactttgtaagtcagatgatagctgtccctgcattttgccagcatgttagcaaggttattgaaattcgaactatggaagccccttattttctaccagagcatatcttcagagataagtgcatgcttccaaaatctttagagaagcatgaaaaagatttgtactttctgaccaacaagattgcagagtcgctaggtggaagtggatatagtgttgagagattgtcagttccgtatgtaccacaagtaacagatgaagatcgactttctagaagaaaaagcattgtggacaccgtatccattcaggtggatattttatccaacaatgttccttctgatgatgtggttagtaacactgaagaaatcacttttgaagcattgaagaaagcaattgataccagtggaatggaagaacaggaaaaggaaaagaggcgtcttgtgatagagaaatttcagaaagcaccttttgaagaaatagcagcacagtgtgaatccaaagcaaatttgcttcatgatagacttgcccaaatattggaactcaccatacgtcctcctcccagtccatcaggaacactgaccattacttctgggcatgcccaataccaatctgtcccagtctatgagatgaagtttccagatctgtgtgtgtactgatcggcgcatgaagacctcagcatatgatttgtaaagcctaaaaattaaggccaagctgagctttcagggtttacttaatgtgtattaacatacttcttgaaaataatgatggaacatatctttaaccaaatgtttggcataccatattagaagttttggagctatatataatttcgagtactttcaaagatagatttatgccatgttaatttgctttgaggttcctgttgcctttttaagttgaacatgttttggtttcactttattccactgttaagtagtatgttttaaacttttcacaaatgtaatgttttttaaaaagtaagccttcagaggattgaaactgtataaattgtttatctcttaaacatctacacagccgcttagatgtagaatttttgttgttgttttctgcaaaggcagatacatttaaatatattcctagtcctggggctgcaaaactgttcggtggctttttgtccccatgctttagataagctgggataggcaccttgctattcagttactataataatatgtgataggcattcctcatcttcttcacaataataggacatctgttgaatagcattcctcgaatataaccctaaaaacgccatactttaaattgtctggttcttgtaatattgtgtttcctgccaagagtttgaccattctgcttgagaagtgtagagcttactcttggagtaccaaactgtgcaatatttttacatcataagatgtattagtttacaggctgtgctttgaaattatagtagtattttgctgtggctccattaattaaatgagatatatatttagtgcagaaaaaagacatttaaaacagctattagttcacctgtgaagagtctgtacattttgatttctattaagagcacatttatttacatttgtatattattttaaatcctcatagtcaaaaaattctccagatggacttttaatttgtaagatttgaactgtgacttgtatacatctgtttagaatcaattatatttgaaaagctgcctgtgttttaacagtcaagtgtgctaaagtttgtcaatttaagctgcttttgatttcagctaccaagatcacaggtgcactctacacataacactgacagacccataacattacatacatcttagtgaattctatcacatggtaaaatgaacagctttctttgtaactcataaaattctcttacgacatttttataaagtcacctgtttatagttctatcttttcagattccatttctttttacataaaacagcatacatatcaaaaactgtagcctagaatacagtttaatttttggcttttgtttttgtttaaaaaattgcagtgaagaatgggatgtttgtgtttatggctatttgggcacctttagtagaaacagacaaaagtaaggaaacgataataggacaagcatacttgaaaatttctgaatacttaaacaaaagcgcaacatcttgaaaaccagtctagtcattgaaacctatgaaatgacactgaaagatcctgggctgcttcttaaataagtagatcagcaagacttgtttcagagtgacagtggagtcgttaccgctggaggactaaagggccctgtggcagctgtcactggaactttgcctcttgatcaggaaaaatgcttcaccagtccgtaaagccaagttnnnnnnnnnnnnnnnnnnnnnnnnnnnnnnnnnnnnnnnnnnnnnnnnnnnnnnnnnngactatatattttaaaaaaatctaagcagggggacatgcaaaaacaatcatcatccacttggatgtcattttatagattaacactgtgtgcttttgtatggannnnnnnnnnnnnnnnnnnnnnnnnnnnnnnnnnnnnnnnttcatttgcacttacgtgaaacacaaactttgctctacaaaatttcgtgtttcttagtgattttaaaatgcatgtattgcatgtaaaggaaaaccattacaattaatgtttatcacacctttatcttggtctttgttgatttgggttttgttggggtttttgttactgtttttaaaatacagtaggcttctatatatcctggatttctgaactggtcttggttgacaaggattcccagaaatggaatctttt

SEQ ID NO: 186213 - DNA, 1943 bp, Homo Sapiens
  misc_feature (1126)..(1138): n is a, c, g, or t
  misc_feature (1587)..(1601): n is a, c, g, or t
ttgggtatttgtgtaatttatagaagtaaaatctagatgttgagacctgtttggtctaatagatgtggatacagtttattttacttgaaattttgttgtctactttgtgtgtttaacgtaaatatatgtcagagtttagaatctgcctgcagttgtgaaaaagaaagcttaagtgatgcagttattggcaagattgcaatgattatggaaaaatagaaagcgaatactcagtttaagccaaggaaaatattgtggatttaatatttgataaaactgattttgtttaacaggaaatttttagcattcagtcatataacatctggttatcaatgcacgtttacacaataaatacttgagtggaggaaagttaaaaagatgagcaatagagtagaaaatatatcttaaactagttgacctagattgtattaatagctacttaagatgtttcaaagataggaagctattgcttggacagagaacttgaaataagtggacccatgtataaaagctttgacttaaacattgatatttcagaatgtgttaaatagattaagacacagtaagttaaccctacatgttataaagatggcgactgttaacaaaggctgtaacagattactattttatatccagaaagtcttctctatgtagagaagtcagagagactagatgctttcactagggaatgtcttcccacccagccatcacaaatgtggacaatcactgcatccacatctgtaggcatatttctatggaagtttaattgacagctatattcattatttattttacaatttcatttttctacacctttgagatttatgaatgcagttttttcttaaaatttattttaacttgacagtatgtttttagttcccccaatttaattaatggaccatgtgcatatatatgggagtgtgcttacatgttaataatttacttgcatacttatgagaatttcacattggaattcataatggtaaaacaacatacatctgccaatatacgttttttctgttggtttaagagaagataactgacagctttacctacttcctacagatgcatctaaacccagatattactgagaagagtgtattgactctgagtgtaagagagtatgtgnnnnnnnnnnnnnagttctgctctagatcataattgtaaaaaatattaagtcataatctgttacactaaaatttgtcagccaaatgttagatgaaatgtctgcactgtagtctcagatcactgtcacgtatataaattgcttcttcattttaatttgtagaagtactttacagtaggaaacgccagtaaacaacttttatactgttaaaaggcttttttccccttcctaaatgttttaattgtaccatagtgttttgctcactgaagaagcttcttatggaccttgcaactttgttgctagcttgaggttgattattgtggttgtattgttcactgtgtgtagaaatagtatgagtacgatttcaatagactgttcagtttttaatattagccatagcactggttagtatatctcagtagtttcatgaaacgtttcctgtattctaatctattttgaaacannnnnnnnnnnnnnnaattgtgtcttacagtcaagtttgtagattttcataagccacaattttaaaagatgcagtaatcttccaacttccaatatttatccattcgttgtggacccacagattgcatctttaaattcataataagtttccttaactatcttatgtttctagtctttcaagcttagtgataaggtggaagcacaagaaaaaatttcagtagaatacagtttttattttgtaaacactaatgtattaaacttgctatacaattaaagcaaataaaatatattttttatttgaaatgaatatgtgaattggaagtaatatttagtttgatttttttcattttgttagagg

SEQ ID NO: 186214 - DNA, 648 bp, Homo Sapiens
  misc_feature (111)..(124): n is a, c, g, or t
ttggtacgatttcaatagactgttcagtttttaatattagccatagcactggttagtatatctcagtagtttcatgaaacgtttcctgtattctaatctattttgaaacannnnnnnnnnnnnnaattgtgtcttacagtcaagtttgtagattttcataagccacaattttaaaagatgcagtaatcttccaacttccaatatttatccattcgttgtggacccacagattgcatctttaaattcataataagtttccttaactatcttatgtttctagtctttcaagcttagtgataaggtggaagcacaagaaaaatttcagtagaatacagtttttattttgtaaacactaatgtattaaacttgctatacattaaagcaaataatatatatttttatttgaattgtatatgtgaattggaagttataattagttgattttttcattttgttagaggtattttcactgaacaaggtcaattggttacctcagtattacagccaatatagtccaagggaccatttctccccgagtctcttacactttattgtgcgatgtccacgtttttgtgactcttcaagctgttggtgaggtgggacgaatgcacttgcttcctgtggcaataaagattttctgtgcctcac

SEQ ID NO: 186215 - DNA, 1901 bp, Homo Sapiens
ttggcgatgatcttcaaggagtcatcccccagccacccaactcgttgccacgaagacaatgtggtagtggctgtggatagtaccacaaacagggttctccattttcagaagacccagggtctccggcgttttgcatttcctctgagcctgtttcagggcagtagtgatggagtggaggttcgatatgatttactggattgtcatatcagcatctgttctcctcaggtggcacaactctttacagacaactttgactaccaaactcgagatgactttgtgcgaggtctcttagtgaatgaggaggtgagaaaagtcttccaatgcctctttaggagagaggagaaggctatgattgtatctcatgctgatcctagggaaccagatccacatgcacgtaacagctaaggaatatggtgcccgtgtctccaacctacacatgtactcagctgtctgtgctgacgtcatccgccgatgggtctaccctctcaccccagaggcgaacttcactgacagcaccacccagagctgcactcattcccggcacaacatctaccgagggcctgaggtcagcctgggccatggcagcatcctagaggaaaatgtgctcctgggctctggcactgtcattggcagcaattgctttatcaccaacagtgtcattggccccggctgccacattggtgataacgtggtgctggaccagacctacctgtggcagggtgttcgagtggcggctggagcacagatccatcagtctctgctttgtgacaatgctgaggtcaaggaacgagtgacactgaaaccacgctctgtcctcacttcccaggtggtcgtgggcccaaatatcacgctgcctgagggctcggtgatctctttgcaccctccagatgcagaggaagatgaagatgatggcgagttcagtgatgattctggggctgaccaagaaaaggacaaagtgaagatgaaaggttacaatccagcagaagtaggagctgctggcaagggctacctctggaaagctgcaggcatgaacatggaggaagaggaggaactgcagcagaatctgtggggactcaagatcaacatggaagaagagagtgaaagtgaaagtgagcaaagtatggattctgaggagccggacagccggggaggctcccctcagatggatgacatcaaagtgttccagaatgaagttttaggaacactacagcggggcaaagaggagaacatttcttgtgacaatctcgtcctggaaatcaactctctcaagtatgcctataacgtaagtctaaaggaggtgatgcaggtactgagccacgtggtcctggagttccccctgcaacagatggattccccgcttgactcaagccgctactgtgccctgctgcttcctctgctaaaggcctggagccctgtttttaggaactacataaagcgcgcagccgaccatttggaagcgttagcagccattgaggacttcttcctagagcatgaagctcttggtatttccatggccaaggtactgatggctttctaccagctggagatcctggctgaggaaacaattctgagctggttcagccaaagagatacaactgacaagggccagcagttgcgcaagaatcaacagctgcagaggttcatccagtggctaaaagaggcagaagaggagtcatctgaagatgactgaagtcacactgcctgctcctttgggtgtgattgagtgccctcctggctcctgggctgggacaagtgaggaactagctgcagagggatgagtgaccaccatccaggctgagactgaaaggagcagaggctggaactacagtattctttcccctgctagcaccatgtgcctcccatcctgactgtggagttgggatgtggaagtggggctggaa

SEQ ID NO: 186216 - DNA, 1870 bp, Homo Sapiens
gacttggtttctaaaatgtaccagaagaggtggaattatttggttctgcttgtaggcgtggatatgattctaataaggttttttgagttcagagggtccccagaaatcctgaaggttctcgggttcttaagctctgtgtgtagtctataattgttgtaaacttggtgaagtatcttctcaggcctgggcttagggggtgagtgggtgtttctggtgacttgcgggatggggaatgagagctaggtgggagctgtgctggtgtcagtcagccctgtcctctatgaagggctctgctctgcggttggaaccctgagttacccagaggtcttcccatcctgagccaggtgataacgtggtgctggaccagacctacctgtggcagggtgttcgagtggcggctggagcacagatccatcagtctctgctttgtgacaatgctgaggtcaaggaacgagtgacactgaaaccacgctctgtcctcacttcccaggtggtcgtgggcccaaatatcacgctgcctgagggctcggtgatctctttgcaccctccagatgcagaggaagatgaagatgatggcgagttcagtgatgattctggggctgaccaagaaaaggacaaagtgaagatgaaaggttacaatccagcagaagtaggagctgctggcaagggctacctctggaaagctgcaggcatgaacatggaggaagaggaggaactgcagcagaatctgtggggactcaagatcaacatggaagaagagagtgaaagtgaaagtgagcaaagtatggattctgaggagccggacagccggggaggctcccctcagatggatgacatcaaagtgttccagaatgaagttttaggaaacactacagcggggcaaagaggagaacatttcttgtgacaatctcgtccctggaaatcaactctctcaagtaagagcagcccctccctgttctcctcggggtgatcccgggaaggtagagggctttctcgtagtgttttgtctccaaataggaacctattccttcgacatcccaaatggaaagaccagtagtatttggagcaaggagagcattattaagttctagcctcagcatagactttctccttcctaaaccctccccttccatattgttccatccagattcctctccaatgtctatcaaagtcatagttctaagcctgctgaaaggccagtgaaggccctggtgtcaccccagtctccccacaggtatgcctataacataagtctaaaggaggtgatgcaggtactgagccacgtggtcctggagttccccctgcaacagatggattccccgcttgactcaagccgctactgtgccctgctgcttcctctgctaaaggcctggagccctgtttttaggaactacataaagcgcgcagccgaccatttggaagcgttagcagccattgaggacttcttcctagagcatgaagctcttggtatttccatggccaaggtactgatggctttctaccagctggagatcctggctgaggaaacaattctgagctggttcagccaaagagatacaactgacaagggccagcagttgcgcaagaatcaacagctgcagaggttcatccagtggctaaaagaggcagaagaggagtcatctgaagatgactgaagtcacactgcctgctcctttgggtgtgattgagtgccctcctggctcctgggctgggacaagtgaggaactagctgcagagggatgagtgaccaccatccaggctgagactgaaaggagcagaggctggaactacagtattctttcccctgctagcaaccatgtgcctcccatcctgactgtggagttgggatgtggaagtggggctggaacaa

SEQ ID NO: 186217 - DNA, 1290 bp, Homo Sapiens
ttgggaccgtgagagaagaagatggcggcccctgtagtggcgccgcctggtgtggtggttagtcgggctaacaagcgcagcggcgcggggccgggaggcagcggtggcgggggagccagaggggcggaggaggaaccgccgccgcccctacaagcagttctggtggccgatagcttcgatcgccgcttcttccccatctccaaggaccagcctcgggtcctcttgcccctggccaatgtggcattaattgactacactctggaattcctgactgccacaggtgtacaggaaacatttgtcttttgttgctggaaagctgctcaaatcaaagaacatttactgaagtcaaagtggtgccgccctacatctctcaatgtggttcgaataattacatcagagctctatcgatcactgggagatgtcctccgtgatgttgatgccaaggctttggtgcgctctgactttcttctggtgtatggggatgtcatctcaaacatcaatatcaccagagcccttgaggaacacaggttgagacggaagctagaaaaaaatgtttctgtgatgacgatgatcttcaaggagtcatcccccagccacccaactcgttgccacgaagacaatgtggtagtggctgtggatagtaccacaaacagggttctccattttcagaagacccagggtctccggcgttttgcatttcctctgagcctgtttcagggcagtagtgatggagtggaggttcgatatgatttactggattgtcatatcagcatctgttctcctcaggtggcacaactctttacagacaactttgactaccaaactcgagatgactttgtgcgaggtctcttagtgaatgaggagatcctagggaaccagatccacatgcacgtaacagctaaggaatatggtgcccgtgtctccaacctacacatgtactcagctgtctgtgctgacgtcatccgccgatgggtctaccctctcaccccagaggcgaacttcactgacagcaccacccagagctgcactcattcccggcacaacatctaccgagggcctgaggtcagcctgggccatggcagcatcctagaggaaaatgtgctcctgggctctggcactgtcattggcagcaattgctttatcaccaacagtgtcattggccccggctgccacattggtgataacgtggtgctggaccagacctacctgtggcagggtgttcgagtggcggctggagcacagatccatcagtctctgctttgtgacaatgctgaggtcagggaacgagtg

SEQ ID NO: 186218 - DNA, 2448 bp, Homo Sapiens
ttggcttcacaagtacttgccagtttttaatttatttgtgacttttcaccctaccctgctcccatataccttctaccatcagctgtcttgtttcatcatttctctgagattctgtgtgcagtgagcaatttttgtgtcagaaattctttgtcagaacaaatatatgtaacaggctcaacttactgtaaagctacttgtgttctcttcatttgtctgtaaaaatttccctaattgattatatagtgtaagaatagttgaagactagttgaagaccttttgtgatttcattatcatgcctatgcagaagaaaaatcattgaggaaaattgtcattagccagtttaactgattcaaactctgtttatttcatactaaactagtgaataagtgaaataaaggaaactcgtcattaatctaaagacagagttcaaaggaattgggccaaatatattctcagtatttggaactaatgtttttaaggtttttaggaaaatcaggtcatttaagaaattgttttgtagtttctggtttatagcagtcttcaagttttccatcttcactgtatgttgctgaaagtgaggatgaggatacagagttgatatttttagaaacagtaattttacttttaaggaaattggctagctctttgagctagagagctgtaggaagctcaacatttctttgtagagaacgttgctttttttggattgtacaggtataaaaacattgcttttgttgaattgtataggtgtaaaaagggaataactgtatgcaggtttgaaaaggaaatgtgctttaggcatgagtcataagatgccattgtacttgtaggcattttattttcctttagaaatggacatcagctcttctcttctgactggtaacacatagccccaaagcatgagattatttttcattgggtttttattgttgtttagttttggtttgttacgccagcccagtctgtctgcggaacactgactctgctctctaatgagaacaaagttagaaatctgccgataacctaaaataatttagaaatgaattaaaaatgtgaaatcgggttaaagtgatgatgataaaatagcatgcaagaaacaagctccttccatcagacttggctactgttttcttctggtacgatttggtttggaagagcctcttgtttccttctctttggggtatgtcttcgtttcttaatatgtttgtaacattattgagatataattcacataccttacaattcacttattttaagggtacaatttagtggtttttagtgtattcacaaagttgtgtaaccgtgaccacagtcaattttagaacatttcgttaccccaaaaagaaaccctgtacccttgagcagtcacctctcattttctcccagtgcccaccccatccccgagcccctggcaaccactaatctatttctctctctgtagatttgcttattctggtcatttcatataaatggaattctacaatattcggtcttttgggactggcttcccaaatatgattttctatatggagtgagaaaattcttctcatcttgagaactcttattgctgtgaaagggagtggttggtaaaatcaatagatttcaggcaagagggccagatacctaacaggtttttctccgtgaatcttatgctgagtagtttttcctcataaccaagcatttatgatatattactacttataatactgtggctagtctctagaatggatgttgaaatctttgcctcctcagtcgggaagagtcctgctaaaaatcaggctaaaaatcaggccaaaaatcaggccaaatgacttggcaaataattgacaaagtggttttcacgtgtgtctatctttgctagcagcttgtatacctcaggccaggtgagctccccaaatttcttttttcatttactccagtgagtttctgctgtctttttcaagtatgtaccataggacttaaaggtgatttggatgcgttgtaacactgctaaatatgctaagtacagaattttatctacagtactgtgagacagtcaattattgcctagggtagttcaaaaatatgatgtgagctagttaagcctttgcttgactgatttcagtgatattcagaagtgtgtaccaatcaaggctctttaaaatacggaacgactcacttaataaccagggaaccagccaaatactgtgcagccgcagaatatgcatatcaatgagttggaggtgattattctctgtaactccctaatgattgttttctaagcattgtggcttctcagtggcttgacagcatcttcctggttgtatgtggcctgtttacatgatgtattgaataatgttgtttgttgtgagcatcaatgcctgtaacaccaaactaaacacgtgtttttgggatatgtttccaatctttaaatgaccttgccctgtccaataaataaatgattgtctc

SEQ ID NO: 186219 - DNA, 967 bp, Homo Sapiens
ttggcaagattttccatactaaacatcacatgtgtttttcagtatctctgcaatccagtatgcattccaaatgaaatgtgtaacatttaaagtagcatggaacctacgtctttccctactgcttgctggcatatatcagttggtatgaacattgttcttgagctgcctcttaggaaacagaagacagtgttgaagttttccctgcttctggtttgctgaagattttctagactgcttctggtttgctgaagattttctagaagcactatttacacaaatatgcaaatgtgaaataaccgatctataacgtgaaggaggcagacatgagctgtactactcagtatgcaccacagaataagagtttgccgtgtaaagacaatatccccattcgtcatgctcttattttcccgtgggatatttgcatacaaatgcatgtctgttaccaaaatattgtgtaacacagacagaaaccacctgtttttgtctttccttgtttcccttaatatttcatgaattgtctagcaaaaatggtaggatgcttctgtagttcacaaatgttacatttcagagactttagaggaaaaattattttaaataactgtcaactgtttcattgctttttaaatttttcacgtgcataaccccctttagaagtaaatttttacactattttgttgtttaaaggaggcatttctacttccttgagttttgctgttgccaacctaaaacatttccctttggaacatgagttataagttattacttttcctttacatgtttacacttttataaaaatcagatttttcagtggtctctccagatattaacaagaattgttgtgtaactcaaagatttgcttttatagacttgatttcaaattcttaagttcagcctttccctatcaatcacaaatcatgtattggaaattataaatggcaacaaaaactggcttttaaaaaatattttt

SEQ ID NO: 186220 - DNA, 1155 bp, Homo Sapiens
ttgggttaaaagttttttggtaagtaccttcattacagcagattatataatttctcttaaacctttttgttctccacttcgccatttcagcacccaactcaatgttcggccacaaggatggccccagtgtgcagaactttagcaaccctcacgaaccctggaaccggctgcaccgaacgcctccgtcgttcccgacccctccgccctggctgaagccaggggagctggagcgcagcgcgtccgctgcagctcatgacagagatagagatgtagataaacgagactcatctgttagtaaagatgacaaagaaagggaaagcgtcgagaagagacactccagccacccttcaccagcacctgtcctcccggtgaatgccctgggacatacccgcagctccactgaacagatccgggctcatctgaacactgaggctcgggagaaggacaaacccaaagagagggagagagaccactcggaatcccgcaaggacctggccgccgacgagcacaaggcgaaagagggccacctgcccgagaaggacgggcacggccacgaggggcgcgccgcgggcgaagaggccaagcagctggcccgggtgccgtctccctacgtgcggaccccggtggtggagagtgccaggcccaacagcacctcgagccgggaggccgagccgcgcaagggtgagccggcctacgagaaccccaagaagagctccgaggtcaaggtgaaggaggagcggaaggaagaccatgacctgcctccagaggccccgcagacccaccgggcctcggagccgccgcctcccaactcctcgtccagcgtgcacccggggcccctggcctcgatgcccatgacggtgggggtgacgggcattcaccccatgaacagcatcagcagcctggacaggactcgcatgatgacccccttcatgggcatcagccccctcccgggcggagagcgcttcccgtacccttctttccactgggaccccatccgggaccccttgagggatccttaccgagaacttgacattcaccggagagacccgctgggcagggacttcctgctaaggaacgacccgctccaccggctctcgactccccggctgtacgaagccgaccgctccttcaagaccgggagcctcacgactacag

SEQ ID NO: 186221 - DNA, 659 bp, Homo Sapiens
caactttgtacaaaaaagttggagcctcccccctccatccagcccggaagggagggttcagaaagaggaatgaagatgttgtatgacaagaaggaaagttactgagaacaaaaacccagattggtgagataggacacttgtgcagcagatatgccaatgggccatgtttattgtggattggtaagaatcaccaggaaaccattaagccccaatagctacaaggagggtggttaatctgctatatcaaactccttccctgaaaccagcaaacaccgggaaacattttggctcattataatccggtgaacaatgcagtcaggcctgttataaccgctgagcagccacactcgcacctcctgggtgctgtagtctgtgttggtacaggcttctgcatgcctggtaaagtccagccaaggctggtcaaggcaacatctccacacagaaaatctgcaccagttatgtaagctaaaaagctgtgtgaacccaggtgtcccggaaaggggctgcaggacacagcaaaatgccagcagcatgccggacccctcccttccatcctcctctccaaagaagagaggtcaggaaaaacactggctgggacgctagaagggtcatgtgttaactataatcacatttatggtttggaaccatcaccccaaggt

SEQ ID NO: 186222 - DNA, 1427 bp, Homo Sapiens
  misc_feature (239)..(248): n is a, c, g, or t
  misc_feature (534)..(543): n is a, c, g, or t
  misc_feature (1008)..(1031): n is a, c, g, or t
  misc_feature (1313)..(1350): n is a, c, g, or t
gattccaaaaatgtttgaagatgcattttctttccttcaatttcagtatctaaaatgtgctttttcagaggccatttggtcaatatgtacgcatttaaaataaaccatataattttaccagtaagaaagccgatagttaagttcaattcaaattggagttcataagttagtaatttaaatccttagacaaagttacagaaagtgcatcttcttattttccatcttcatacaatgttaannnnnnnnnnggtgtttataccttttaaaaaataaaaacagccaaatacttaagcaatatgtacatttaaatttttggtggtggtttgtgttttaaaagaaacagcttccttacgatttgcctcaagttctggtggaaatgcttacaggaactagctaataaacaaaaaacaagagaagcacattcaaaatactgatttactttggtagcaaatggtttttctttgaagactaatgaagatagacaagacccattaaggtgaagtggactatttcaaatattcaacagtttacatnnnnnnnnnntcttttaagagctaagcgtctgtatccacggatagcaatgcaatacctagtttatgatgacttgaaacaaaacaaatgcccataaggaaaaaagctgtattttatctaaatttactttcagtcaatagttcagtaacattttcttcccaatacaatactccctctctctataaggctgttcctgggagccagacaagtttaggtaataagggagttaagagagttaactgcttgcagttttaaatagacagtaactttgcttccctcttaatgtgctaatagttgtgtctaaaaaaatatgcaattcttaaaaaggtaccatttctgatttctttattatctgtaacctttggaaactaatcacatgaaactacaaaattagcaaatgtcttgaaatctgtatataaaacataaattacctctaatttcaaactctcatttattagtgtaccactcaatcttttnnnnnnnnnnnnnnnnnnnnnnnngcggctccaaagatagtcttataccattctttaaaaaaggaaactgttccttttaactttacacccaccccacaccccaatttcaaaacatcatttaattgtcttggtcatggacatttccaagatgagattttatatttcgctcccacagcttctggttatcagaaaacccatgctttcctttattgaaggagtttggtccagctgatgttggtgtatccctgtgttaaaagaaagaaaatttatttaaaatgttatataaagcctttcaggttatgattnnnnnnnnnnnnnnnnnnnnnnnnnnnnnnnnnnnnnnaaacacagactgaacactggaaggccctacagagctttttaaaaatacatttcacaggccaggcatggtgctgatac

SEQ ID NO: 186223 - DNA, 1579 bp, Homo Sapiens
  misc_feature (119)..(129): n is a, c, g, or t
  misc_feature (1346)..(1369): n is a, c, g, or t
ttggcaaaattagcaagacattttgccttccaaacctacatatgtatgccttctactgtttgaaattatgattagctcatctttcatgaaaaaaactaacatataaaccaaagtatgannnnnnnnnnnaaatagctcttatgggtagcttaaaacaggtaataaccaaattgtcagagtagaattaaatttctcaagagggaatgaccttgaagttccttttcaactcctaagattgtgtgagatgtacgtgaggaacacatcactcaaggaaataactgggctgtattaacactgtcatttgggtaataatgggcctgtttataactaggtactttgtatgattattacattactgaagaatattaaaatttattagccaagtgtattattttaccgtgtgaccaattgctcacaaactactaagtgtaaaagatgttagatagatctgatttctaaaaagcaaaatcccacaaataaccagattattgtacaaattgtagtgtttagttgaagggtcttgactttttgtgaactctgtgtttataattttaaattgctctgtattttatgctagttaattcatgggagcctcttctactgccacacaatctcagttcctgctgtatactctaacaaacagtggaagagactgttgggtcagtaggtgacaactgcagaggtatcttccttataacgatgctttttgaggttgctgctcccatcaatctgctcagtaaaaatagctcatcttggtaagttgtttcgacttcaccaggacctgaagaagaagcagaaaaacctgtgaaaactaagactgtttcttccagtaatggaggggaaagttccagtcgcagcgctgagaagcgatcagctgaagaagaagctgccgacctcccaacaaagcctacaaagatctccaagtttggatttgccataggtagtcagacgacaaagaaagcatcagccatatccatcaaacttggatcaagtaagcctaaagaaactgttccaactcttgctccaaaaactctttcagtagcagcagcttttaatgaagatgaagatagtgaaccagaggaaatgcctccagaagcaaagatgaggatgaagaatattggaagggatacaccaacatcagctggaccaaactccttcaataaaggaaagcatgggttttctgataaccagaagctgtgggagcgaaatataaaatctcatcttggaaatgtccatgaccaagacaattaaatgatgttttgaaattggggtgtggggtgggtgtaaagttaaaaggaacagtttccttttttaaagaatggtataagactatctttggagccgcnnnnnnnnnnnnnnnnnnnnnnnnaaaagattgagtggtacactaataaatgagagtttgaaattagaggtaatttatgttttatatacagatttcaagacatttgctaattttgtagtttcatgtgattagtttccaaagggttacagataataagaaatcagaaatggtacctttttagattgcatattttttttagacacactattagcacattaggagggaagcaaagtt

SEQ ID NO: 186224 - DNA, 846 bp, Homo Sapiens
  misc_feature (42)..(51): n is a, c, g, or t
ttggatttggctgtttttattttttaaaaggtataaacaccnnnnnnnnnnttaacattgtatgaagatggaaaataagaagatgcactttctgtaactttgtctaaggatttaaattactaacttatgaactccaatttgaattgaacttaactatcggctttcttactggtaaaattatatggtttattttaaatgcgtacatattgaccaatggcctctgaaaaagcacattttagatactgaaattgaaggaaagaaaatgcatcttcaaacattttttggaatctcaccacatatactttgttagatttgtgtattgtagggtgtttgttttgtatttttgtattgtatatgaactttttttaaatgtgacagttaaacacatctttaaaagcatagtcacagacaaaagcatacagtataaaaatttccttgaaaactcctacaatattatatttggaggcagcttcagactgttttattggtggtagctgcttgctgaggtcttttagttggtaataactccagagaagcagcctgtgtatattcctaacactttgttcactagcatttaagtttagaataagcccaagtaagacaatggaaatgtatatagaactcttagttcttacatgatttaattatatcgatacatgaatttaacttactttaatgtaggcaaactatcaattttttgtccattttcctgtttgttaaaataacatacctctcctacgtattattttcttgacccaaatgaaatattaacctaaggtcaagctgggagagagaaatgactgagatgaatgtctttactaaagtaccaataaatttgtcaaactc

SEQ ID NO: 186225 - DNA, 1731 bp, Homo Sapiens
ttggccatgggcttgatttgagtacctattgccaggaagataggcagctcatctgtgtcctgtgtccagtcattggggctcaccagggccaccaactctccaccctagacgaagcctttgaagaattaagaagcaaagactcaggtggactgaaggccgctatgatcgaattggtggaaaggttgaagttcaagagctcagaccctaaagtaactcgggaccaaatgaagatgtttatacagcaggaatttaagaaagttcagaaagtgattgctgatgaggagcagaaggcccttcatctagtggacatccaagaggcaatggccacagctcatgtgactgagatactggcagacatccaatcccacatggataggttgatgactcagatggcccaagccaaggaacaacttgatacctctaatgaatcagctgagccaaaggcagagggcgatgaggaaggacccagtggtgccagtgaagaagaggacacatgaaggcttgctacccccagtggaaaatcatcccctccccttgtgtgtatgtgacagcgtgtatgtaacggcttctgatttctgtgaaagctgctcagcaacaaacgtacttccaccagatgtgtccccagatccacagcaggcacatatctctccaagggatgaccagttttatgcttactgtgtgcttctcatcccctggttgtggtaggtcaaggaaaagagcctctttgatccaccaggagcaattaagaaaggtccttcagtaatccctcaatggctgctttgaacttactcaggaaagccagcccccataatattgtattaccaaacagtatcgctttgttaggaaggatctggaataatcttgaagggaagtcagagttttctccctgcctattaacaaaaacccaattttgttcatattgaagcatgaaataaatgagagcaaggtagggccaaattaactcttgtggacagtccctaaaagtccagttctacatttgtgaaaattgtggtgccatgaattaagatggatgactggaaaaaggtgttggagaaagagttaaagatgaggaagagatatttttagtatatgaagttatccaggacttgatattcataattcagtgctgtggaaatgaaaaaaatgattgaagaggtggaacggaaatgaccttagggggaaaaaaaaggaccaaagaagtctgattaaaagttgaaatcagtatttctgaattcaaattgcttgaatttccaaaatagtcagtaaaggatctaatagaaccagaattatttgggtgaattctgcaggttttatgggcttgtcacaacgtgaagggctggaatgtatattaccaaatgggaatttccattgtaggtttttgctagtcccacccccattttagcctaatttggcttaaacgcagtatggggagaattgttcccattccatgtgttctgaattcagctcatctcccagcatatagatatatcctcctttaactccgaccagaacccttcttcctgtggcactccccacccatagaccttcagatcatctcccacaccctggatctcactctcctcttagtaacagagacactcctgaggttggacttccttgcttttctctacttccaaatcacaatttcttacaaccaagctttgtgctcccggagtaagcagggatgtactacggggaatgtaaaactgcaaccttaaaaaccttgcatct

SEQ ID NO: 186226 - DNA, 2298 bp, Homo Sapiens
ttggggaagaggtggccataccgttgaccgctcctccaactaaccagtaagttaagactgctgttcaggaatttgggaagctggctccagaaaagaagtggaaatgaaggggtggtatcacggaaaacttgacagaacgatagcagaagaacgcctcaggcaggcagggaagtctggcagttatcttataagagagagtgatcggaggccagggtcctttgtactttcatttcttagccagatgaatgttgtcaaccattttaggattattgctatgtgtggagattactacattggtggaagacgtttttcttcactgtcagacctaataggttattacagtcatgtttcttgtttgcttaaaggagaaaaattactttacccagttgcaccaccagagccagtagaagatagaaggcgtgtacgagctattctaccttacacaaaagtaccagacactgatgaaataagtttcttaaaaggagatatgttcattgttcataatgaattagaagatggatggatgtgggttacaaatttaagaacagatgaacaaggccttattgttgaagacctagtagaagaggtgggccgggaagaagatccacatgaaggaaaaatatggttccatgggaagatttccaaacaggaagcttataatttactaatgacagttggtcaagtctgcagttttcttgtgaggccctcagataatactcctggcgattattcactttatttccggaccaatgaaaatattcagcgatttaaaatatgtccaacgccaaacaatcagtttatgatgggaggccggtattataacagcattggggacatcatagatcactatcgaaaagaacagattgttgaaggatattatcttaaggaacctgtaccaatgcaggatcaagaacaagtactcaatgacacagtggatggcaaggaaatctataataccatccgtcgtaaaacaaaggatgccttttataaaaacattgttaagaaaggttatcttctgaaaaagggcaaaggaaaacgttggaaaaatttatattttatcttagagggtagtgatgcccaacttatttattttgaaagcgaaaaacgagctaccaaaccaaaaggattaatagatctcagtgtatgttctgtctatgtcgttcatgatagtctctttggcaggccaaactgttttcagatagtagttcagcactttagtgaagaacattacatcttttactttgcaggagaaactccagaacaagcagaggattggatgaaaggtctgcaggcattttgcaatttacggaaaagtagtccagggacatccaataaacgccttcgtcaggtcagcagccttgttttacatattgaagaagcccataaactcccagtaaaacattttactaatccatattgtaacatctacctgaatagtgtccaagtagcaaaaactcatgcaagggaagggcaaaacccagtatggtcagaagagtttgtctttgatgatcttcctcctgacatcaatagatttgaaataactcttagtaataaaacaaagaaaagcaaagatcctgatatcttatttatgcgctgccagttgagccgattacagaaagggcatgccacagatgaatggtttctgctcagctcccatataccattaaaaggtattgaaccagggtccctgcgtgttcgagcacgatactctatggaaaaaatcatgccagaagaagagtacagtgaatttaaagagcttatactgcaaaaggaacttcatgtagtctatgctttatcacatgtatgtggacaagaccgaacactactggccagcatcctactgaggatttttcttcacgaaaagcttgaatcgttgttgttatgcacactaaatgacagagaaataagcatggaagatgaagccactaccctatttcgagccacaacacttgcaagcaccttgatggagcagtatatgaaagccactgctacacagtttgttcatcatgctttgaaagactctattttaaagataatggaaagcaagcagtcttgtgagttaagtccatcaaagttagaaaaaaatgaagatgtgaacactaatttaacacacctattgaacatactttcagagcttgtggagaaaatattcatggcttcagaaatacttccaccgacattgagatatatttatgggtgtttacagaaatctgttcagcataagtggcctacaaataccaccatgagaacaagagttgttagtggttttgtttttcttcgactcatctgtcctgccat

SEQ ID NO: 186227 - DNA, 1692 bp, Homo Sapiens
ctttgtacaaaaaagttggagagtttgtctttgatgatcttcctcctgacatcaatagatttgaaataactcttagtaataaaacaaagaaaagcaaagatcctgatatcttatttatgcgctgccagttgagccgattacagaaagggcatgccacagatgaatggtttctgctcagctcccatataccattaaaaggtattgaaccagggtccctgcgtgttcgagcacgatactctatggaaaaaatcatgccagaagaagagtacagtgaatttaaagagcttatactgcaaaaggaacttcatgtagtctatgctttatcacatgtatgtggacaagaccgaacactactggccagcatcctactgaggatttttcttcacgaaaagcttgaatcgttgttgttatgcacactaaatgacagagaaataagcatggaagatgaagccactaccctatttcgagccacaacacttgcaagcaccttgatggagcagtatatgaaagccactgctacacagtttgttcatcatgctttgaaagactctattttaaagataatggaaagcaagcagtcttgtgagttaagtccatcaaagttagaaaaaaatgaagatgtgaacactaatttaacacacctattgaacatactttcagagcttgtggagaaaatattcatggcttcagaaatacttccaccgacattgagatatatttatgggtgtttacagaaatctgttcagcataagtggcctacaaataccaccatgagaacaagagttgttagtggttttgtttttcttcgactcatctgtcctgccatcctgaatccacggatgttcaatatcatctcagattctccatctcctattgctgcaagaacactgatattagtggctaaatctgtgcagaacttagcaaatcttgtggaatttggagctaaggagccctacatggaaggtgtcaatccattcatcaaaagcaacaaacatcgtatgatcatgtttttagatgaacttgggaatgtacctgaacttccggacactacagagcattctagaacggacctgtcccgtgatttagcagcattgcatgagatttgcgtggctcattcagatgaacttcgaacgctcagtaatgagcgtggtgcacagcagcacgtattgaaaaagcttctggctataacagaactgcttcaacaaaaacaaaaccagtatacaaaaaccaatgatgtcaggtagcagccttcgccccagtgttctgcatggattcagcatgtccaacatggtaattcacttcagtttaatgtctcctttgctcttgccaaaaaatagcacacttttccacattccagtgatgtgtgagctatgcaaacaaaatccaagattctgctggtgaataactatgccagcaaccttgtaagctatctgtgcaggatatttgcactatttccacatggaatcaatctttaacaacctctgagccttggtgtacagaccacctttcacaaaacgaaatgctatgactgtatcttgatatctcgaactttcaaaatatattttcagtacacccagttgcccaagttttgctgtctcttagagaaagaactatgaaatcaactgacaagaaacacattcttattgaccattgtgtataactgggattgcagactgttcttactgtaactac

SEQ ID NO: 186228 - DNA, 1693 bp, Homo Sapiens
ttggcttgacttgccttagatattaaataaaaaaagccttttttaaaagagagataaactgcttctgacaacatgtgatagtgtgatagttctggcctaaaaaataggagcatgccaaacacaaacaaatttctgttcactttagggtataaaaattctcttagttatgaccagaaatactcagccaatgactgaataatagagacttatgttttgaggggaattgtggtaatattttatgcatccttttgctttgatacagtttttttcaaatccaggttcccatcctgaaattgctgaccgagctttcatttattttcataccatttttcctctgtctagcacgtattgaaaaagcttctggctataacagaactgcttcaacaaaaacaaaaccagtatacaaaaaccaatgatgtcaggtagcagccttcgccccagtgttctgcatggattcagcatgtccaacatggtaattcacttcagtttaatgtctcctttgctcttgccaaaaaatagcacacttttccacattccagtgatgtgtgagctatgcaaacaaaatccaagattctgctggtgaataactatgccagcaaccttgtaagctatctgtgcaggatatttgcactatttccacatggaatcaatctttaacaacctctgagccttggtgtacagaccacctttcacaaaacgaaatgctatgactgtatcttgatatctcgaactttcaaaatatattttcagtacacccagttgccaaagttttgctgtctcttagagaaagaactatgaaatcaactgacaagaaacacattcttattgacaattgtgtataactggattgcagactgttcttactgtaactacttcctgattaggaatatgaccatttgactgttcaatgattatttgtatttacagtttccagagtttgtcattataataggaacaatctttgctgtatacttttaaaaaatactctgctatttctcttgctggaactgttgaaagaaaatatatagaatgatctattgctcatcagctttattttttaaacatacgacttattttgttgaaattgtcaaagactgtatttagatctcataatgctttgttaaatgtttacaagtaaatagtttgaattcagtaaatattattggttgttgtattgatcaatgcatgttacccattcaaccattttatagactaccaatttcttttatgttaactagaatgcttttgttaaaagttatttgttcattatttgtgctacccctttgattatgcagacaacctcatcagctgcctaacttatccatctttgaacttctgactacttgttgtatctgctggatatttagttcaactgtatagttttatttacttctgtatgtgtatttttgtgaagtattcacaaaggttaagttaaaataaaaccaagggatatcttgcataattgattacttctgtctaaaagagctaagcatttaatttatttattttcttcctccttcaggggcagtttaaaccttagcatcagagcaaggcccagggagaagctgaagctttagattagtatttttgctaatggcctcttttgaaaaggattttataaatgcaataattccttccctctcataattgtgcagggcagatagataggacatatggaacatacgtggcagaa

SEQ ID NO: 186229 - DNA, 2184 bp, Homo Sapiens
  misc_feature (1931)..(1943): n is a, c, g, or t
ttggctcacgagaaagctgatcaagaaggcggaccagaagggagtgaccatcatcggacctgccactgttggaggcatcaagcctgggtgctttaagattggcaacacaggtgggatgctggacaacatcctggcctccaaactgtaccgcccaggcagcgtggcctatgtctcacgttccggaggcatgtccaacgagctcaacaatatcatctctcggaccacggatggcgtctatgagggcgtggccattggtggggacaggtacccgggctccacattcatggatcatgtgttacgctatcaggacactccaggagtcaaaatgattgtggttcttggagagattgggggcactgaggaatataagatttgccggggcatcaaggagggccgcctcactaagcccatcgtctgctggtgcatcgggacgtgtgccaccatgttctcctctgaggtccagtttggccatgctggagcttgtgccaaccaggcttctgaaactgcagtagccaagaaccaggctttgaaggaagcaggagtgtttgtgccccggagctttgatgagcttggagagatcatccagtctgtatacgaagatctcgtggccaatggagtcattgtacctgcccaggaggtgccgcccccaaccgtgcccatggactactcctgggccagggagcttggtttgatccgcaaacctgcctcgttcatgaccagcatctgcgatgagcgaggacaggagctcatctacgcgggcatgcccatcactgaggtcttcaaggaagagatgggcattggcggggtcctcggcctcctctggttccagaaaaggttgcctaagtactcttgccagttcattgagatgtgtctgatggtgacagctgatcacgggccagccgtctctggagcccacaacaccatcatttgtgcgcgagctgggaaagacctggtctccagcctcacctcggggctgctcaccatcggggatcggtttgggggtgccttggatgcagcagccaagatgttcagtaaagcctttgacagtggcattatccccatggagtttgggaacaagatgaagaaggaagggaagctgatcatgggcattggtcaccgagtgaagtcgataaacaacccagacatgcgagtgcagatcctcaaagattacgtcaggcagcacttccctgccactcctctgctcgattatgcactggaagtagagaagattaccacctcgaagaagccaaatcttatcctgaatgtagatggtctcatcggagtcgcatttgtagacatgcttagaaactgtgggtcctttactcgggaggaagctgatgaatatattgacattggagccctcaatggcatctttgtgctgggaaggagtatggggttcattggacactatcttgatcagaagaggctgaagcaggggctgtatcgtcatccgtgggatgatatttcatatgttcttccggaacacatgagcatgtaacagagccaggaaccctactgcagtaaactgaagacaagaactcttcccccaagaaaaagtgtacagacagctggcagtggagcctgctttatttagcaggggcctggaatgtaaacagccactggggtacaggcaccgaagaccaacatccacaggctaacaccccttcagtccacacaaagaagcttcatattttttttataagcatagaaataaaaaccaagccaatatttgtgactttgctctgctacctgctgtatttattatatggaagcatctaagtactgtcaggatggggtcttcctcattgtagggcgttaggatgttgctttctttttccattagttaaacatttttttctcctttggaggaagggaatgaaacatttatggcctcaagatactatacatttaaagcaccccaatgtctctcnnnnnnnnnnnnnacttccctttcttcttccttatataacatgaagaacattgtattaatctgatttttaaagatctttttgtatgttacgtgttaagggcttgtttgggtatcccactgaaatgttctgtgttgcagaccagagtctgtttatgtcaaggggatggggccattgcatccttagccatttgtcacaaaatatgtggagtagtaactttaatatgtaaaggtgtaacatacatacatttaaaatg

SEQ ID NO: 186230 - DNA, 1924 bp, Homo Sapiens
tttgtacaaaaaagttgggtcaatgagctgaattggagaaaggcaacaaggccctgagcgtgggtaacatcgatgatgccttacagtgctactccgaagctattaagctggatccccacaaccacgtgctgtacagcaaccgttctgctgcctatgccaagaaaggagactaccagaaggcttatgaggatggctgcaagactgtcgacctaaagcctgactggggcaagggctattcacgaaaagcagcagctctagagttcttaaaccgctttgaagaagccaagcgaacctatgaggagggcttaaaacacgaggcaaataaccctcaactgaaagagggtttacagaatatggaggccaggttggcagagagaaaattcatgaaccctttcaacatgcctaatctgtatcagaagttggagagtgatcccaggacaaggacactactcagtgatcctacctaccgggagctgatagagcagctacgaaacaagccttctgacctgggcacgaaactacaagatccccggatcatgaccactctcagcgtcctccttggggtcgatctgggcagtatggatgaggaggaagagattgcaacacctccaccaccaccccctcccaaaaaggagaccaagccagagccaatggaagaagatcttccagagaataagaagcaggcactgaaagaaaaagagctggggaacgatgcctacaagaagaaagactttgacacagccttgaagcattacgacaaagccaaggagctggaccccactaacatgacttacattaccaatcaagcagcggtatactttgaaaagggcgactacaataagtgccgggagctttgtgagaaggccattgaagtggggagagaaaaccgagaagactatcgacagattgccaaagcatatgctcgaattggcaactcctacttcaaagaagaaaagtacaaggatgccatccatttctataacaagtctctggcagagcaccgaaccccagatgtgctcaagaaatgccagcaggcagagaaaatcctgaaggagcaagagcggctggcctacataaaccccgacctggctttggaggagaagaacaaaggcaacgagtgttttcagaaaggggactatccccaggccatgaagcattatacagaagccatcaaaaggaacccgaaagatgccaaattatacagcaatcgagctgcctgctacaccaaactcctggagttccagctggcactcaaggactgtgaggaatgtatccagctggagccgaccttcatcaagggttatacacggaaagccgctgcgctggaagcgatgaaggactacaccaaagccatggatgtgtaccagaaggcgctagacctggactccagctgtaaggaggcggcagacggctaccagcgctgtatgatggcgcagtacaaccggcacgacagccccgaagatgtgaagcgacgagccatggccgaccctgaggtgcagcatatcatgagtgacccagccatgcgccttatcctggaacagatgcagaaggacccccaggcactcagcgaacacttaaagaatcctgtaatagcacagaagatccagaagctgatggatgtgggtctgattgcaattcggtgatgacttgttcatccccccttcccttcgccctcatgtggaaagaggagctgggaccgcggcgagcagcacggagcggaagggagagcaggggagagaaggcctcatctctctatatttatacataaccccggggaagacacagagactcgtacctgcgctgtttgtgccgccgctgcctctgggccctcccagcacacgcatggtctcttcaccgctgccctcgagttccatgtctctttcccctgcccctagttgctgtctcggctgctctcccatagttg

SEQ ID NO: 186231 - DNA, 1102 bp, Homo Sapiens
  misc_feature (189)..(249): n is a, c, g, or t
ttggccggtcttgtatctccaggcggcggcggctcatggcggcgacggagctgagaggagtggtggggccaggcccggcagccattgcagcacttggcggcggcggcgccggtcccccagtggtgggaggaggcggcggccgcggagatgcggggccaggctccggggccgcgtcagggacggtggtcnnnnnnnnnnnnnnnnnnnnnnnnnnnnnnnnnnnnnnnnnnnnnnnnnnnnnnnnnnnnnctgcgccgccgactgggggctcgggcggctcgggcgctgggggttcgggctcggctcgagagggctggctcttcaaatggaccaattatatcaaaggctaccagcggcgatggttcgtgctgagcaacgggctcctgagctactacagatcaaaggcagaaatgagacatacctgccgtggtaccatcaacctcgccacagccaacatcaccgtggaggactcctgcaacttcatcatttccaatgggggtgctcagacctaccatctgaaagctagttcagaagttgagcggcagcgctgggtgacggccctggaactggccaaggccaaagctgtgaagatgctggcagagtcagatgaatcaggagatgaagagtctgtctcacaaactgacaagactgagctgcagaatacccttcggaccctctctagcaaagtagaggacttgagcacgtgcaatgacttgatagctaagcatggcacagctctgcagcgttctctcagtgagctggagtccctgaagttgcctgctgagagcaatgaaaagatcaaacaggtcaacgaacgagccacactctttaggataacatccaatgccatgatcaacgcctgcagagatttcctcatgttagcccagacccatagtaaaaaatggcaaaagtcactacagtatgaaagagaccagcgtatccgactggaagaaaccctcgagcagctggcgaagcagcataatcacctggagagggccttccgaggagccacggtgctgccggcaaacactcctggcaatgtgggttctggtaaagatcagtgctgctctggcaaaggggacatgagcgatgaagatgatga

SEQ ID NO: 186232 - DNA, 714 bp, Homo Sapiens
ctttgtacaaaaaagttggcgcccgagtcatgttccgcgatcttctcaggctctcctagcagcatccatcgccgccaccctatcttcactggcttcattcaccttctccttctctcttcgttgctgagcgacaagcttcctagcgctatgactgtcgtctccgtcccgcagcgggagccgctcgtcctgggtggccgccttgcgccgcttggcttttcctcccgaggttactttggggccctcccgatggtgaccacggctccgcctcctttaccccggatcccggacccccgggcactgcccccgaccctcttcctccctcatttcctagggggagatggcccgtgtctgaccccccagcctcgcgctccagcagctctgcccaaccgcagcctcgccgtggcgggaggcactcctcgggcagcgccgaagaagcggcgaaagaagaaggtgcgggccagccccgcagggcagctgcccagccgcttccaccagtaccagcagcaccggccgagtctggagggcggccggagccccgcgaccggcccgagcggagcgcaggaggtcccgggcccggccgccgccttggccccgagtcctgcagccgcagccggcacggagggagccagccccgaccttgccccgctgcggcccgcggctcccggccaaaccccccctcaggaaagaggtgaggcccgccagggggccgttggg

SEQ ID NO: 186233 - DNA, 938 bp, Homo Sapiens
ttggctcagggcatggggcgagtgcagctcttcgagatcagcctgagccacggccgcgtcgtctacagccccggggagccgttggctgggaccgtgcgcgtgcgcctgggggcaccgctgccgttccgagccatccgggtgacctgcataggttcctgcggggtctccaacaaggctaatgacacagcgtgggtagtggaggagggttacttcaacagttccctgtcgctggcagacaaggggagcctgcccgctggagagcacagcttccccttccagttcctgcttcctgccactgcacccacgtcctttgagggtcctttcgggaagatcgtgcaccaggtgagggccgccatccacacgccacggttttccaaggatcacaagtgcagcctcgtgttctatatcttgagccccttgaacctgaacagcatcccagacattgagcaacccaacgtggcctctgccaccaagaagttctcctacaagctggtgaagacgggcagcgtggtcctcacagccagcactgatctccgcggctatgtggtggggcaggcactgcagctgcatgccgacgttgagaaccagtcaggcaaggacaccagccctgtggtggccagtctgctgcagaaagtgtcctataaggccaagcgctggatccacgacgtacggaccattgcggaggtggagggtgcgggcgtcaaggcctggcggcgggcgcagtggcacgagcagatcctggtgcctgccttgccccagtcggccctgccgggctgcagcctcatccacatcgactactacttacaggtctctctgaaggcgccggaagctactgtgaccctcccggtcttcattggcaatattgctgtgaaccatgccccagtgagcccccggccaggcctggggctgcctcctggggccccacccctggtggtgcc

SEQ ID NO: 186234 - DNA, 2207 bp, Homo Sapiens
ggaaagctgggaatgctgacacccccagccttcttgtcctggtctcaaggggacagcccaagctggctacccctccccctggagggccctggcctcacccctcagcccctcagaggtcagcccttctcccatgaaggccactgggcagctcttgccaggcaatgaaggtccttggccagcctgagcacccagtgctgtcccggcccctgagcaagcagctgtgtgcgcagctgtggtgtggcaggtaccatcacctccacacaggaagagccgggacccgaccgggtgaggcaggggagggagggccgggcagtcgctgcactgcggcggcccgagcaccaccggacactccacacgcatgcggtgagggctgtcccggtccctgctcagctgtcctcacgctgcatcatgctggatgatcacagctggggctcagctgctcagggccatcgtgtccaccacctgctccagcttgctccgcagccgctgccgccgcgcctgctcatccttctccagggctgccaggatctcatccttgtacttggtgatgtaggagtagatctcgtgcaaggcgctcatgctgttgaactggctcaggtgcaggcgggactgctcagccagatacgcactcatgtcctggtcgctgatggctggcatcttggcgatgtctgcatagtacctctccacccagctcttgtagttggggatgtccttggcgtagagcagcttgttggagggtgagtccttgcccagcttgtgctcagaggtggagcaggagtccatgaaggtctgggccaccaccgacaagcaggcgtccgtgatgctgttcttgtgaatgtcgaacacaaactgtgggttcttgatcacgttcacccagaagcgcaggggcaggcagttgctcttccaggtgtggcgcacgtcagcatcgtggatctggtgcttgtcggcctgctcatccaggaagtcgaacatgtacttgatggccaggggcagggccgagccccggtgggctgtgctgaacactgtctcaaagaggtcatccacgaacttctgcagtgtgcccttggtggccagcagccgtgtcaggtagatctcggagaccatcttgctgccacggtccccctcgcgatggtcggcatggtcgtggtttttcaccaggtgccacaatttggtgcctgtctcctggtcaggcgtaatcatgggtgcccgtgagcggaggctatcagggctgctggccgtgcggagcaagctctcgtagcggctgagggagcgggtgaaggtgaaggagttggccatgttataggcagacacttgtttgggcaccaatgccaccaaggaaccgtctgtcacctggtagtgggccagtgagttgagcctcttccagtcacactcgatcttggtggtgacatcctcatcctggaggatgatgcgagtcatgcggccctggcgccactccaggtccatgtcctcagctttgggacgctgggagtacggaatgcccttgtacacagtgtccagcagcttatctttggcctgggtgatgctgtcacagttgagaaccttcactgggacctgggcgctgccctcgttctccggacacacgcagtgaagggtcagtgtcttgtagtcgatctgctgacggatgagcttgtcctcgctcagggagtatcgtgcctcgcccgtgatggcatcaatggggcccttctccatctgctgcttgatggcacagtaaagcaggaagagaggctccccagcacactccttcagaaacttatgcagcaggaacgtgaaccagttggtaagcatcttctcagccactgactctgtcctgcgtagcagcagcttggggtggttcttgctctcgaggttcttctcgatgaggtcggccagcagttgcttgagcagccccgtggcatagtcgagccggctctgcagggccaccatggtgagcgaggccacggtgccgcggtcgcgcatggagaagctgctctgggcctccagcgtgtggatgaaggtaagcacgaacgcgcggctgtgcagcagctgcccgaagaggcgcagggccttctccacgttgggtggcgtatccagctccttgagcaccgggtgggcctcgatgcccgggaagagcacgcgcacggcgtaagtccggtagtccaggaaggggatctgcacctcgtccatgtggttagtcagctcattgccaa

SEQ ID NO: 186235 - DNA, 1999 bp, Homo Sapiens
aattgatgagcaatgctttacaataaaaaggcaactttgtacaaaaaagttggaagatacaactggcaactgaggaaaaggcctcaattcaacaagagctaacaagcttgggagtttatttcggaatctttaaaagactcttctgcttacccacaatctgggatccactgcaggaaaacaaaaaaggaaaacttcatttaaaagaagcaagaagtaaaatgggacaaattgggaatgtttaagtctctgaaactctgcactgaaaagaaaataagattgataacttaagcttaacattctgaggcataaagaaacattaactttggagtattcatcttgactactgaaatacaagtttagaagacaagtggtttcattctggtcacagatcacagcttttctttaaatttataatcctatgggttggactcgttgactgtattttttaaaggttgctcgtcagttaactgagccttggaattcatggattttctaaagactaacaaatgaaaatattttcctgttgaagaacccagcggaaattttacagcaacaaatttcatgtttcttttgggtatttctgagaaaaaggaaatatttataaaaccatccaaagatccagataatttgcaaataaattggaggttatagaggttataatctgaatcccaaaggagactgcagctgatgaaagtgcttccaaactgaaaattggacgtgcctttacgatggtaagcgttaacagctcccactgcttctataatgactcctttaagtacactttgtatgggtgcatgttcagcatggtgtttgtgcttgggttaatatccaattgtgttgccatatacattttcatctgcgtcctcaaagtccgaaatgaaactacaacttacatgattaacttggcaatgtcagacttgctttttgtttttactttacccttcaggattttttacttcacaacacggaattggccatttggagatttactttgtaagatttctgtgatgctgttttataccaacatgtacggaagcattctgttcttaacctgtattagtgtagatcgatttctggcaattgtctacccatttaagtcaaagactctaagaaccaaaagaaatgcaaagattgtttgcactggcgtgtggttaactgtgatcggaggaagtgcacccgccgtttttgttcagtctacccactctcagggtaacaatgcctcagaagcctgctttgaaaattttccagaagccacatggaaaacatatctctcaaggattgtaattttcatcgaaatagtgggattttttattcctctaattttaaatgtaacttgttctagtatggtgctaaaaactttaaccaaacctgttacattaagtagaagcaaaataaacaaaactaaggttttaaaaatgatttttgtacatttgatcatattctgtttctgttttgttccttacaatatcaatcttattttatattctcttgtgagaacacaaacatttgttaattgctcagtagtggcagcagtaaggacaatgtacccaatcactctctgtattgctgtttccaactgttgttttgaccctatagtttactactttacatcggacacaattcagaattcaataaaaatgaaaaactggtctgtcaggagaagtgacttcagattctctgaagttcatggtgcagagaattttattcagcataacctacagaccttaaaaagtaagatatttgacaatgaatctgctgcctgaaataaaaccattaggactcactgggacagaactttcaagttccttcaactgtgaaaagtgtctttttggacaaactatttttccacctccaaaagaaattaacacatggacattttaaagtctttagtataaagaaaatttgtattcaatgtgttaagcattaacatgtattttatttgtgtatccactccatctgattttctgagccattttgatttgttccttcattaaaaaaa

SEQ ID NO: 186236 - DNA, 1114 bp, Homo Sapiens
  misc_feature (887)..(900): n is a, c, g, or t
ttggcatttttttggtctctgttttatgtttgtttattaatttgtaccctgcctactttcaaaaaggatttgaggtatcttgtatgttcccatgtgggaaattctcattgaaccttgtatatgggatatcagaactataaagctaaatgtactgaagtaatgtagaataaacataactccttagcatttttagacaagtaaacattgggttttgatatcattgatgacataatcaatgcctaatcattctccctgacctttaattccatcattttccattatacttgaatatagagagccacatactgctgcctagatattaatagtcacgacattagttcagatcttgactttgttttatatttctctagtcggcgtggcacaagcctaatggaagatgatgaagagccaattgtggaagatgttatgatgtcctcagaagggaggattgaggatcttaatgagggaatggattttgacaccatggatatagatttgccaccatcaaagaacagacgagagagaacagaactgaagcctgatttctttgatccagcttcaattatggatgaatcagttcttggagtgtcaatgttttaataccagtacacaattaaatctgtggtgaagtcattttctaagtggaagaggaaattttaaagtgtggtagatacagtgaaattctgtacagatttttctctaaggagaatatgacatgcttatgcttaccaagatcaagtgcattgaggggcagttttgtttgcctgaataaacgtaaaggacaagtaaacaatttgatgataagctacagtttttcttagaaagtaaatattttatttatgcgctgttagttggcttttgaatcgattatttcatgcttttttttnnnnnnnnnnnnnncaaaataacaatctgaagaggcatttggtacagatatgaattctcttacatttatttactggttgtactaaataatgatgacctctgctggatttctgtttacatccagaaaacaatgttaaggatgtatttattcccctaccctgaagaaagtgtaggatagaattgtttttagcattctaaatttaaatgcttaaaacgtcaatcaacaaaa

SEQ ID NO: 186237 - DNA, 1631 bp, Homo Sapiens
  misc_feature (47)..(60): n is a, c, g, or t
  misc_feature (645)..(658): n is a, c, g, or t
ttggctgttagttggcttttgaatcgattatttcatgcttttttttnnnnnnnnnnnnnncaaaataacaatctgaagaggcatttggtacagatatgaattctcttacatttatttactggttgtactaaataatgatgacctctgctggatttctgtttacatccagaaaacaatgttaaggatgtatttattcccctaccctgaagaaagtgtaggatagaattgtttttagcattctaaatttaaatgcttaaaacgtcaatcaacaaaactttgttttaaatattgtaattgtggagaaaagtaaacttataagcagaacttttacaattttttcatctaaaagtattttaagatatttttaaaatccaagaccttctctatacttttcagaaatatccagatgcagtgaactgccagaaggtaaccagtctcaaacatgcttatcccattatcaaccctgaaagtttgcttgtcctttaagataaaaatgtaatgttgtgatattccttccagtaatgccactgtattttgtctccaaataaaagaagcttattgtagtatgtttgcagaaaaattctaaacaaaaattatacagcttattagagtgtgggaatagggatctaaattttaaataaaatnnnnnnnnnnnnnnaattggtgctgattttataattgcgcagtttgtttagttttttcttacttttaaattccaacttaaaattatgaggtttcagaaatatattgaaagtttaacaatgtttaaaaatagaaaagcatgagtgttcatgctttaaaatgatttttaaatttgtattttatattgttttatctatctgtctttgcaagcagtcttcaggttaaagatacttctaacaggttacagtacatttcctctgtatgtaaattagatgggataatagaattcataacccataatattctttgaaagctaagctttaaacttcattttatgtcctttcacaaataaattagtttaaaacagaaagtggctacttgccattttgacatcaactcattttgcgaggcttaggcagctagacatcgtttaaaacaaaatattaacttatattacatgtgtatctatctattgtcagtcgtctctcagttcttgaggtatattattttaatcattccatgccttaatatgcttgcaatacaagaatatcttcagatgggtgaataccaaaaggctttcagtttttagtcagaaatcaagcattgggctgtggtagccaaaaaccataggttagctaaaaagatcatgatacaattattttattaagtcatggttaataacaaatgaatccagacttgtctaacagattttccatcaacaaatattgttatgtgcaaaagtattgcctatgttgttttacacaccactgcattaactagaactgctgagaggactgtatatatgattttaaacctaagttgattttttttctcactcttgaaaggagtacttctttgtgaaagcagttcttacagctttgttttcaaccagctaaaaatgttttatatattactctaacctgttgtcctccacattctattgtcctaattgtactgttttctgatttgaatttatgtcttgagacagt

SEQ ID NO: 186238 - DNA, 1384 bp, Homo Sapiens
  misc_feature (1175)..(1236): n is a, c, g, or t
ttgggcaattatgaatccatgaacaatcttttttaacttagcctcactcactccccatgttctagtattattttgtaacaaatagcagacatctgatcattttatccataaatattctttatatatctctgaaagctatgggatgatatggaaaaaaatgataattccattatcgcaagtgatatttacagtaattctttaatatcagtaaatatccagtgagggttcaaacttccaattgcctcataaatgctacttgttttattatttttaattagtagaatcccgtaaatctcctaagtgtcttcttaatccgtatgtttccctttcatctttctttttttccttgcgattttgtttatgaaatgaggttgtttcacatgtagcatttgccacaatttaagttttgctaattgcatccctatggtaatgtttgctttcctctatcctctgtttctttaatttgctagttatgtctagagacttgatgagattgaaacatggcttttggcatgaatgtttcataggttatgttgtgttcatttagtaggtggcgcataatctgtggttttctctctttttgtggtattagcagctgctgcagataaatgcattaattcatgatgcttctgatatgatgagtcatctttgtagagttactaagcattagcaaaggaggaaatgctatgtaatagaaatattattcaatgccaaaatattttcttaaatagtcatagaactaacaagaaaaaatagatagcaaaaaatgtgttggctgttctcactgtttatcttcctaacttcttttgatgatggaaggcagttttgtggaaattgccagccaggactttgacatgaaacagacccagggctaaattttggctctgtggtgttggataagtggccttgaataaattagttattaagcttcagttttctagcttttaactgattataacaatgcacacacatacctgacacactgttaaattttcttctcttcctgtttcttatgttaaggaaagatactctgtgttttggcatatgttggtgaatttgtaccatttttatcctctcagtccttccttttataagacaataattggagtagtttaatcttattcatgtgcagataaaagaggtttatgaagtttagggtgaagtaggcaagggannnnnnnnnnnnnnnnnnnnnnnnnnnnnnnnnnnnnnnnnnnnnnnnnnnnnnnnnnnnnnaagaattgctgtgggtaataccaggagtggggacattgcccacatgcataagagcgtatctctccattcgatcagtttgtcaccatctttgctctgttttgaaagtcagcttctctgtgactgtgaagcctgctgttccctgaaaatc

SEQ ID NO: 186239 - DNA, 1482 bp, Homo Sapiens
ttggatagatagcaaaaaaatgtgttggctgttctcactgtttatcttcctaacttcttttgatgatggaaggcagttttgtggaaattgccagccaggactttgacatgaaacagacccagggctaaattttggctctgtggtgttggataagtggccttgaataaattagttattaagcttcagttttctagcttttaactgattataacaatgcacacacatacctgacacactgttaaattttcttctcttcctgtttcttatgttaaggaaagatactctgtgttttggcatatgttggtgaatttgtaccatttttatcctctcagtccttccttttataagacaataattggagtagtttaatcttattcatgtgcagataaaagaggtttatgaagtttagggtgaagtaggcaagggaatctgtttactccctcttccctctactgaataattttccctctactgaataattttccctctaagaattgctgtgggtaataccaggagtggggacattgcccacatgcataagagcgtatctctccattcgatcagtttgtcaccatctttgctctgttttgaaagtcaggcttctctgtgactgtgaagcctgctgttccctgaaaatctgataatggagcagtggaggtttttttctttctgtgctctgtagatctcattgtttgcacttgtaatttcccagagttgaaaggaaagattgaactggaatattgtgtaaactatctgtcttacattagtgtagcattttgcaatttggggaacatcttcacaatttgtgtctcgttgttcagaacaaccctgtgaagtagttttggcaatgtctgtgttacatttcatgtaatttagccaactcccattccaactaggctttggctaaatctgacaattttatatatagcttaaaacaaagaatatacattcttttcacccctcccagtctacccatccagccttcatgattcattcctgtgtcaaggttagtcgctgttttccatttgaattggtttcttttatggtcagtttactttcttccctctcccctccctttcctgcacatccccatccttgctatgcctttctgtcctcttttataatggatatatctttttcctgccattatccctcagacattctcctcatggcacattttcttcaaatgctaacatttactgagtgtacattgaagttctgtgcatacaggaagaagttattttctgagcttagataatactatgtgtatatgtgattaaaatgaagattattttctaaagcccttcaaataagaagtggatttctgtttcattacttcccgtttttaaaagtttttgccagagagttttgctaaatactctcttatttgctctagtgtactaggtcccagtagtgtttgcatgtgggatgtctgtgggatgacagttattgtagcactttggcagtgcactaaaattttgc

SEQ ID NO: 186240 - DNA, 1401 bp, Homo Sapiens
ttgggtgcgtagcgctggaagtccggccttccgagagctagctgtccgccgcggcccccgcacgccgggcagccgtccctcgccgcctcgggcgcgccaccatggggccccggctcagcgtctggctgctgctgctgcccgccgcccttctgctccacgaggagcacagccgggccgctgcgaagggtggctgtgctggctctggctgtggcaaatgtgactgccatggagtgaagggacaaaagggtgaaagaggcctcccggggttacaaggtgtcattgggtttcctggaatgcaaggacctgaggggccacagggaccaccaggacaaaagggtgatactggagaaccaggactacctggaacaaaagggacaagaggacctccgggagcatctggctaccctggaaacccaggacttcccggaattcctggccaagacggcccgccaggccccccaggtattccaggatgcaatggcacaaagggggagagagggccgctcgggcctcctggcttgcctggtttcgcaggaaatcccggaccaccaggcttaccagggatgaagggtgatccaggtgagatacttggccatgtgcccgggatgctgttgaaaggtgaaagaggatttcccggaatcccagggactccaggcccaccaggactgccagggcttcaaggtcctgttgggcctccaggatttaccggaccaccaggtcccccaggccctcccggccctccaggtgaaaagggacaaatgggcttaagttttcaaggaccaaaaggtgacaagggtgaccaaggggtcagtgggcctccaggagtaccaggacaagctcaagttcaagaaaaaggagacttcgccaccaagggagaaaagggccaaaaaggtgaacctggatttcaggggatgccaggggtcggagagaaaggtgaacccggaaaaccaggacccagaggcaaacccggaaaagatggtgacaaaggggaaaaagggagtcccggttttcctggtgaacccgggtacccaggactcataggccgccagggcccgcagggagaaaagggtgaagcaggtcctcctggcccacctggaattgttataggcacaggacctttgggagaaaaaggagagaggggctaccctggaactccggggccaagaggagagccaggcccaaaaggtttcccaggactaccaggccaacccggacctccaggcctccctgtacctgggcaggctggtgcccctggcttccctggtgaaagaggagaaaaaggtgaccgagggatttcctggtacatctctgccaggaccaagtggaagagatgggctcccgggtcctcctggttcccctgggccccctgggcagcctgactacacaaatggaattgtggaa

SEQ ID NO: 186241 - DNA, 1241 bp, Homo Sapiens
ttggcctccttcctgtgatgtccgtttggctccgccggagccataaagaccattcctactgggatatggcctctgccaatttcaagcacgctattggtctgtcctgtgagctggtggtggagcacattcaaagctttctacattcagatatcaggtacgagagcatgatcaataccatgctgaaggacctctttgagttgctggtcgcctgtgtggccaagcccactgaaaccatctccagagtgggctgctcctgtattagatacgtccttgtgacagcgggccctgtgttcactgaggagatgtggaggcttgcctgctgtgccctgcaagatgcgttctctgccacactcaagccagtgaaggacctgctgggctgcttccacagcggcacggagagcttcagcggggaaggctgccaggtgcgagtggcggccccgtcctcctccccaagtgccgaggccgagtactggcgcatccgagccatggcccagcaggtgtttatgctggacacccagtgctcaccaaagacaccaaacaactttgaccacgctcagtcctgccagctcattattgagctgcctcctgatgaaaaaccaaatggacacaccaagaaaagcgtgtctttcagggaaattgtggtgagcctgctgtctcatcaggtgttactccagaacttatatgacatcttgttagaagagtttgtcaaaggcccctctcctggagaggaaaagacgatacaagtgccagaagccaagctggctggcttcctcagatacatctctatgcagaacttggcagtcatattcgacctgctgctggactcttataggactgccagggagtttgacaccagccccgggctgaagtgcctgctgaagaaagtgtctggcatcgggggcgccgccaacctctaccgccagtctgcgatgagctttaacatttatttccacgccctggtgtgtgctgttctcaccaatcaagaaaccatcacggccgagcaagtgaagaaggtcctttttgaggacgacgagagaagcacggattcttcccagcagtgttcatctgaggatgaagacatctttgaggaaaccgcccaggtcagctcctcgagaggcaaggagaagagacagtggcgggcacggatgcccttgctcagcgtccagcctgtcagcaacgcagattgggtgtggctggtcaagaggctgcacaagctgtgcatggaactgtgcaacaactac

SEQ ID NO: 186242 - DNA, 1751 bp, Homo Sapiens
ttggagctgaagcaatctggagagcccttcctgcaggatgggtcatgcatcaatgtggcacctcatctgcacaagtgtcgtgaatgccgcctggagcggtaccggaagtttaaggaacaggagcaagatgattctactgtagcctgccgtttctttcacttccggaggttgatcttcactcgaaaaggggtactccgtgtggaggggtttttaagcccccagcaaagtgaccctgatgccatgaacctgtggattccctcttcctccctagcagaagggatagatctagagacctcaaaatacatcctggccaatgttggggaccagttctgccagctcgtaatgtctgagaaggaggccatgatgatggtggagccacaccagaaagtggcatggaagcgagctgtgcgtggtgtacgggagatgtgtgatgtgtgtgaaacaactctcttcaacatccactgggtttgtcgcaaatgtggatttggggtctgccttgactgttaccggctcaggaaaagccggccacgcagtgagacagaagagatgggtgatgaagaagttttctcctggttgaagtgtgcaaagggacagtcccacgaaccagagaatctcatgcccacacaaattattcctggcacagctctttacaatattggagacatggtacatgctgcccggggcaagtggggaattaaagcaaactgcccttgtatcagtcgacagaacaaatctgtattgagacctgccgtcaccaatgggatgtcacagcttcctagcataaaccctagtgcctcttctggaaacgaaactaccttctctggcggaggaggaccggcaccagtaacaactccagagccggaccatgttcccaaagccgacagcactgacatcagatctgaagagcctctgaaaacagacagtttggcatcaaatagcaatagtgaactgaaagccatcaggcctccttgccctgacacggccccaccctcctccgccctgcactggttggcagatttagcaactcagaaggctaaagaagaaacaaaagaagcagggtccctgaggtcggtgctcaataaagagtctcattcaccctttgggctggactcgttcaactccactgcaaaggtctctccgctgactccaaagctttttaacagtctgttgctgggtcccactgcctccaacaacaaaaccgaagggtctagccttcgagacctccttcactccgggccgggaaaacttcctcaaacccccttggacacaggcataccctttcccccggtcttctctacatcctcagcaggagtgaagagcaaggccagcctacccaactttcttgaccacatcattgcctcagtggtagaaaataagaaaacctcagatgcttcaaagcgggcctgcaacttgactgatacccagaaggaagtgaaggagatggtgatggggttaaatgtgctagatccccatacttctcactcctggctttgtgatgggaggcttctgtgtctccatgaccccagcaacaaaaacaattggaagatcttccgggagtgttggaagcaaggtcagccagtgctggtttccggggtacataaaaagctcaagtctgagctctggaagccagaagcctttagccaggaatttggagaccaggatgtagacttggtgaactgcagaactgtgctataatttccgatgtgaaagttcgggatttctgggatggtttcgagatcatatgcaaacga

SEQ ID NO: 186243 - DNA, 2228 bp, Homo Sapiens
ttggagaacaactttctaacctaggtagtggtcagttatctttacgtggactggcttggtgccttggtccatgttgcatgtgttgtgcaattgctttcaaccctttgaaacagagtgagatagatagggtagaaattctcctactgaaataagaggcctaaaaaggcctccctttggaaatgggaggtctctatgggatccctgaggaaggagagtggataaagtagtgaatgctgggtagttcacttcccattggttaagctaacagcccacttttatgtttccagagaaattggatggccacagctagcatggcattctagctccttcttgaaagttgattcaatcatggcatttctgtcactggctggctctccaaagtaagaactgttgttaagtgcaggaatgcttttagactataggctgcaacttccagagagaaatccacaaatctgagcctccttcactccagcttttatttcagtgactttagaataattattgatttaactgttttgggaggaaaatagatttttattgttttgttctttaaatgaatgtcttttaaaaaacataacaaactcatgttccagaaccagcaagtgctccagagtgacacaccccctaggcccctacatatttattaatatggattatccattaaagccccaggagctgttgttttaagctttgatttagttctcatacatatgatagaaagtcctatttgcctttagaacatgcctgtaactcttctgcacgtgagatgtactgggctttttattatattcaactttcaattccatcttaaaaaacatttgtattcttctcttcccattcttccttaccctgcctttgccctttcaggaagggtcagttcccttacctgtgaactatgtatgttcagagtagcattattcctgctagctaggagaagtcatcttgtttaggggatttggatgctttttatacgttctccattttcctgtcattgggtcatgttatctttgagttgctatgaaatcaggaaactgtctccttttcctttcccttcctttgtctacatgctctgtccattcctttcagccttttctcaccacccatactcccccaaatctgggtaatttttaagccttgaaactatgtagtttcttgatacacaatttgtagttatgcagcagccacaatttgcattgccaggaaataggctccaggttatcttcatgcctctgggtgctcattcagctgtcaagtttccatgaacttacacttatttatgattgcgtttctgacctgagatgtatgctgcctgttattgcagtagcattagtttcagattcttttgccattgcaaagtaccccttataaaccagcaatgtcatctgtgaggaagcaaattctcaagtgtctgtcatttacttggttctttttctttgtggtcttcacccttataccctggaaaagtctgtaattaccttagccaggaagatagatggtcatggcaagcgcacagcaccagacttactggctcaccaagatgatggaaaaaggcagatgattttttaaaaagccgtaatgactcctttagaccagccatttagcgtggtaattttgaaaggcctagctccattgcagacttccaaagggtcagctctgagactgccctccaggtgggcagttgattatttccaccagtgttttccagagccttaaactgtcctaagtgacaactacctcagttggcaggaaagagacatatagtagaaagtgaaaaatgagcagtatttgggcagatgctatgggttacagttgaagggtaaaaggaactttacattgggaaacctttatacccttgtgaattatgtacatggtaaaatgttctctctctacaaagaactattaaaacttctgaaatatactattttttaccttatttatagaaattgagacctagcatatttaagcataagtttattttaaaaaataattcaactcgtgcaagtggtctcaggattctctggagattttggtgcctcccctacttagggaggtgatagcttgcctataagggtgacttttcctgatcatgtctttatttcaatgagaaagcactgtgaaattgtgaaagattctcctctttctctgtttaataaacccccatgaaatatagtttccatctctagaccagttttttttccaccgtgtttagacttgaggtgaataaaatc

SEQ ID NO: 186244 - DNA, 1488 bp, Homo Sapiens
ttgggtctacgttgttagccccaggcttggccagtggcttctggaaagtcgttcgctgccccgcagagatgtgagcagaggttgtttgcttgctgttgtccctcctaccccctgtccgggctggggtggacgtctgtcttcctttcactcattactataggggtgtaatctgtgtcttgatctcttttagggccagtatggaaattaccagcagtaagggacacacattctggctggagcccttgtggtagcgtgttcatccaggggccggatgggctggcggcagctctggtgaattgtgacatgttggttacctgttcgcccagtgccacgtctgcatgtgaagcgtgctcatttcatgctgggtatgacgccgagcgcacaccactggcgtgagacagcgcttggtggtgtgatacttttggtgctgtgtatagtattgtatgtcggtacacggagaggtatcctttttttgtcccccgcccccttctcaatgtttctagctagctttgggggtcattttgtcatcagagcattctgtgcccagggacaggacagatctcgaggacaccacagtccacctgttcccgtcaacagacgttaggtctcattttcctcctcatgcagtgttgtagtgtgggttgtcaacttttctttaactggctacgccacagctggacacacatgcagcccctggagggcagcctcttcctgtgcctcgatggggtgggtgggagggcatcttctgtgcgttgggtcagtttctgttacgtaacgaaaaggataaacatctcccacgggagaggccacagatggccacttccagagcttgcccattgcctgtctctcgccaattccgtttatccaaaaaggtacatgtttttgtattaaaaagtaaacagggatcagtgactgtattccaaataaatatgaatccctaagggccgtggacaaattgcctaacccagggccagcggtattgctgaaggaaaggggcagctctctgggaagtgggccctcagagattactctggctttgacccttgtttagctgatggtcatttctgggattggaatatttaataagcccaattctaagttgataggtaattttaaatattcaaaccaaatcttcccaacagttggcaagttgtttattttatattatttcttccaggacctacttgctcagatctccaagcaagcatttcttttcttttagggatgtctgaaagtcacatccagttacattactgtgttctttctaatgaaaagtaaaggttttatatagagaaacttgagtaatttttacatttctaagacattaaatcccatttaaattctgtgtgaacattaaagacagcacacttgcaaaagtatggtcaaaggaaaaaaatcccacatttcaattaacaagtagcatggacatttgatcaacctttagttggaataataatattcatatttgctatgaatccttttaaaaaa

SEQ ID NO: 186245 - DNA, 1995 bp, Homo Sapiens
  misc_feature (901)..(1214): n is a, c, g, or t
  misc_feature (1748)..(1773): n is a, c, g, or t
cccataaaagccaactttgtacaaaaaagttgggtttctgttacgtaacgaaaaggataaacatctcccacgggagaggccacagatggccacttccagagcttgcccattgcctgtctctcgccaattccgtttatccaaaaaggtacatgtttttgtattaaaaagtaaacagggatcagtgactgtattccaaataaatatgaatccctaagggccgtggacaaattgcctaacccagggccagcggtattgctgaaggaaaggggcagctctctgggaagtgggccctcagagattactctggctttgacccttgtttagctgatggtcatttctgggattggaatatttaataagcccaattctaagttgataggtaattttaaatattcaaaccaaatcttcccaacagttggcaagttgtttattttatattatttcttccaggacctacttgctcagatctccaagcaagcatttcttttcttttagggatgtctgaaagtcacatccagttacattactgtgttctttctaatgaaaagtaaaggttttatatagagaaacttgagtaatttttacatttctaagacattaaatcccatttaaattctgtgtgaacattaaagacagcacacttgcaaaagtatggtcaaaggaaaaaaatcccacatttcaattaacaagtagcatggacatttgatcaacctttagttggaataataatattcatatttgctatgaatccttttaaaaaaatctttggataaatgctgacagatttccaagaactaccaagaaaatacaagagatatccaatgcttgatatatgaggcctagtaataacgatatttctctttaattgatgttttgttttaaaagttaaaagtaattcttnnnnnnnnnnnnnnnnnnnnnnnnnnnnnnnnnnnnnnnnnnnnnnnnnnnnnnnnnnnnnnnnnnnnnnnnnnnnnnnnnnnnnnnnnnnnnnnnnnnnnnnnnnnnnnnnnnnnnnnnnnnnnnnnnnnnnnnnnnnnnnnnnnnnnnnnnnnnnnnnnnnnnnnnnnnnnnnnnnnnnnnnnnnnnnnnnnnnnnnnnnnnnnnnnnnnnnnnnnnnnnnnnnnnnnnnnnnnnnnnnnnnnnnnnnnnnnnnnnnnnnnnnnnnnnnnnnnnnnnnnnnnnnnnnnnnnnnnnnnnnnnnnnnnnnnnnntaattctttatccagagtcgggtgctttagaatttataagtcacttatgtgttttgcttgaattaattctgacagcccctatgaggaaatctggaggcaggtaacagttcccattttagagatgaagaactgaggcacagattaaaggacttgcctgtgttgaataccagtcctgttctaggacattctcccctctcctaggagacggatgtcacgcacaaatggggagagaagtgtttattttgtaggcactaagggtttctaaaacccttaacactggtaagggctcaaaaataaacgtatgtgttcatattcgatcaccgaaatgagagttcttaattgctaattgacaaacgcgttagcaatttcagttagggagtcatctcccttgattgtgttcttttcctgtcaattttcatagacctaatttgcaaactcaatcggggactaaaatttcccactgaaaatgttaaacattttagataactgtgaagatagtttatttttattccttgccaatctgggaatatgccnnnnnnnnnnnnnnnnnnnnnnnnnnaagtgctgtattaataatactttctgaaagaaaaggacacttaccccaaaacttcaatctgaaatgtcttacattaagaatatcttgaatgttgtgtatatattttaaaaagcactttgcaaaatagtttgtacatttatttcctaatttatacatgatttttggtgtaataatatttaatgaataatacagaattgtttatttaatgtgctgtccattttt

SEQ ID NO: 186246 - DNA, 1229 bp, Homo Sapiens
ttggctgggctcggtcgggcgctgtctccctcggctctgcgggtgtcagttcgtccggcttcctcacagcccctcactcccggcggctgacagcagcagcggcggcggcgggcggcgcctggcgtttcgaggctgagcggcaccggggttggggcgcggaggaggagcagcagcgggaggaggagccgtgtgccctggcactgagcggccgcggccatggcgtacgcctatctcttcaagtacatcataatcggcgacacaggtgttggtaaatcatgcttattgctacagtttacagacaagaggtttcagccagtgcatgaccttactattggtgtagagttcggtgctcgaatgataactattgatgggaaacagataaaacttcagatatgggatacggcagggcaagaatcctttcgttccatcacaaggtcgtattacagaggtgcagcaggagctttactagtttacgatattacacggagagatacattcaaccacttgacaacctggttagaagatgcccgccagcattccaattccaacatggtcattatgcttattggaaataaaagtgatttagaatctagaagagaagtaaaaaaagaagaaggtgaagcttttgcacgagaacatggactcatcttcatggaaacgtctgctaagactgcttccaatgtagaagaggcatttattaatacagcaaaagaaatttatgaaaaaattcaagaaggagtctttgacattaataatgaggcaaatggcattaaaattggccctcagcatgctgctaccaatgcaacacatgcaggcaatcagggaggacagcaggctgggggcggctgctgttgagtctgtttttactgtctagctgcccaacggggcctactcacttattctttcaccccctctcctcctgctcagctgagacatgaaactatttgaaatggctttatgtcacagaagactttaatccgtcaaattcttgtataactttgaataaatggttaatgttcacttaaaagacagattttggagattgtattcatatctatttgcatttgatttctaggtcaattgatgtgattatttttgttaaatgttgtcttgtgcccttaactacgaactgaattgtattaaacactacaaagtcatcttgagtatttaaatcggtttgtgtagttaggtttcccaacatctgtgttacctaatgtttaatattatag

SEQ ID NO: 186247 - DNA, 2267 bp, Homo Sapiens
  misc_feature (1381)..(1422): n is a, c, g, or t
  misc_feature (1704)..(1802): n is a, c, g, or t
ttggctcccgcgcgggacggagggactggccggagctggcgctttctcagcactagatctggactccgacccggcgccagaatacagtcgctttgaatcgaagatacatgacttacgagaacaaatgatgaacagcagcatgagctctgggtctgggtccctccgaacaagtgaaaagaggtccttgtatgtcagggccctgtttgattatgatcggactcgggacagctgcctgccaagccaggggctcagcttctcttatggtgacattctgcatgtcattaatgcctctgatgatgagtggtggcaggcaaggctggtgaccccacacggagaaagtgagcagatcggtgtgatccccagtaagaagagggtggaaaagaaagaaagagctcgattgaaaactgtgaagttccatgccaggacggggatgattgagtctaacaggtcgatcaaaacgaaacgtaaaaagagtttccgcctctctcgaaagtttccattttacaagagcaaagaaaacatggcccaggagagcagcatacaggaacagggagtgacatccaacaccagtgacagcgaaagcagttccaaaggacaagaggatgctattttgtcatatgagccagtgacacggcaagaaattcactatgcaaggcctgtgatcatcctgggcccaatgaaggaccgagtcaatgatgacctgatctccgaatttccacataaatttggatcctgtgtgccacatactacccggcctcgacgtgataatgaggtggatggacaagactaccactttgtggtgtcccgagaacaaatggagaaagatattcaggacaacaagttcatcgaggcgggccaatttaatgataacctctatgggaccagcatccagtcagtgcgggcagttgcagagaggggcaagcactgcatcttagatgtttccggcaatgctatcaagagactgcagcaagcacaactttaccccattgccattttcatcaagcccaagtccattgaagcccttatggaaatgaaccgaaggcagacatatgaacaagcaaataagatctatgacaaagccatgaaactggagcaggaatttggagagtactttacagccattgtacagggtgactcactggaagagatttataacaaaatcaaacaaatcattgaggaccagtctgggcactacatttgggtcccatcccctgaaaaactctgaagaatcccctccaaccattctcttgtgaacagaagaaatcaagtccctcttccctcctccctcttcattcctgtccccatggggagaacaaatgctactgttcttgtccccttttttagatatgtcaaaaaaaattaagttttctagtcctgttcnnnnnnnnnnnnnnnnnnnnnnnnnnnnnnnnnnnnnnnnnngggatgatgccatctcattcatcatgtgactgtgcccattcctgcatggacctttcccaagcgctagcacaggtgcaaaatccatcagagccattgttttcataaaaaccaagcagaagtgaagagaaaagaggaggactgatggaaagacagactctggacagctgcacggcttgtgaagtgagctaaatgcaccacatgatgagatgctcctgggcatttctccctatctgtactgctgtcttgcagctctgaacggtgcaacgtaatggcgacagaaannnnnnnnnnnnnnnnnnnnnnnnnnnnnnnnnnnnnnnnnnnnnnnnnnnnnnnnnnnnnnnnnnnnnnnnnnnnnnnnnnnnnnnnnnnnnnnnnnntcacacacatttgggttagaaaatctatggagacttcatcaatggtactatgttattagagaaatgctttaattttcatattccaatcagatggcatcttctatcccagctggttgggaagggattgaagatggtagcaagtgctgcactaagggcactcgcatttggtcattctcttgagagctaggaggggtcagcctgaggccggagaggaagggcttttgcctggggtgagagggtgagagacttgacctgaaagcagctgctgcccctgaggtgcagccagagtcctgtgtgcggacagagagaatggctaatgatgctccgcgtggaattgcctattgttttatgccacctgatgtgtctgcatgagaggtttcctttttgttcctttttaagctgctgttaaccaaaaccatgttgtgctactgtgtcagccttttcatattgcaaattttacttttt

SEQ ID NO: 186248 - DNA, 1709 bp, Homo Sapiens
  misc_feature (291)..(300): n is a, c, g, or t
  misc_feature (1290)..(1329): n is a, c, g, or t
  misc_feature (1523)..(1573): n is a, c, g, or t
tagagaggctgtaagccagagctagaagtcagatgctcttctttgctttccttctgtgtactccaatgagaaggtcacattggagaatactgatgagtgctaaaaatatttattaataacatgattcgttgagagatttggtcatcaggaaatagctactgtacatggtcacagtgtcttggaaagagtgttaagtatggattctgtcttgcaagatttttttggcactttatatttttcactgaagactgagcactaaaggtgctggcaacaatgacacctaaactatgnnnnnnnnnntcactgtttgccatcattgcggtgataagcataaaaatttaagtacgtgtttcttgtatattaagactccaaatgcccaaatgcttagatgaatacatacaggaatatttaaaataaatttaaatatagccataacagaggattttgaaaacaaaatcacagagtctaacatattgtaccttacgtgtgcttggtttcaattagagtaaggcactcgctgaaggatgtactgacccatgctgtcagctacaacaggcatgcatcattattggcttaattaaagttttagtactgattaaaacgttttattattgtattatcctaaacggcagtggtctccaatcttattaagggatacagaaaagatataattcaggagtttcagttgcataatttaataacccagctactgtcaattttttatttaaacaagttttgataaaagctgagtctgcttgtgtccaacatgacagtgtaaaagactttttgaatgctgctttataagtagcaactgaatataaaatcatttgaaaatgtgatgcagccatcttgatgcctatggtaatttacttcaatacaactgcaaggagaaatgcttaaatcatttccacctggcaagaacaggggagaaagttaattccattagccatcttgatttaattaaatgcatactatgttcttactggcaacttttacatgtcctcatcattagaaattaattatataagcaattatcaaaaaaattttgagcaggtacatatactcttctttgttgtttacaaataagcatgacttagaggcacttggttaccttttaataaggaaaagaattacactaccagggccttcccagtaagattggagaccacaagtcaaacttggtatgaaaatgctgtctgaaaatgctgtctgctaaaaatactgtattagtgaactagttaagatagaacatttaaaaaatattcagactttgcaagattctaggctgtnnnnnnnnnnnnnnnnnnnnnnnnnnnnnnnnnnnnnnnntttgcaaacccaataaattgaaatgagtaagaaataaagcaaaactattactgcaggagaggttaaagagtatcagtaagttttaaaataataacactaaaatgtaataaattctacttggctacatatatttctgcccctttaaggacttacgatatggaacttgtaacacttttctgtgcccagcattaaannnnnnnnnnnnnnnnnnnnnnnnnnnnnnnnnnnnnnnnnnnnnnnnnnnctgctgaagtactccacattacatttcagacagagtgtaacaaaatgtttgatacaaagccttaacatgattttttttgttaatgttgacagcatgacaactggaaaatattataacattttaaggtaaaacccaa

SEQ ID NO: 186249 - DNA, 1426 bp, Homo Sapiens
ttggctcgagcgggacagatccaagttgggagcagctctgcgtgcggggcctcagagaatgaggccggcgttcgccctgtgcctcctctggcaggcgctctggcccgggccgggcggcggcgaacaccccactgccgaccgtgctggctgctcggcctcgggggcctgctacagcctgcaccacgctaccatgaagcggcaggcggccgaggaggcctgcatcctgcgaggtggggcgctcagcaccgtgcgtgcgggcgccgagctgcgcgctgtgctcgcgctcctgcgggcaggcccagggcccggagggggctccaaagacctgctgttctgggtcgcactggagcgcaggcgttcccactgcaccctggagaacgagcctttgcggggtttctcctggctgtcctccgaccccggcggtctcgaaagcgacacgctgcagtgggtggaggagccccaacgctcctgcaccgcgcggagatgcgcggtactccaggccaccggtggggtcgagcccgcaggctggaaggagatgcgatgccacctgcgcgccaacggctacctgtgcaagtaccagtttgaggtcttgtgtcctgcgccgcgccccggggccgcctctaacttgagctatcgcgcgcccttccagctgcacagcgccgctctggacttcagtccacctgggaccgaggtgagtgcgctctgccggggacagctcccgatctcagttacttgcatcgcggacgaaatcggcgctcgctgggacaaactctcgggcgatgtgttgtgtccctgccccgggaggtacctccgtgctggcaaatgcgcagagctccctaactgcctagacgacttgggaggctttgcctgcgaatgtgctacgggcttcgagctggggaaggacggccgctcttgtgtgaccagtggggaaggacagccgacccttggggggaccggggtgcccaccaggcgcccgccggccactgcaaccagccccgtgccgcagagaacatggccaatcagggtcgacgagaagctgggagagacaccacttgtccctgaacaagacaattcagtaacatctattcctgagattcctcgatggggatcacagagcacgatgtctacccttcaaatgtcccttcaagccgagtcaaaggccactatcaccccatcagggagcgtgatttccaagtttaattctacgacttcctctgccactcctcaggctttcgactcctcctctgccgtggtcttcatatttgtgagcacagcagtagtagtgttggtgatcttgaccatgacagtactggggcttgtcaagctctgctttcacgaaagcccctctttcccagcccaggaaggagtctatgggcccgccgggcctggaaagtgatcctgagcccgctgctttgggctccagttc

SEQ ID NO: 186250 - DNA, 1613 bp, Homo Sapiens
  misc_feature (641)..(933): n is a, c, g, or t
gtttctataggggcatttgccacccacatctttggaaactcccctggctattgtgacatggcagggctgcctggttcttgaaggtagagaagatgctagtggggaggagctgagctgtgacgtgcatttgtaccaggtccagatgggaaatgatgaggctgcaggctatgatggggccactgtgcactaaatgcttggtaccatccttatgaggggacaaggtgcagacccacattcccataggcacttaagcagtggtggataggaggctaccccaggggttcagctgtccttcaggtaatcagcttacccccaagaaggactgagaggaatatgagtaggacagttggcagatgacaatttcctttgcctggctcacgggagaagtctggttgggccaggtatgtgggtgtttggtgcctccatctggatagtgccagcaggtacaccaccctgccttatacctgaatggccagctaaataaccatagagcttaaggtctggctcaggtcaggattccctggctccttgccaacaaagcaaaaccagagattcagaaaactcagggcctaggagaaaacagacctgccttacaaaccccagagctggtcaacctcaggcttcctctcaggaaaaaaaannnnnnnnnnnnnnnnnnnnnnnnnnnnnnnnnnnnnnnnnnnnnnnnnnnnnnnnnnnnnnnnnnnnnnnnnnnnnnnnnnnnnnnnnnnnnnnnnnnnnnnnnnnnnnnnnnnnnnnnnnnnnnnnnnnnnnnnnnnnnnnnnnnnnnnnnnnnnnnnnnnnnnnnnnnnnnnnnnnnnnnnnnnnnnnnnnnnnnnnnnnnnnnnnnnnnnnnnnnnnnnnnnnnnnnnnnnnnnnnnnnnnnnnnnnnnnnnnnnnnnnnnnnnnnnnnnnnnnnnnnnnnnnnnnnnncaggaaaaatttttatggggtcacatcttggggatggaagagggacaggaaaagaaacctaagacaaaagaactgatggtcttcccaacccagaggcttcctgagttatcacccctgagagaggaagaacacaatctctctccttaaggcacccagataagagtacaggcaaactcttcacttgcccagtgcctgggtgagggagcaggcttaagaggcagaagaggcccagccctgtaggcactgggtactccctgctaccaaccctgaacccccggcagttgtccctgaggtctggggagtagcagaacccagtgtagaagccagcagacccagtgatgcccttggagaccctctgctgccttcccttattctctgtgggttttgagaggttcgtttgctgccatttcccacgaagggaaatgcgtggagccatcaggcgtggatccattctgaccacccagacctggacggtgatacaacccggtcactgtattcccgtagaacccccacgccagctggatgcccaggagacttaacaccaaccacagcagcagcagcttgaagagggtcacgcgcatgtcctgcgcctcccactcccgcaagaactcgctgcccagcgcgcccagcaccgtggccggcagagcctgcaaggcctgcccagaccaggacccaaccaa

SEQ ID NO: 186251 - DNA, 1579 bp, Homo Sapiens
  misc_feature (408)..(428): n is a, c, g, or t
  misc_feature (472)..(497): n is a, c, g, or t
atcataattgtgatgcatttcctgctaaattttacaatgaaggtgatacataaattatatagatcacaagttttcttttatactatttaaaacccaattatattgataaatatgtccagaggacaacatgggttcttaatggatggctgagtccaaatatgcaaaatatagcttttggttttgaccatggtgctttaaaattctcaaacatgcattaatatattttagttttagggaaaattttacacatggccttattttgcaatttaggggaaagcccaagatgaatttcacatacagtattccttttttttaaattaatttcaaactggactagaaaacaagagacagacgcttttgggttagtactccccaggaatgaagaaaatacacaatcaacaatgaagnnnnnnnnnnnnnnnnnnnnnggagagcttcattagtagccaagataagtgcttgtgggttttgnnnnnnnnnnnnnnnnnnnnnnnnnnacagatcacaggaattttaaattgcagatcagtcatgctacttggggtgatcagaaagacttgaacacttaccaagtgaataattttattaaggtcctgaaggtgagtgtccggaggtgctgggtaaaacacatcacaggtaagaaatgggaaacctacctcagcatttctgaaaggcacaatcttggaagggaaacctagcgtaataaaaccctcactggatgtacatggaaaggagtatggtgagctatttcctttttaaaggatgagacttcataaattggcccctcggattctggtgattcccgccgcaagcgcaaatgctccagtgtgttatgaaaatgtttgttaatctgctctgtttcttcactggattcaagattcgggaggtcttctcgaatcttttggataagctggtttaaaacctgaattgttaccgcatcattttccttttcataaaaatagatatatctgttcagaatttctataaaaagctgcacttgtagagaggggtccatgcactgatttgctatttttagagctttttttaggcactccattaccctcttgcctccgtgaagctcctccccatttttgtccgtgtttctgccagaccagaagagatgtgcacaggtgctcacagctcggccctgatcaggtttctttagaagtttggatgcagcaagggcacactgagtcctcagaggttcatgattctcttcactgaagcacttcatcctttcaaaagtgccaatgatcaaggtgatggcagctagctgtgctttggaatcgctgatttcatcttcatacagagaaaatgcctgggacatgaattcatatgcgactgtctcatgattttcaaaaccaatttccccagcagctagtgctccttgaagaaaaagtcttaagggcaattctgccagctctgctttgatcaaagcactgatagtctggtgggcaaatgaaaaaatcttctggcatttcttttcccatttgtcatctctactatgtagaattctcccaacttttttgtacaaagttggcactttataaaagtagcattgctcatcaatttgttgcaa

SEQ ID NO: 186252 - DNA, 781 bp, Homo Sapiens
  misc_feature (287)..(311): n is a, c, g, or t
  misc_feature (355)..(375): n is a, c, g, or t
tttgtacaaaaaagttggatcctttaaaaaggaaatagctcaccatactcctttccatgtacatccagtgagggttttattacgctaggtttcccttccatagattgtgcctttcagaaatgctgaggtaggtttcccatttcttacctgtgatgtgttttacccagcacctccggacactcaccttcaggaccttaataaaattattcacttggtaagtgttcaagtctttctgatcaccccaagtagcatgactgatctgcaatttaaaattcctgtgatctgtnnnnnnnnnnnnnnnnnnnnnnnnncaaaacccacaagcacttatcttggctactaatgaagctctccnnnnnnnnnnnnnnnnnnnnncttcattgttgattgtgtattttcttcattcctggggagtactaacccaaaagcgtctgtctcttgttttctagtccagtttgagattaatttaaaagaaaggaatactgtatgtgaaattcatcttgggctttcccctaaattgcaagataaggccatgtgtaaaattttccctaaaactagaatatattaatgcatgtttgagaattttaaagcaccatggtcaaaaccagaagctatattttgcatatttggactcagccatccattaaagaacccatgttgtcctctggacatatttatcaatataattgggttttaaatagtataaaagaaaacttgtgatctatataatttatgtatcaccttcattgtaaatttagcaggaaatgcatcacaattatga

SEQ ID NO: 186253 - DNA, 2231 bp, Homo Sapiens
ttgggctgcttgctgcaggctctggggagtcgccatgcctacaacacagcagtcccctcaggatgagcaggaaaagctcttggatgaagccatacaggctgtgaaggtccagtcattccaaatgaagagatgcctggacaaaaacaagcttatggatgctctaaaacatgcttctaatatgcttggtgaactccggacttctatgttatcaccaaagagttactatgaactttatatggccatttctgatgaactgcactacttggaggtctacctgacagatgagtttgctaaaggaaggaaagtggcagatctctacgaacttgtacagtatgctggaaacattatcccaaggctttaccttttgatcacagttggagttgtatatgtcaagtcatttcctcagtccaggaaggatattttgaaagatttggtagaaatgtgccgtggtgtgcaacatcccttgaggggtctgtttcttcgaaattaccttcttcagtgtaccagaaatatcttacctgatgaaggagagccaacagatgaagaaacaactggtgacatcagtgattccatggattttgtactgctcaactttgcagaaatgaacaagctctgggtgcgaatgcagcatcagggacatagccgagatagagaaaaaagagaacgagaaagacaagaactgagaattttagtgggaacaaatttggtgcgcctcagtcagttggaaggtgtaaatgtggaacgttacaaacagattgttttgactggcatattggagcaagttgtaaactgtagggatgctttggctcaagaatatctcatggagtgtattattcaggttttccctgatgaatttcacctccagactttgaatccttttcttcgggcctgtgctgagttacaccagaatgtaaatgtgaagaacataatcattgctttaattgatagattagctttatttgctcaccgtgaagatggacctggaatcccagcggatattaaactttttgatatattttcacagcaggtggctacagtgatacagtctagacaagacatgccttcagaggatgttgtatctttacaagtctctctgattaatcttgccatgaaatgttaccctgatcgtgtggactatgttgataaagttctagaaacaacagtggagatattcaataagctcaaccttgaacatattgctaccagtagtgcagtttcaaaggaactcaccagacttttgaaaataccagttgacacttacaacaatattttaacagtcttgaaattaaaacattttcacccactctttgagtactttgactacgagtccagaaagagcatgagttgttatgtgcttagtaatgttctggattataacacagaaattgtctctcaagaccaggtggattccataatgaatttggtatccacgttgattcaagatcagccagatcaacctgtagaagaccctgatccagaagattttgctgatgagcagagccttgtgggccgcttcattcatctgctgcgctctgaggaccctgaccagcagtacttgattttgaacacagcacgaaaacattttggagctggtggaaatcagcggattcgcttcacactgccacctttggtatttgcagcttaccagctggcttttcgatataaagagaattctaaagtggatgacaaatgggaaaagaaatgccagaagattttttcatttgcccaccagactatcagtgctttgatcaaagcagagctggcagaattgcccttaagactttttcttcaaggagcactagctgctggggaaattggttttgaaaatcatgagacagtcgcatatgaattcatgtcccaggcattttctctgtatgaagatgaaatcagcgattccaaagcacagctagctgccatcaccttgatcattggcacttttgaaaggatgaagtgcttcagtgaagagaatcatgaacctctgaggactcagtgtgcccttgctgcatccaaacttctaaagaaacctgatcagggccgagctgtgagcacctgtgcacatctcttctggtctggcagaaacacggacaaaaatggggaggagcttcacggaggcaagagggtaatggagtgcctaaaaaaagctctaaaaatagcaaatcagtgcatggacccctctctacaagtgcagctttttataaaaattctgaacagatatatctatttttatgaaa

SEQ ID NO: 186254 - DNA, 1464 bp, Homo Sapiens
  misc_feature (1328)..(1341): n is a, c, g, or t
ccaactttgtacaaaaaagttggttggaagatttggaacctcactgaaaattggtattgttggattgccaaatgttgggaaatctactttcttcaatgtgttaaccaatagtcaggcttcagcagaaaacttcccgttctgcactattgatcctaatgagagcagagtacctgtgccagatgaaaggtttgactttctttgtcaataccacaaaccagcaagcaaaattcctgcctttctaaatgtggtggatattgctggccttgtgaaaggagctcacaatgggcagggcctggggaatgcttttttatctcatattagtgcctgtgatggcatctttcatctaacacgtgcttttgaagatgatgatatcacgcacgttgaaggaagtgtagatcctattcgagatatagaaataatacatgaagagcttcagcttaaagatgaggaaatgattgggcccattatagataaactagaaaaggtggctgtgagaggaggagataaaaaactaaaacctgaatatgatataatgtgcaaagtaaaatcctgggttatagatcaaaagaaacctgttcgcttctatcatgattggaatgacaaagagattgaagtgttgaataaacacttatttttgacttcaaaaccaatggtctacttggttaatctttctgaaaaagactacattagaaagaaaaacaaatggttgataaaaattaaagagtgggtggacaagtatgacccaggtgctttggtcattccttttagtggggccttggaactcaagttgcaagaattgagtgctgaggagagacagaagtatctggaagcgaacatgacacaaagtgctttgccaaagatcattaaggctgggtttgcagcactccaactagaatactttttcactgcaggcccagatgaagtgcgtgcatggaccatcaggaaagggactaaggctcctcaggctgcaggaaagattcacacagattttgaaaagggattcattatggctgaagtaatgaaatacgaagattttaaagaggaaggttctgaaaatgcagtcaaggctgctggaaagtacagacaacaaggcagaaattatattgttgaagatggagatattatcttcttcaaatttaacacacctcaacaaccgaagaagaaataaaatttagttattgctcagataaacatacaacttccaaaaggcatctgatttttaaaaaattaaaatttctgaaaaccaatgcgacaaataaagttggggagatgggaatctttgacaaacaaattatttttatttgttttaaaattaaaatactgtgtannnnnnnnnnnnnnatgaaatgcaagttcactaaatgtgaacagctttgcttttcacgtgattaagaccctactccaaattgtagaagcttttcggaaccatattactctcatgatacttcattaatctccatcatg

SEQ ID NO: 186255 - DNA, 1199 bp, Homo Sapiens
  misc_feature (431)..(440): n is a, c, g, or t
tttgtacaaaaaagttggattattagtggtgtggcactgggagctgctcctaaggaagcagggagcaaatcccacctttaccccaccttcctgggaaaggcctccaaagcaaaggatctggaccagtttccctgctgtgctgtggcccaggccagagcctgtgggcaggcaggcagggcatagcgacagtgtgggacctgcccccagcttctgccacgctttatgcccttgcctctctggacgctctgcaccaaccccaggctactgagccaccttccctcctcatgccttccctgagctttggtgcatctcatctggactatgggttgtactgtgaccatcccaacacctcaccctctgtctacaaggaaatgggaggtggagcctcctggctgagaaattgttttgcaaatggatctatttttgtatgnnnnnnnnnntttttttaaagaaaactgttccttccccctttcccctccataatgtaagaagctttggtggcaggttacagagttctgggatttcttctcacaggcccaatcctgaatgtgcccctggaccttctggacccttgagtccaaggcagatcctctctcccagggaatccgacacaggaggaaccccttctctggttgagctgggccaggcctaaaagtagcaggaactctaaaaccacaaagttttttataaatgtataaatgtatcaagccaaatgtgcaaatgctaactggacattctggggaactgggcaccaggagtgccttcatacactgtaccccagctctcttctaaaagagaagtgggtgggcacactgaactgtttggtggccccaaccacaggaagctgcaattctctggcttagggtgatacttttgccctccttgtgcccctctcagctttccatccccagctaggaaaaaagaatggcactcttgggcttggcccaaaattagagttattaaagcaagagagagcttaggaagcatgagggcaactatagtgaggccttattgccaggagggagggttttggttgctggcgcttgtgtataaaggggcaagagcagctcctttggactattcctggagaggactctgatgcagggcgtctgttgctcccctgggtcacctcctccctgctcgctgacatctggggctttgaccctttctttttaatctacttttgctaagatgcattt

SEQ ID NO: 186256 - DNA, 1789 bp, Homo Sapiens
  misc_feature (356)..(366): n is a, c, g, or t
ttctctttagaagagagctgggtacagtgtatgaaggcactcctggtgcccagttccccagaatgtccagttagcatctgcacatttggcttgatacatttatacatttataaaaaactctgtggtcttagagttcctgctactcttaggcctggcccagctcaaccagagaaggggttcctccgtgtcggattccctgggagagaggatctgccttggactcaagggtccagaaggtccaggggcatattcaggattgggcctgtgagaagaaatcccagaactctgtaacctgccaccaaagcttcttacattatggaggggaaagggggaaggaacagttttctttaaaaaannnnnnnnnnncatacaaaaatagatccatttgcaaaacaatttctcagccaggaggctccacctcccatttccttgtagacagagggtgaggtgttgggatggtcacagtacaacccatagtccagatgagatgcaccaaagctcagggaaggcatgaggagggaaggtggctcagtagcctggggttggtgcagagcgtccagagaggcaagggcataaagcgtggcagaagctgggggcaggtcccacactgtcgctatgccctgcctgcctgcccacaggctctggcctgggccacagcacagcagggaaactggtccagatcctttgctttggaggcctttcccaggaaggtggggtaaaggtgggatttgctccctgcttccttaggagcagctcccagtgccacaccactaataataaataaccacagccaggagagggaagagcagagacaacagcaatgaaaggagggatctagcccaaaggtttacaagccccatgctattctcagggccagagaaaccacaaaagaaaagcacaaatccagcaagactgacctaggggggaaagcccattagaaagtcagggcctgagaaaaagcaggctgggccttgtctgagatgaggccctctgagtaacagagaggagacagggttaaggcagcaaacatggacctgctttggtaatacaacagccagggctggctaagtcgggctcaggctcccctgcactgccctttccttctggcctccaggcagctgaagctgtatgtgatgttgagagagcagcaggccagagagaaagacagggtcagggtggtgggagtggccaccccagaggaatatccccttgagcctttaggcacatgctgcagggcaggacagtctgcggctccgctgaggagctgccgcggtcacaggacccacattagcttgcacggccaaccaactccttggcttcctcaaggattgtggggaatgtctcactgttcttggacaccttggcaggaacagcagccatggcatcatccttggtcagctccgaagctagcagagatgtgactgcacacccggccttcctgttggcttgacggggccctctcttccgtcggaatgctgcccctgactgcagggcttctagaagactgtccatcacacctgtctcatcgccctctgcattcatgtctatgagttgctctctcttctgctgcttctctagccgctccttctctgccttctccttggctagttttgctcgcctcatcttttcttctgtctcccgccgcttctggttctccttgactgcttgcaaaaacatattccgaaaattgtgaagatccatgaaaaattcttcaacagacaacttcttggggtcaaagaggaagtactcgttctcagctccttatagagccaacttttttgtacaaagt

SEQ ID NO: 186257 - DNA, 1474 bp, Homo Sapiens
  misc_feature (1288)..(1298): n is a, c, g, or t
ttggcgcgcttccgagactcgcagtctacgcgagctgcctgtttttttcctgcttggacgcgcatgagggccccgtccatggaccgcgcggccgtggcgagggtgggcgcggtagcgagcgccagcgtgtgcgccctggtggcgggggtggtgctggctcagtacatattcaccttgaagaggaagacggggcggaagaccaagatcatcgagatgatgccagaattccagaaaagttcagttcgaatcaagaaccctacaagagtagaagaaattatctgtggtcttatcaaaggaggagctgccaaacttcagataataacggactttgatatgacactcagtagattttcatataaagggaaaagatgcccaacatgtcataatatcattgacaactgtaagctggttacagatgaatgtagaaaaaagttattgcaactaaaggaaaaatactacgctattgaagttgatcctgttcttactgtagaagagaagtacccttatatggtggaatggtatactaaatcacatggtttgcttgttcagcaagctttaccaaaagctaaacttaaagaaattgtggcagaatctgacgttatgctcaaagaaggatatgagaatttctttgataagctccaacaacatagcatccccgtgttcatattttcggctggaatcggcgatgtactagaggaagttattcgtcaagctggtgtttatcatcccaatgtcaaagttgtgtccaattttatggattttgatgaaactggggtgctcaaaggatttaaaggagaactaattcatgtatttaacaaacatgatggtgccttgaggaatacagaatatttcaatcaactaaaagacaatagtaacataattcttctgggagactcccaaggagacttaagaatgggagatggagtggccaatgttgagcacattctgaaaattggatatctaaatgatagagtggatgagcttttagaaaagtacatggactcttatgatattgttttagtacaagatgaatcattagaagtagccaactctattttacagaagattctataaacaagcattctccaagaagacctctctcctgtgggtgcaattgaactgttcatccgttcatcttgctgagagacttatttataatatatccttactctcgaagtgttccctttgtataactgaagtattttcagatatggtgaatgcattgactggaagctccttttctctacctctctcaacacactcctcaccgtatcttttaacccatttnnnnnnnnnnntcttaaagcccaaattagaaaaataactccctacttttccaaagtgaattttgtagtttaatgttatcatgcagcttttgaggagtcttttacactggggaaggttggtagaaattttaaaataagttttatgaaatggtgaaataatatgcaggattttaagtattgccattttt

SEQ ID NO: 186258 - DNA, 1904 bp, Homo Sapiens
tttgttaggaaagtcagtcggtttagaaaaagggtttaaaaatcaggggaaaggtacaaagtttgagaattctcaaagaggccggggtggggctggcctggggtgagggctggagggctccgctgcagctccctggtagccatgctctccccctgggggactcgtgccagagccacccaccttgctcagtaagagtgggcagggctcaccgctgaggggccagcgcttggcccggctcctatccccacactccgtgtgcagaaaaatcttggcctctttctccagctttgaggagcccacagcctccgagctgaggggtgtgtgtgatgacagctccagccagggcaccctgtcattggtagaaccgggggccaatgtcaaaaaacaaaagccgtgactcctgcgctgtacctggagtcctccatgtactcctccacaggacccccggccagccccagccctccccgagcagcagcggtcagggaagctggtgctctacctgacaatgtggggaaaagcctggtatacaggctagaaaaagagagtaaaaactctttccacgcagccctgaagctcagcactccggggggtcttcacacgggcaggtcctggagggaaggaggcggccaccgcgcccacctcccatctgaaggcacagcaccgcagtggtggcctgtgccagaggagggggtgaaggatggaatgtcctcatggtgagtgctgtcagaggcaggcctgaacgagaagacaggccgtggcaacggtcccgaggctgtgagtctaggcagcctgcctccgggacccccaaagccaggcggtgcaccacagcacacaccgtgggacctttgcttttcactcaggaaaagaaagaacatgtgagtgcttctgaaaacacagcaagaggacttgagcacaagctaaaggaaaaacaaccctatatagtttcttcgagtgagaaaaataatgccaaacaaaataattttatgtaactacctcgatatgtctctgactacttaaaaatttggttacccacgcggggaggtgtaagcagcacactgcagttaggaacaccgcctccagtgttagcagcaaaggcaggagcccagttccagcccgtccaggaggggtcagcaggagcggccgggctgggccatgggcagaacaggacgggcagagcccggggtggacgtggcagcccaaggctctccgaggaagtgcacacgactgagccgaggcccttgcagagggaacctggtgtggcctgaagtggtggggggcacagggctgagggtcccctcctggaaggagcccccagggctgtgtccacctaagatagcacctggagccctcggcctccagcagggtctgcagctgtgttgtgtgttaagcaccaaagcccagaggtaagacggtggcagggctctctgtgcacctggattctacaggctgccatgggccacggctgcaccacgggccacggctgcagccacaggcagtgacctggctgctaggggaggggagggcgggctccagccgggctgaccgggtgtctgtaaaactctgcacctgctcaggccaggggcctctgggccgaacacaccaccccgcccagtgcccactggacccggccacaggcccatcacgtgtccaagccaggctggccatcacaggggccactcacacacccgcaccacctgctggggacttaggaccgtgctctcccttcactcaaacccaccctgtgccctcccccaactcacttcatgtctggtcccagagcacccctcttgctggggtcgcacctgtttagcccgcagggctggtttccgtggggggtgggttcagggggaagcagaggaggggccgcgagaggggtgagcgtggccctggccccgcagtgccaa

SEQ ID NO: 186259 - DNA, 2219 bp, Homo Sapiens
  misc_feature (1146)..(1169): n is a, c, g, or t
ttggatatagctcagtctataacctccatgtgggccaatataagctgtgtttcttggtaacacatattttgtttgaggggccactggccatgggaggttatttgttccttagaccctggaataacacatccaagccattacttattagagtctcagaatgtactcagtggagctgtgctttgaggcagccaacatttctctgctctccttagaaatgcagtctcccaatggaagctttatactctttgtactgggaaagtgaggatgatttggtagctttattggggtcatgtcttccccaaggtgtggggagcttagcttacttggcttttgaggtatcatccctctgttctcccctcctatctttccatgaccctctggattgagagagagagataaagactgacagacaccagtgtaggctggaaaagggagtgtgtgaccagagtgccaaaagtgactaggagcaggaacttggctccgactcagtttggaaaatgggaaataggggacagtaagcacaatgcccagtagtagttgatttccaaggaccctggaaccctacacttgagaggcttagggtcaccatctgctcaagaggatcccctctgatctacaggccttttccctaggtttctgcctcctcgtttttgttcaagttgggttctgagtcctccccaaaaaccattgttttagacctcttggcagggccccaaaacagcctccctcatacccatcattccctctgccttctgctgccctcatgggcagtgctctgagcagtgacctccctttcctccgtggaagtagctagtgcagacaccgtcatcccaccccacctgagtcaccccaaccaagagggtgactgaatttcagcctgattatgccctcctggggctcctgtgaggtggagccaaggttccctctctgttcctgtttgtttttaaatattgttgtgtgttttgtatctgtggcactggcctgcagcatactctgtatatattgtaaagaaaccgttaggagtaattttcttttgcattgggcaggcatggccctgcattcctgccctttccactcattctgtaacacagaggacgaacttctgtattagctgggcagccttgggttctccagaagagaacaggnnnnnnnnnnnnnnnnnnnnnnnncttcttaaacatttggctctttgatcctcatatccaagtctcccctgaagagtaggagctgctcagaagagcaggtgaaagccaccatggcagatcctgatgcctgccgggcctagtcttccctctgaaataacatgaagcagcagctgtggagattcttgacaagtgctgagtgaaagatttgctgcccacctctacatggggaggagaaacacaggtgggagctacctgtggcatccatgacctagtcagagggatgagatgctcagcaggggtccccatcctatcccaccccacaaacaaaggctggaaaaatttgctaccaagggccaagaccaccagaccaagcctgtttatgagccacccctgcccaggccctcacagacattgctcacggggcttcccatagaggagaagctaaagagggagggggcctcattcccagatagatcaagcaaggcttggagaactgctctttaggatcacattaactatttttttattttaaggtatgggagtttctttcattcccttttcttgccttgtacatgtacatgtatgaaatttccttctcttaccgaactctctccacacatcacaaggtcaaagaaccatacgtttagaagggtaagaggggaccctatgaaatgaaatggtgatttcttgagtctcttttttccacgtttaaggggccatggcaggacttagagttgcgagttaagactgcagagggctagagaattatttcatacaggctttgaggccacccatgtcacttatccccgtataccctctcaccatccccttgtctactctgatgcccccagatgcaactgggcagctagttggccccataattctgggcctttgttgtttgttttaattacttgggcatcccaggaagctttccagtgatctcctaccatgggcccccctcctgggatcaagcccctcccaggccctgtccccagcccctcctgcccagcccacccgcttggcttggtgctcacccctcccattgggagcaggtggggcgagctggaggcccgg

SEQ ID NO: 186260 - DNA, 1703 bp, Homo Sapiens
ttggatattttatacagaaggttttataaatatagattattttgtttacttataattttaaaggtaagcttgactgcactcatttaatttgcctctggagtcaggagtttacaattcttcctctgtatctattaataagcagtttgactaatattactagaagctttaatctttaattttggcatttgttttgcagatgctctacccatggtaccccaggaccagaaggcaaccatatttcagatttaccacttctagacagtcccaatccctggctatcttcttcagtgactgctccatccatggtagccccagtcacttttgcatctattgtagaagaagaactacaacaagaagcagctcttattagaagtcgagaaaaaccgttggctctgattcagattgaggagcatgccatacaagatttattggttttctatgaggcatttggcaaccctgaagagtttgtcattgttgaaaggacaccgcagggaccactggcagtacctatgtggaataagcatggatgctagttcactgtggagttgagatgcattttacataattatgagtttgttcatataaagaaaagctgtggaaaagagtcttagagattttgtaatatcattctaaatagattaagaaaagatataatttctttactgcagttaaatcatataatgtttgtatgattaaaaataaatttctcagaattgtgattttagtaactttatataaaatgtgtgagacaaaaacttattaaggttaaatagaattgtttcttctgaataatctaacaaaggaaaatataagtgattgaatcataagatataaggggggtaaagtattaaaaataacttttttgtttgataacttgagaatttagaagattttgccaagtatgtgttgttgcttgacttcttaaatatggcattgatgaatttaaagtaggagcatcagttattacttctgattcattaatggccagaattttgtgtttggtgtaatagttgtgtcaccattcttgttgctttttaaaaatcaggctaatcatgtggtccatgtctcttcaaagcttgacctgcacaaatgccatatttctatttggaccacatattctccattttgcattgagcagtagagtacagtggaaagggaataagaatactgattattctgaacagtttagtcccaagagaatagcgttttaaaaaagaaaaacaagatttggagtcattgtgggttatttttggtgggatggaggatcttaaaaatgcctaattgtgagagaatcaattgctgaaagtgttaaaatttctgaaaataaatgcttaattacatatacaggaattaaatagtttggaagagggttggattatcattacctttacaatactgtataatcagaagttctctgaacctcaattgtatatctagacataaaaattgttttctgtataggatgttgtttggtttgtttctgagtgtttaaattttgcaaaaacaaatgttaaatttgtgcttcagtacctagataaattggaaaggttaatgttctagtttctggaaggtaagcctgggagacacataaagcaattcactgctataatttagttgatgtaaaatgacggaaactgactcaatatgtcagtttaactctgcccaaagcagcagacatgtaagcagatgtgcattaaaaaatg

SEQ ID NO: 186261 - DNA, 1021 bp, Homo Sapiens
  misc_feature (446)..(466): n is a, c, g, or t
  misc_feature (876)..(906): n is a, c, g, or t
ctttgtacaaaaaagttggctcactgggtattcctctgatgatatcaacaagtttctttggatggtccggattggagggagcacagatacaggcaaacatatcaaggagaatgactattatactccaactggggagttccgtgtggaccgtgaaggttctccagtgctgctcaactgcctcatgtacaagatgtgttactatcgctttggacaggtttacacagaagccaagcgtcctccaggctttgaccgtgtccgaaatgctgagattgggaataaagactttgagcttgatgtcctggaggaagcatataccacagaacattggctggtcaggatatacaaggtaaaggacctggataatcgaggcttgtcaaggacataaatgtcacgtccagctctgatatgcttcgcactgagcacatcacatttaggacgttgaagannnnnnnnnnnnnnnnnnnnnaatatgcagtttgtaagaacaaaactggatggcatcagaattgtctggaagttttgtcttgggcagtatgggctgggccaaatgaaatgatttttataattctaaacaggttaccaaatgaaatgtcatggctttactttggtcaattaaaggggggaatttttttaaaaaatgtgccttatttgttttgacttataactgatttgagggaggcaaaagctatgctaggctgccagaaggacataagcaaaccttgtccattctcttagctccctaaattaaccaaatagagacttctttctcaaatcaggaaaactatcaaaaaccaattcaaatcctacatttacagacagttttgtcataaccctttgcattgcagcacctagtacaattccttggaaacagcgtgnnnnnnnnnnnnnnnnnnnnnnnnnnnnnnntgggaccagaaaagtgctagaagagtgcctttctgggctactatgtctctgttctcaatgtcttttatccttaaacgctctttgactttataaatcagcatttttgaagactcca

SEQ ID NO: 186262 - DNA, 1711 bp, Homo Sapiens
ttggcgcattcggagatgagctgttcagcgtgttcgagggcgactcgaccactgcggcgggaaccaaaaaagacaaggaaaaggacaaggggaaatggaaggggcctccagggtctgcagacaaggcagggaaacgttttgatggtaaattacaatcagaatcaactaataatggaaaaaataagagagatgtagatttcgaaggtacagatgaacccatttttggaaagaagcccaggatagaagagtcaataactgaagacttaagtttggcagacctgatgcccagagtcaaggtacaatcagttgaaactgttgaagggtgtacacatgaggttgcacttcctgcagaagaggattatttaccacttaaaccacgagttggaaaagctgctaaggaatacccgttcattcttgatgcttttcaaagagaggccattcagtgtgttgacaataatcagtctgttctagtatctgcacatacctcagcgggaaaaacagtatgcgccgagtatgccattgcattggccttaagggaaaagcagcgtgtaatatttaccagcccaattaaggctctgagtaaccaaaaataccgtgaaatgtatgaagaatttcaagatgttggtttgatgactggtgatgttactattaatcctacggcatcttgtcttgttatgaccacagagattttgagaagtatgctttacagaggttccgaagttatgagagaagttgcttgggttatatttgatgaaattcattatatgagagattcagaacgtggtgtagtatgggaagaaactattattttgcttcctgataacgtccactatgtctttctttcggctactattccaaatgcccgacagtttgctgaatggatttgccatttacataaacagccttgtcatgttatttacacagattatcggcccactccattgcaacactacatttttccagcagggggagatggcctgcatcttgtggttgatgaaaatggtgacttcagagaagataattttaatactgcaatgcaagtgcttcgagatgcaggtgatttggccaaaggagaccagaaagggcggaaaggaggaacaaaaggaccatcaaatgttttcaaaattgtgaagatgattatggaaagaaatttccaacctgtgattattttcagttttagtaagaaagattgtgaagcctatgcacttcaaatgaccaaattagatttcaacacagatgaagaaaagaagatggttgaagaagtattcagtaatgcaattgattgcttatccgatgaagataaaaaactccctcaggtagaacatgtacttcctcttttgaagaggggaattggtattcaccatggtggtttacttcctattttgaaagaaactatagaaattctcttttctgaaggattgataaaggccttatttgccacggagacctttgctatgggaattaacatgccagctagaactgttttatttacaaatgcccgcaaatttgatgggaaggatttccgatggatttcttctggtgaatacattcagatgtctggtcgtgctggaaggagaggaatggatgatagaggaattgtaattcttatggtagatgaaaagatgagctcaacaattggtaaaacaattacttaaagctccgctgatcctctaaatagtgctttccatttgacctacaacatggttttgaa

SEQ ID NO: 186263 - DNA, 998 bp, Homo Sapiens
caatgcttttttataatgccaactttgtacaaaaaagttggtgaagaatatattcacaaaccaaaatactgcttaccttttctacaaccaggtcgtttggtaaaggtaaagaatgaaggagatgactttggctggggagtagtggtgaatttctcaaaaaagtcaaatgttaagcctaactctggtgaactggatcctttgtatgtagtagaagtacttctgcgctgtagcaaagagagcttgaaaaattcagctacagaagctgcaaaaccagctaaacctgatgagaaaggagagatgcaggttgtcccagttttggtgcatctcctgtctgctatcagcagtgttaggctttacattcctaaagaccttcggccggtggacaatagacagagtgttttaaaatcaatacaggaagttcagaaacgttttcctgacggcatccccttattagaccctattgatgatatgggcattcaagatcaagggctgaaaaaagtcattcagaaagtagaagcttttgagcatcgaatgtattctcatccacttcacaatgatccaaatttggaaactgtgtatacgctttgtgaaaaaaaagcacagattgcaatagatattaaatctgcaaagcgagaactgaagaaagcaagaacagtcctacaaatggatgaactcaaatgtcgcaaacgtgttttaagaaggttgggatttgctacttcttctgatgtaatagagatgaaaggacgagtggcttgtgagataagcagtgctgatgagctccttctaactgagatgatgtttaatggccttttcaatgacctttctgcagaacaggcaacagcattattaagctgctttgtgtttcaagagaattctagtgagatgcccaaattaacagaacaattagcaggaccacttcgtcaaatgcaggaatgtgctaaaagaattgcaaaagtttcagcagaagccaaattgggaattgatgaggaaacctatct

SEQ ID NO: 186264 - DNA, 666 bp, Homo Sapiens
tttgtacaaaaaagttggctgattttgatcataccaaatgacataatattttttatggtagccttttactttcaagacttaattttcagacttgtacaagttccttcttacattctttccctctcacaccatcctactggagaaagcatacttttatgctaagatcttactttaagctttttatgtgaacaaaagatgtacatatagtaagtattacttccgtagtcctcaaatttactataacttttgtacttagtatatgttttatatttggaaaacagcactacgcttagttttcctgtagttcctgagtgatgtctgtgtgttccttgcctgcccttttttgtgagcacagattagtctgttatccatggctggcacttcacttatgatcctttctctgctagatttttatgcagctctctatgaagtttcatggcccatagatattcaaaagcaagatattctatacatatgtgtatatgtatatatactccttatgttaatactaaagtgtttatgctgagttgctgcctttccccgtcatgtatccatgtgcatgctcttagagaccttgaatggttgagggtaaagtgatttattagtaattctacttgccttgtgtatgtctgagctgaaaacaatcgtgattaagaaatttagagg

SEQ ID NO: 186265 - DNA, 1394 bp, Homo Sapiens
  misc_feature (1179)..(1189): n is a, c, g, or t
ttggatttcataagtcacgaattaaaatacttttttgtttttatattgcagattggtttttcagcagcagatgctgtaacaggactgaaattggtagaagagggagtacccaaagaacatttagccttattggcagttccaatggttcctttgcagataatactgcctctgattatcagcaaatacactgcaggtccccagccattaaacacattttacaaagccatgccctacaggtaaaaatgaaataaaaccttactaaataagaaagggtaaaatgaggaacattcatcaataccactaatatctgagcgtagaattatatatatggaaaaagatttgaaaagcatcttttttcaatattatttatatgcacttttatctttttaacctcctaacaggtttagatacagcttctttcatatggtaggcacacggatttctgtttttgttgttgttgttatttaagctaaaatggaagtcaactcaatgtttctttctctatagattattgcttgggttagaatatgccctactggtttggtggactcctaaagtagaacatcaagggggattccctatatattactatatcgtagtcctgctgagttatgctttacatcaggttacagtgtacagcatgtatgtttctataatggctttcaatgcaaaggttagtgatccacttattggaggaacatacatgacccttttaaataccgtgtccaatctgggaggaaactggccttctacagtagctctttggcttgtagatcccctcacagtaaaagagtgtgtaggagcatcaaaccagaattgtcgaacacctgatgctgttgagctttgcaaaaaactgggtggctcatgtgttacagccctggatggttattatgtggagtccattatttgtgttttcattggatttggttggtggttctttcttggtccaaaatttaaaaagttacaggatgaaggatcatcttcgtggaaatgcaaaaggaacaattaatatatatgctactggacattctagcaaggtaattgtagtttagttttaattcggagagcaatgataatcagtgcacaggagtataaaatattattttaaacagcgaaattaataatataaaatgccaaatggttgaaaaaatagaaacctttctgtatatttgatcatannnnnnnnnnngccttgtcaatgtatttaaagtttacttaaggtctgaaattctaaaacaacttttctggccttgttatttgatgtatatcttttaaatttactgaccaaagcatgttttaagctgcaatgcagtagtcacgggtggtaaccatgtagtcaggtattgttattagtactatcactgctgagctgtatttcaaattttggtacaata

SEQ ID NO: 186266 - DNA, 1532 bp, Homo Sapiens
  misc_feature (279)..(306): n is a, c, g, or t
ttggggcaagtcacatgcgtaaacgacactctctggaagccctggagaccctcgcccaactccaccagatagcagaggggtaagagaggatgtgcaagcgacgacagatgctaaaatccctggatcacgacgctgcagagcacctttgcacaggatgctggcctttgctcttactacactgaggagagattcccgcgggttccgcaggcagactacacaggatgaggtggtggagtggagtgagagcaattgtaacggttaactgtaacgttttctttnnnnnnnnnnnnnnnnnnnnnnnnnnnntgctaggatgcggaaatccccttatgacttgctactttttgattttgtgatattttgtactttttagttgttcagcaactgtcttatttaatggggagattttaagtaacataactagtggctctcagttaaaatgtgaggaagaactacagctcttaaatgtagcaatggcactgttgcaaactcagtgcaaacgcctagattgctttcttcttaacctatttatttctttgttaaatttttctgattgtttcctttatagagtgtctcagggtgcagaggtcagactaagaaatattccaaatgtcttttagaagatagatgcacttatgcagtaaattatcttgggatagttcccaaaagattgctgaaaaagtagattgagtataaaaacttgaaaatatatgatggctcgtgggatgtcctactatcactgaacaaactaaaggtgcactgctttgggatttaatttccagggttgcttgatcattatatcattggaacaactgatacttcactactttaataaagaattaacagagattgaactccaagaggtgggtaatttggtttaaaaatacatgttcatgggtttaccactaactcctgagaaatgttaaaggttcacaggggttcccttctctcaatgtttgtaataattgctcataagcaataccagcaattcataaaaactgcttacttatgccatagaaaattaaacacaaagtgtatacatgtattatgcttctaaatgctcattctaccagatacacatttaaaagagaaaaaaggaacagaaacaagtcatttgagagtggagacttataagaaggagtacatttgagttgaatacacaaatctttacttctctaccaattcctattcccaaaatgaacatattactggggaaagttagttgagaatcagagcatatgttattggggaaaggatatgtttattgacacataaatctgtaccaggtatgcattaaaatatatttgttaattttaatatttaaacctgagagataggtattgtttcccagatgaggacaatgaggcaaagaaatatcaagtaacttgccagggttacaagatattcattccatggatgcacaaagaagtgcatctagttcacagctgattatggttgtcttgctttttcttcccattgcaccagcttgtcctccaaaatcatgaatgatccccatgaagataccttttttt

SEQ ID NO: 186267 - DNA, 1657 bp, Homo Sapiens
  misc_feature (692)..(705): n is a, c, g, or t
  misc_feature (1285)..(1293): n is a, c, g, or t
ttggctccgggcccggggcgctggcctctgtgcccgcctctcacccggcacacggcttggcaccccacgagtcccagctgcacctgaaaggggacccccactactccttcaaccacccgttctccatcaacaacctcatgtcctcctcggagcagcagcataagctggacttcaaggcatacgaacaggcactgcaatactcgccttacggctctacgttgcccgccagcctgcctctaggcagcgcctcggtgaccaccaggaaccccatcgagccctcagccctggagccggcgtactaccaaggtgtgtattccagacccgtcctaaacacttcctagctcccgggactggggggtttgtctggcatagccatgctggtagcaagagagaaaaaatcaacagcaaacaaaaccacacaaaccaaaccgtcaacagcataataaaatcccaacaactatttttatttcatttttcatgcacaacctttcccccagtgcaaaagactgttactttattattgtattcaaaattcattgtgtatattactacaaagacaaccccaaaccaatttttttcctgcgaagtttaatgatccacaagtgtatatatgaaattctcctccttccttgcccccctctctttcttccctctttcccctccagacattctagtttgtggagggttatttnnnnnnnnnnnnnngggaagatggtcaagtttgtaaaatatttgtttgtgctttttccccctccttacctgaccccctacgagtttacagggtctgtggcaatactcttaaccataagaattgaaatggtgaagaaacaagtatacactagaggctcttaaaagtattgaaagacaatactgctgttatatagcaagacataaacagattataaacatcagagccattcgcttctcagtttacatttctgatacatgcagatagcagatgtctttaaatgaaatacatgtatattgtgtatggacttaattatgcacatgctcagatgtgtagacatcctccgtatatttacataacatatagaggtaatagataggtgatatacatgatacattctcaagagttgcttgaccgaaagttacaaggaccccaacccctttgtcctctctacccacagatggccctgggaatcaattcctcaggaattgccctcaagaactctgcttcttgctttgcagagtgccatggtcatgtcattctgaggtcacataacacataaaattagtttctatgagtgtataccatttaaagaannnnnnnnncagtaaaagggaatattacaatgttggaggagagataagttatagggagctggatttcaaaacgtggtccaagattcaaaaatcctattgatagtggccattttaatcattgccatcgtgtgcttgtttcatccagtgttatgcactttccacagttggacatggtgttagtatagccagacgggtttcattattatttctctttgctttctcaatgttaatttattgcatggtttattctttttctttacagctgaaattgctttaaatgatggttaaattacaaattaaattgttaatttttatcaatgtgattgtaattaaaaatattttgatttaataacaaaaataataccagatttta

SEQ ID NO: 186268 - DNA, 1317 bp, Homo Sapiens
  misc_feature (381)..(394): n is a, c, g, or t
  misc_feature (972)..(980): n is a, c, g, or t
ttggccagacccgtcctaaacacttcctagctcccgggactggggggtttgtctggcatagccatgctggtagcaagagagaaaaaatcaacagcaaacaaaaccacacaaaccaaaccgtcaacagcataataaaatcccaacaactatttttatttcatttttcatgcacaacctttcccccagtgcaaaagactgttactttattattgtattcaaaattcattgtgtatattactacaaagacaaccccaaaccaatttttttcctgcgaagtttaatgatccacaagtgtatatatgaaattctcctccttccttgcccccctctctttcttccctctttcccctccagacattctagtttgtggagggttatttnnnnnnnnnnnnnnggaagatggtcaagtttgtaaaatatttgtttgtgctttttccccctccttacctgaccccctacgagtttacaggtctgtggcaatactcttaaccataagaattgaaatggtgaagaaacaagtatacactagaggctcttaaaagtattgaaagacaatactgctgttatatagcaagacataaacagattataaacatcagagccatttgcttctcagtttacatttctgatacatgcagatagcagatgtctttaaatgaaatacatgtatattgtgtatggacttaattatgcacatgctcagatgtgtagacatcctccgtatatttacataacatatagaggtaatagataggtgatatacatgatacattctcaagagttgcttgaccgaaagttacaaggaccccaacccctttgtcctctctacccacagatggccctgggaatcaattcctcaggaattgccctcaagaactctgcttcttgctttgcagagtgccatggtcatgtcattctgaggtcacataacacataaaattagtttctatgagtgtataccatttaaagaannnnnnnnncagtaaaagggaatattacaatgttggaggagagataagttatagggagctggatttcaaaacgtggtccaagattcaaaaatcctattgatagtggccattttaatcattgccatcgtgtgcttgtttcatccagtgttatgcactttccacagttggacatggtgttagtatagccagacgggtttcattattatttctctttgctttctcaatgttaatttattgcatggtttattcttttttctttacagctgaaatttgctttaaatgatggttaaaattacaaattaaatttgttaatttttatcaatgtgattgtaattaaaaaaatttt

SEQ ID NO: 186269 - DNA, 975 bp, Homo Sapiens
  misc_feature (203)..(211): n is a, c, g, or t
  misc_feature (890)..(908): n is a, c, g, or t
ttggctcaagagttgcttgaccgaaagttacaaggaccccaacccctttgtcctctctacccacagatggccctgggaatcaattcctcaggaattgccctcaagaactctgcttcttgctttgcagagtgccatggtcatgtcattctgaggtcacataacacataaaattagtttctatgagtgtataccatttaaagaannnnnnnnncagtaaaagggaatattacaatgttggaggagagataagttatagggagctggatttcaaaacgtggtccaagattcaaaaatcctattgatagtggccattttaatcattgccatcgtgtgcttgtttcatccagtgttatgcactttccacagttggacatggtgttagtatagccagacgggtttcattattatttctctttgctttctcaatgttaatttattgcatggtttattctttttctttacagctgaaattgctttaaatgatggttaaaattacaaattaaattgttaatttttatcaatgtgattgtaattaaaaatattttgatttaaataacaaaaataataccagattttaagccgtggaaaatgttcttgatcatttgcagttaaggactttaaataaatcaaatgttaacaaaagagcatttctgttattttttttcacttaactaaatccgaagtgaatatttctgaatacgatatttttcaaattctagaactgaatataaatgacaaaaatgaaaataaaattgttttgtctgttgttataatgaatgtgtagctagtaaaaaggagtgaaagaaattcaagtaaagtgtataagttgatttaatattccaagagttgagatttttaagattctttattcccagtgatgtttacttcannnnnnnnnnnnnnnnnnngacaccggcttaagccttctgtgtttcctttgagccttttcactacaaaatcaccaacttttttgta

SEQ ID NO: 186270 - DNA, 1215 bp, Homo Sapiens
  misc_feature (237)..(250): n is a, c, g, or t
  misc_feature (828)..(836): n is a, c, g, or t
ttggatttttatttcatttttcatgcacaacctttcccccagtgcaaaagactgttactttattattgtattcaaaattcattgtgtatattactacaaagacaaccccaaaccaatttttttcctgcgaagtttaatgatccacaagtgtatatatgaaattctcctccttccttgcccccctctctttcttccctctttcccctccagacattctagtttgtggagggttatttnnnnnnnnnnnnnnggaagatggtcaagtttgtaaaatatttgtttgtgctttttccccctccttacctgaccccctacgagtttacaggtctgtggcaatactcttaaccataagaattgaaatggtgaagaaacaagtatacactagaggctcttaaaagtattgaaagacaatactgctgttatatagcaagacataaacagattataaacatcagagccatttgcttctcagtttacatttctgatacatgcagatagcagatgtctttaaatgaaatacatgtatattgtgtatggacttaattatgcacatgctcagatgtgtagacatcctccgtatatttacataacatatagaggtaatagataggtgatatacatgatacattctcaagagttgcttgaccgaaagttacaaggaccccaacccctttgtcctctctacccacagatggccctgggaatcaattcctcaggaattgccctcaagaactctgcttcttgctttgcagagtgccatggtcatgtcattctgaggtcacataacacataaaattagtttctatgagtgtataccatttaaagaannnnnnnnncagtaaaagggaatattacaatgttggaggagagataagttataggggagctggatttcaaaacgtggtccaagattcaaaaatcctattgatagtggccattttaatcattgccatcgtgtgcttgtttcatccagtgttatgcacttttccacagttggacatggtgttagtatagccagacgggtttcattattatttctctttgcttttctcaatgtttaatttattgcatggttttattcttttcctttacagctgaaaattgctttaaatgatggttaaaattaccaattaattgttaaatttatcaatgtgaattgtaattaaaatattttggatttaataaccaaaataataccaaaattttaagccctgg

SEQ ID NO: 186271 - DNA, 1125 bp, Homo Sapiens
  misc_feature (334)..(342): n is a, c, g, or t
  misc_feature (920)..(933): n is a, c, g, or t
aaatatttttaattacaatcacattgataaaaattacaatttaaatttgtaattttaaccatcatttaagcaatttcagctgtaaagaaaaagaataaaccatgcaataaatttaacattgagaaagcaaagagaaataataatgaaacccgtctggctatactaacaccatgtccaactgtggaaagtgcataacactggatgaaacaagcacacgatggcaatgattaaaatggccactatcaataggatttttgaatcttggaccacgttttgaaatccagctccctataacttatctctcctccaacattgtaatattcccttttactgnnnnnnnnnttctttaaatggtatacactcatagaaactaattttatgtgttatgtgacctcagaatgacatgaccatggcactctgcaaagcaagaagcagagttcttgagggcaattcctgaggaattgattcccagggccatctgtgggtagagaggacaaaggggttggggtccttgtaactttcggtcaagcaactcttgagaatgtatcatgtatatcacctatctattacctctatatgttatgtaaatatacggaggatgtctacacatctgagcatgtgcataattaagtccatacacaatatacatgtatttcatttaaagacatctgctatctgcatgtatcagaaatgtaaactgagaagcaaatggctctgatgtttataatctgtttatgtcttgctatataacagcagtattgtctttcaatacttttaagagcctctagtgtatacttgtttcttcaccatttcaattcttatggttaagagtattgccacagacctgtaaactcgtagggggtcaggtaaggagggggaaaaagcacaaacaaatattttacaaacttgaccatcttccnnnnnnnnnnnnnnaaataaccctccacaaactagaatgtctggaggggaaagagggaagaaagagaggggggcaaggaaggaggagaatttcatatatacacttgtggatcattaaacttcgcaggaaaaaaattggtttggggttgtctttgtagtaatatacacaatgaattttgaatacaataataaagtaacagtctccaa

SEQ ID NO: 186272 - DNA, 1540 bp, Homo Sapiens
  misc_feature (579)..(592): n is a, c, g, or t
  misc_feature (1170)..(1178): n is a, c, g, or t
acaaaaaagttggcaacaacctcatcgtcctcctcggagcagcagcataagctggacttcaaggcatacgaacaggcactgcaatactcgccttacggctctacgttgcccgccagcctgcctctaggcagcgcctcggtgaccaccaggagccccatcgagccctcagccctggagccggcgtactaccaaggtgtgtattccagacccgtcctaaacacttcctagctcccgggactggggggtttgtctggcatagccatgctggtagcaagagagaaaaaatcaacagcaaacaaaaccacacaaaccaaaccgtcaacagcataataaaatcccaacaactatttttatttcatttttcatgcacaacctttcccccagtgcaaaagactgttactttattattgtattcaaaattcattgtgtatattactacaaagacaaccccaaaccaatttttttcctgcgaagtttaatgatccacaagtgtatatatgaaattctcctccttccttgcccccctctctttcttccctctttcccctccagacattctagtttgtggagggttatttnnnnnnnnnnnnnnggaagatggtcaagtttgtaaaatatttgtttgtgctttttccccctccttacctgaccccctacgagtttacaggtctgtggcaatactcttaaccataagaattgaaatggtgaagaaacaagtatacactagaggctcttaaaagtattgaaagacaatactgctgttatatagcaagacataaacagattataaacatcagagccatttgcttctcagtttacatttctgatacatgcagatagcagatgtctttaaatgaaatacatgtatattgtgtatggacttaattatgcacatgctcagatgtgtagacatcctccgtatatttacataacatatagaggtaatagataggtgatatacatgatacattctcaagagttgcttgaccgaaagttacaaggaccccaacccctttgtcctctctacccacagatggccctgggaatcaattcctcaggaattgccctcaagaactctgcttcttgctttgcagagtgccatggtcatgtcattctgaggtcacataacacataaaattagtttctatgagtgtataccatttaaagaannnnnnnnncagtaaaagggaatattacaatgttggaggagagataagttatagggagctggatttcaaaacgtggtccaagattcaaaaatcctattgatagtggccattttaatcattgccatcgtgtgcttgtttcatccagtgttatgcactttccacagttggacatggtgttagtatagccagacgggtttcattattatttctctttgctttctcaatgttaatttattgcatggtttattctttttctttacagctgaaattgctttaaatgatgggttaaaattacaaattaatttgttaattttatcaatgtgattgtatttaaaatatcttgatttaaataaccaaaatataccagattt

SEQ ID NO: 186273 - DNA, 932 bp, Homo Sapiens
  misc_feature (713)..(775): n is a, c, g, or t
ttgggtaaggagttccttgcaaaagaagaaagccaaataccagtggatgaagtgtttttccacaggtattataaaaaagttgctgttaaagagaaacaaaaacgggatgcagatgaagaaagtatagaagacgtggatgatgaagaatttgaagagctgattgacacatttgaagatgataactgtttcagctctggaaaggatgatatggattttgctggaaacgtgaaaaagagaacaaaaggagctaaggataacacattagatgaagattcagaaggtagtgatgatgaacttggtaacctggatgacgatgaagtttctttaggaagtatggatgatgaagaatttgctgaagttgatgaagatggaggaacattcatggatgtgttagatgatgaaagtgagagcgttccagaacttgaagtccactccaaagtcagtactaagaaaagcaagagaaaaggtacagatgattttgactttgctggctcatttcaagggccaagaaaaaagaaaagaaacttaaatgattccagcctatttgtatctgctgaagagtttggccatctattggatgaaaatatgggatccaagtttgataacattggcatgaatgccatggctaacaaagataatgcaagtctcaaacagcttagatgggaggctgaacgtgatgactggctacacaacagagatgcaaaaagtatcannnnnnnnnnnnnnnnnnnnnnnnnnnnnnnnnnnnnnnnnnnnnnnnnnnnnnnnnnnnnnnggaaatgagttattaatgtaaattatagattaaaattctacttacatctaatttttgctgttcaaccatgttttttgatctagctctctgattccatacattccagacttctcagtggatttgtaataaactataaataaaaatagctctcatttat

SEQ ID NO: 186274 - DNA, 1060 bp, Homo Sapiens
  misc_feature (838)..(865): n is a, c, g, or t
ccaactttgtacaaaaaagttggctcaccaacttaaaacatctatagggtctgtattttaggtttcccagttacatatcttttcctctttcctatccagtgagaatgatattacaggtgttttggaccataccttctgtgttgaacataatgcatatggtggaattattcagcatgaacttaaaccaaatggcaaaagtatccctgttaatgaagaaaataaaaaagaatatgtcaggctctatgtgaactggagatttttacgaggcattgaggctcaattcttggctctgcagaaaggatttaatgaagtaattccacaacatctgctgaagacatttgatgagaaggagttagagctcattatttgtggacttggaaagatagatgttaatgactggaaggtaaacacccggttaaaacactgtacaccagacagcaacattgtcaaatggttctggaaagctgtggagttttttgatgaagagcgacgagcaagattgcttcagtttgtgacaggatcctctcgagtgcctctgcagggcttcaaagcattgcaaggtgctgcaggcccgagactctttaccatacaccagattgatgcctgcactaacaacctgccgaaagcccacacttgcttcaatcgaatagacattccaccctatgaaagctatgaaaagctatatgaaaagctgctaacagccattgaagaaacatgtggatttgctgtggaatgacaagcttcaaggatttacccaggactctatttatacaaccctgactgacagcctcctttcagcagagtttcaaagaatatgctgaaatacaggaaaacactnnnnnnnnnnnnnnnnnnnnnnnnnnnnacattttaggacactgtgaggggaaaggacaattttgaaattccttttcaaggaaaaaaaaggtctttatgctttgccatgaggccacattcagctgctatttaaacttaatatcttgaacctaaagaatgctgacttttcctacatttccagagttagggcagtattctacacttaaagactactactattttt

SEQ ID NO: 186275 - DNA, 1749 bp, Homo Sapiens
ttggatggaatcacaagaagatccataagaaacaaggtgctggatttctcggttgtgttcgtcttctttccaatgccatcaaccgcctcaaagacactggttatcagaggttggatttatgcaaactcgggccaaatgacaatgatacagttagaggacagatagtagtaagtcttcagtccagagaccgaataggcacaggaggacaagttgtggactgcagtcgtttatttgataacgatttaccagacggctgggaagaaaggagaaccgcctctggaagaatccagtatctaaaccatataacaagaactacgcaatgggagcgcccaacacgaccggcatccgaatattctagccctggcagacctcttagctgctttgttgatgagaacactccaattagtggaacaaatggtgcaacatgtggacagtcttcagatcccaggctggcagagaggagagtcaggtcacaacgacatagaaattacatgagcagaacacatttacatactcctccagacctaccagaaggctatgaacagaggacaacgcaacaaggccaggtgtatttcttacatacacagactggtgtgagcacatggcatgatccaagagtgcccagggatcttagcaacatcaattgtgaagagcttggtccattgcctcctggatgggagatccgtaatacggcaacaggcagagtttatttcgttgaccataacaacagaacaacacaatttacagatcctcggctgtctgctaacttgcatttagttttaaatcggcagaaccaattgaaagaccaacagcaacagcaagtggtatcgttatgtcctgatgacacagaatgcctgacagtcccaaggtacaagcgagacctggttcagaaactaaaaattttgcggcaagaactttcccaacaacagcctcaggcaggtcattgccgcattgaggtttccagggaagagatttttgaggaatcatatcgacaggtcatgaaaatgagaccaaaagatctctggaagcgattaatgataaaatttcgtggagaagaaggccttgactatggaggcgttgccagggaatggttgtatctcttgtcacatgaaatgttgaatccatactatggcctcttccagtattcaagagatgatatttatacattgcagatcaatcctgattctgcagttaatccggaacatttatcctatttccactttgttggacgaataatgggaatggctgtgtttcatggacattatattgatggtggtttcacattgcctttttataagcaattgcttgggaagtcaattaccttggatgacatggagttagtagatccggatcttcacaacagtttagtgtggatacttgagaatgatattacaggtgttttggaccataccttctgtgttgaacataatgcatatggtgaaattattcagcatgaacttaaaccaaatggcaaaagtatccctgttaatgaagaaaataaaaaagaatatgtcaggctctatgtgaactggagatttttacgaggcattgaggctcaattcttggctctgcagaaaggatttaatgaagtaattccacaacatctgctgaagacatttgatgagaaggagttagagctcattatttgtggacttggaaagatagatgttaatgactggaagtaaacacccggttaaaacactgtacaccagacagcaacattgtcaaatggttctggaaagctgtgga

SEQ ID NO: 186276 - DNA, 1578 bp, Homo Sapiens
ttgggacgcgcgctgccggggcgaggttgcgaggggcggtgttgaagaatgtgtgggcgaacatcctgtcacttacctagagatgttctcacgagagcttgcgcctaccaggatcggcggggccagcagcggctcccggagtggagggaccctgataagtactgcccctcttacaacaagagtcctcaatccaacagcccagtgcttctgtctcgactgcactttgagaaggatgcagactcatctgagcgtatcattgctcccatgcgctggggcttggtcccttcttggttcaaagaaagtgatccttccaagctgcagttcaatactaccaactgtcgtagtgataccgtaatggagaaacggtcatttaaggtgcctctgggaaagggaagacgctgtgtcgttttagcagatggattctatgagtggcagcgatgtcagggaacaaaccagaggcagccatacttcatctattttcctcaaatcaagacagagaagtcaggtagcattggtgctgcagatagtcctgagaactgggagaaagtctgggacaactggaggctgctgacaatggccgggatctttgactgctgggagcccccagagggaggagatgtcctgtattcctataccatcatcacagtggattcctgcaaaggcttgagtgacatccaccacaggatgcctgccatattagatggagaggaggcagtttctaaatggcttgactttggtgaagtctcaactcaggaagctctgaaattaatccacccaacagagaacatcaccttccatgcagtctcttctgtggtgaacaactcgcgaaacaacactcctgagtgtctggctcctgtcgacttggtggtcaaaaaggagctcagggcaagtggcagtagccagaggatgttgcagtggttggccacaaagtcacccaaaaaggaagactcaaaaacacctcaaaaggaagagtcagatgttccccagtggtccagtcagttcctgcagaagagtccactccccaccaagagaggcactgcaggactcctagagcaatggctgaagcgggagaaggaggaggaacctgtggccaagcgtccttacagccagtgacacaggactttcagagaccaaggccagggtctgctgcactgctgttctgataataggttcttaacattgtatgtatatgtgtttgctttgggaggaggtggcactgtgttagttgacagttgtgggctcatgtagtcttttttgccatgagtaggagcccctagtggggctggtggacagctttggaagaggtgtcctgctgctgttaccagccatgtgggccccataggggcactgcgcctgctgccctttcctggcagggctggtggagtcttccctcaaagcatgccttacccagctgggaagtctctgccctgatctggtactccttgtagtaagctgttttctgctcagccactgggctctttcacttttttagttcttaaaaatttatttttaagttctaaaataaaataaaaataagttcttaaaatttatttttttcctgaataaattgtatttggt

SEQ ID NO: 186277 - DNA, 2134 bp, Homo Sapiens
  misc_feature (810)..(848): n is a, c, g, or t
  misc_feature (1010)..(1183): n is a, c, g, or t
ttggcttgagggcatattttgatcctctgcctccccttcctcttcttgttttggtgaatctgcattcaggtggccaagtatttgcatttccttcagaccaggctataattgaagaaaaccttgtattgtggctgaagaaattagaagcaggactagaaaatcatatcacaattttacctgctcaagaatggaaacctcctcttccagcttatgattttctaagtatgatagatgccgcaacatctcaacgtggcactaggaaagttcccaagtgtatgaaagaaacagatgtgcaggagaatgataaggaacaacatgaagataaatcggcagtcagaaaagaaccgattgaaactctgagaataaagcattggaatagaagtaattggtttaaagaagcagaaaaatcatttagacgtgataaagagttaggatgctcaaaagtgaactaattttatagggctgtggtttccaaaatttttttggcatgatagacttaatttatttccttaaagaataatattaaatcatttcaagtttgcagactagtgccatccaatagaattataatataagtcacatattttatttaaaattttctagtaactacattaaacaaagtaaaagtgagcagggcaaaataattttgatattacttttcacccagtagtatacccaaaatagcgaaatatagaaattattaatgagatattttacatccttttttgtaccaagtcttctaaatgcagtacatattttatacttactgcatttcttacttccgagtagccatatttcaagtgttccttnnnnnnnnnnnnnnnnnnnnnnnnnnnnnnnnnnnnnnntactagacaaaaactagcataattaacttagttctagccatgatttctatttggattaaaattaaactctaatcacagttaactccacagtgcattcatgcagctgacagttatatttgttttattggagtcatgatattaaaatcagcgtttgtcaacctnnnnnnnnnnnnnnnnnnnnnnnnnnnnnnnnnnnnnnnnnnnnnnnnnnnnnnnnnnnnnnnnnnnnnnnnnnnnnnnnnnnnnnnnnnnnnnnnnnnnnnnnnnnnnnnnnnnnnnnnnnnnnnnnnnnnnnnnnnnnnnnnnnnnnnnnnnnnnnnnnnnnnnnnnnnnnntgttaaaagtaacctgtggcagactaggtttccagaatttcctggttctgctcacgtatcatgtttgaaaaaattttggctattaaagatatgtattagatggtcttatcctgattattacctggatacaacttgatcttttctaatattttcagaaagtgatgggataaccctagaagaggactcagaatgatatttatattttaagtgagtcttaaaacctcctcttatttctacaagttatatggctaaatttcagattgaacagggattcagcattctgccatctcctcatggaaagagaggctccctcatctgaagcgtctctgaaatctacccttgcaagcttcagacaaatcagttgatctccctgagccacacggcctcattctgtgagggagggaaagattagccaaagagttaattttcattccaaatcacttagctgttagactgatctgtttgtagcagttgtttgtctcatttttgctctgtgcattttttgagacatttgttgagaatattctatttggtgctctactgtatttttctttttaatatctacttgatatcttgttctttaaattttcttcacatatggtttgcctgatacaactgatttttataactgaaatttaaggaatctaacagctaaaactcagtaagtgcatatatttccttataacatagacccgttgctactctcagcaccctctcctcaattttttttcctgtagcatgtgatgcctgattaaactcattttcatttgcttttatttctaatatgggaacaatgagagtgaactctaaatataggttgtagtaataaaacatcattagcctaattattagaaaatgctaattaattaccagcacatagaaacatgaaattgcttagtcattgtacctttgtcagcaattttgacagtcattaatgtttgtcataatttt

SEQ ID NO: 186278 - DNA, 2216 bp, Homo Sapiens
  misc_feature (1052)..(1106): n is a, c, g, or t
  misc_feature (1596)..(1632): n is a, c, g, or t
ttggaggaggactggctgtcagtgaacatgaacgtggctgatgccactgtgactgtcatcagtgaaaagaatgaagaggaagtcttagtggaatgtcgtgtgcgattcctgtccttcatgggtgttgggaaggacgtccacacatttgccttcatcatggacacggggaaccagcgctttgagtgccacgttttctggtgcgagcctaatgctggtaacgtgtctgaggcggtgcaggccgcctgcatgttacgatatcagaagtgcttggtagccaggccgccttctcagaaagttcgaccacctccaccgccagcagattcagtaaccagaagagtcacaaccaatgtaaaacgaggggtcttatccctcattgacactttgaaacagaaacgccctgtcaccgaaatgccatagctgcacatgcaaaaggactcggctatttacctgaagattgactagctacactaaagaaaatgaactccgccatccgaccttccatccagttgctgatgctttgtcttcagagaatttacccttaaccaagcagtgttagacaagcatgttctctcgtcttgccaccatcatgtgatatgaaaagaagcatgaataattttttttgctgtaagttacatcatgcgcagtggaaggtctttttcttattgtaaatattgtgaacattacttaacttcacacacacacagagaagagtgtggccccacccctcctagtgaactaacgctgcgtccttggaatgaatgatgcgtgagttagtttcactgtcttcttggctggacctgtcacaagcaacctttaagtcctacagcactttgccctgttttcaacattggagtaggcactgcatagcagataccattgaattgctgtaaaaataggatggcgagtttgtgttttaatttttcataaaattgaacctgttggttgacaaaattggctgttggcatcagtatagaaaccaactggcagctttccctgacaagctctttgacacatggacaccatttcatgtctacagctgtttgtgggatgtnnnnnnnnnnnnnnnnnnnnnnnnnnnnnnnnnnnnnnnnnnnnnnnnnnnnnnncgaacaaaacatagcctttcttttccgatggttttcaaactgattatttttaaaagagattaataaaatcataatgcattttgggtgggacatatttcaaacttctgccttatattgtacggtgcagctagagaattatagttcactatggccattctctacataaacattaagatgaaatactcctcatcagcctttcatccttagtttgagaattagctgatatgcaatttgaagttgaggaaatatcattgatatttctatcatgcacgattattttagatttctaccaccgtgtgatttttgctagtccatgtgctagaggtaaacgttctgctggaattctgcatccagctctatccccctctgatgctttttgcccagaaagctgtctgtccatcatgtattgtccatggcaacaaattacattaggttgaacctttccttgattttatgtatttaatattagaatttgttggactcaactagnnnnnnnnnnnnnnnnnnnnnnnnnnnnnnnnnnnnngaagatttgaaatgttcatacctgagcaaagtctacacaggagtaatggactgtttaacaagtttcccaaaacagcattttcctgctccttcgtatgtaggtgagaaacttagctggaaagacatacaaatttagactctcgttgacattgtcgttttaaaaggaagttgctaaggcgatcaatctcaatattagtcttgtttacttcttcttaatgtcaaaattaacatttacaacatccaattataaaagtaatgctttatgtttatacactgctatgtacttgtcaaaatggtttccacattcttatcacatctgagccttaccaggtagagaaggtactaaatacactttagaagtaaaaatatgaagtaccgagaggctaaacccactggcctaagatctcaccaaagttcatgaaaaccaggactaggacccacggctctcaaagcccgttcttgctgtgttgtgctgcctccatatccgtcagaagagcctttccagaatgattctggtatatactaagaagagcaggtatggaagatctattgtcagggaatcctaaaattccctacacgagtggg

SEQ ID NO: 186279 - DNA, 1323 bp, Homo Sapiens
ttggcacagagccgcccatgcacttcggtcacgaaaactggacaaattgtatgaagcatgtcgttaccttgcagctaggtgccattatgctgcaaaagagcaccagcaggcccttgatgttcttgacatggaagagcccatcaataaaagattatttgaaaaatacttgaaggacgaaagtggcttcaaagatccttccagcgactgggaaatgtcacagtcttcaataaagagttctatctgtcttctacgcgggaaaatctatgatgctctagataaccgaaccctggctacctacagctacaaagaagctttgaagcttgatgtctactgttttgaagcgttcgatcttttaacatcacatcacatgctgacagcacaagaagaaaaagaacttcttgaatcactaccccttagcaagctgtgtaatgaagaacaggaattgctgcgttttctatttgagaacaaattgaaaaaatataataagcctagtgaaacggtcatccctgaatctgtagatggcttgcaagagaatctggatgtggtagtgtctttagctgagagacattattataactgtgattttaaaatgtgctacaagcttacttctgtagtaatggagaaagatcctttccatgcaagttgtttacctgtacatatagggacgcttgtagagctgaataaagccaatgaacttttctatctttctcataaactggtggatttatatcctagtaatcctgtgtcttggtttgcagtgggatgttactatctcatggtcggtcataaaaatgaacatgccagaagatatctcagcaaagccacaacacttgagaaaacctatggacctgcatggatagcctatggacattcatttgcggtggagagtgagcacgaccaagcgatggctgcttacttcacagcagcacagctgatgaaagggtgtcatttgcctatgctgtatattggattagaatatggtttgaccaataactcaaaactagctgaaaggttcttcagccaagctctgagcattgcaccggaagacccttttgttatgcatgaggtcggcgtggttgcatttcagaatggagaatggaaaacagccgaaaaatggtttcttgatgctttggaaaaaattaaagcaattgggaacgaggtaacagttgacaaatgggaacctttgttgaacaacttggggcatgtctgcagaaaacttaaaagtatgctgaggcttggattaccaccgtcacgcactggtgttgattcctcagaacgcatccacctactctgctattggatatatccacagtctgatgggca

SEQ ID NO: 186280 - DNA, 1163 bp, Homo Sapiens
cctataaaagccaactttgtacaaaaaagttgggtttgcagtgggatgttactatctcatggtcggtcataaaaatgaacatgccagaagatatctcagcaaagccacaacacttgagaaaacctatggacctgcatggatagcctatggacattcatttgcggtggagagtgagcacgaccaagcgatggctgcttacttcacagcagcacagctgatgaaagggtgtcatttgcctatgctgtatattggattagaatatggtttgaccaataactcaaaactagctgaaaggttcttcagccaagctctgagcattgcaccggaagacccttttgttatgcatgaggtcggcgtggttgcatttcagaatggagaatggaaaacagccgaaaaatggtttcttgatgctttggaaaaaattaaagcaattgggaacgaggtaacagttgacaaatgggaacctttgttgaacaacttggggcatgtctgcagaaaacttaaaaagtatgctgaggccttggattaccaccgtcaggcactggtgttgattcctcagaacgcatccacctactctgctattggatatatccacagtctgatgggcaactttgaaaatgctgtggactacttccacacagcccttggtcttaggcgagatgatacattttctgttacaatgcttggtcattgcatcgaaatgtacattggtgattctgaagcttatattggagcagacattaaagacaaattaaaatgttatgactttgatgtgcatacaatgaagacactaaaaaacattatttcacctccgtgggatttcagggaatttgaagtagaaaaacagactgcagaagaaacggggcttacgccattggaaacctcaaggaaaactccagattccagaccttccttggaagaaacctttgaaattgaaatgaatgaaagtgacatgatgttagagacatctatgtcagaccacagcacgtgactccagtcagtggtcctggtcccactgtcccagtgtaggttagtattccttcacatcctctccatggcttaagaatgtcccacttcctaacgtgactccaactgcatctctacatttagtaacagagacccgcccttaagagactggatcgcacacctttgcaacagatgtg

SEQ ID NO: 186281 - DNA, 1339 bp, Homo Sapiens
  misc_feature (308)..(344): n is a, c, g, or t
  misc_feature (413)..(422): n is a, c, g, or t
cccgccccttgcccagggccaggctgggaagagactgcagcagccgtgcccgcggcgccccgagctttgggtgcagcattttggttgaggagccgggcttcagccacgggccccacccctgccttcccctttggttttcggagagggcctgagacacggccctcacccctgacaacaatgcctgtccccctcccaggagaggcctgaggcaagacagctccacagcacccctccaggccgggcctgccctcccctcgagaaaacggcctttggatcgagggagacaagctggactttatgacgctaannnnnnnnnnnnnnnnnnnnnnnnnnnnnnnnnnnnnctccaggatcacactactcacttcagcaaagaaacggaggggcaggagtggggtagggcgggcctctgnnnnnnnnnncctcttttccttgttttaaatagttaatgctcttggaggggaggactagacacaggtgtagaaatttcggccaaagtcttacatgaaggaagtgaccccacgtcccgggggtggggccgctgagccaggcgcggcccctgcagtctgcgttctggcttccagccagggtctggccctgggccgctgtgggtgggccccgagggcctcgcacaaggtcgcgccccaaggggctgcacggagaagattcagggggctgcacgcgcccagggtcacttgtgtcgctgcagcgattttctctttctcctcttgaagaaacagcagcatttggtttcatcggccacctccacctctgcaggcgctgtgatcggggcgttggagtggccggccgtggggtcgtccgcattcagctccccgttggtggagttcaacgcctggtttttgctgtgcggctgggttttgtcccggagctgaggctgggagggcaggtcggtgtggacggtgccgatgggggtcggcaggggcttcccggcccagtcgtactcatagtcgaacacgaagccactgcggtcgaagaggtcggtgaagagcttccgcaggtagtcatagtcgggcttctcgaagaagtccaggcgccgcacatagcgcaggtacgtggccatctcctctgggaagttctcgcagagcacctcgatgggcgtggcgcgtttggtgtccccgatcttctggtaccgctccttgagcgtgtcggccttgagcccctgccaggggaggctgccgcgcaggaagtacatgaacatgtggcccagcgcctccaggtcgtcgcggcggctctgctccttgcccaggtgcgtgttgatgctcatgtagcgcgccgtgcccgtcaggctcttgtgctcgcggtacgggatgtgctccaa

SEQ ID NO: 186282 - DNA, 1796 bp, Homo Sapiens
ttggcacgagatgctgctgccggcgcccgcgctccgccgcgccctgctgtcccgcccctggaccggggccggcctgcggtggaagcacacctcctccctgaaggtggccaacgagcccgtcttagccttcacgcagggcagccctgagcgagatgccctgcaaaaggccttgaaggacctgaagggccggatggaagccatcccatgcgtggtgggggatgaggaggtgtggacgtcggacgtgcagtaccaagtgtcgccttttaaccatggacataaggtggccaagttctgttatgcagacaagagcctgctcaacaaagccattgaggctgccctggctgcccggaaagagtgggacctgaagcctattgcagaccgggcccagatcttcctgaaggcggcagacatgctgagtgggccgcgcagggctgagatcctcgccaagaccatggtgggacagggtaagaccgtgatccaagcggagattgacgctgcagcggaactcatcgacttcttccggttcaatgccaagtatgcggtggagctggaggggcagcagcccatcagcgtgcccccgagcaccaacagcacggtgtaccggggtctggagggcttcgtggcggccatctcgccctttaacttcactgcaatcggcggcaacctggcgggggcaccggccctgatgggcaacgtggtcctatggaagcccagtgacactgccatgctggccagctatgctgtctaccgcatccttcgggaggctggcctgccccccaacatcatccagtttgtgccagctgatgggcccctatttggggacactgtcaccagctcagagcacctctgtggcatcaacttcacaggcagtgtgcccaccttcaaacacctgtggaagcaggtggcccagaacctggaccggttccacaccttcccacgcctggctggagagtgcggcggaaagaacttccacttcgtgcaccgctcggccgacgtggagagcgtggtgagcgggaccctccgctcagccttcgagtacggtggccagaagtgttccgcctgctcgcgtctctacgtgccgcactcgctgtggccgcagatcaaagggcggctgctggaggagcacagtcggatcaaagtgggcgaccctgcagaggattttgggaccttcttctctgcagtgattgatgccaagtcctttgcccgtatcaagaagtggctggagcacgcgcgctcctcgcccagcctcaccatcctggctgggggcaagtgtgatgactccgtgggctactttgtggagccctgcatcgtggagagcaaggaccctcaggagcccatcatgaaggaggagatcttcgggcctgtactgtctgtgtacgtctacccggacgacaagtacaaggagacgctgcagctggttgacagcaccaccagctatggcctcacgggggcagtgttctcccaggataaggacgtcgtgcaggaggccacaaaggtgctgaggaatgctgccggcaacttctacatcaacgacaagtccactggctcgatagtgggccagcagccctttgggggggcccgagcctctggaaccaatgacaagccagggggcccacactacatcctgcgctggacgtcgccgcaggtcatcaaggagacacataagcccctgggggactggagctacgcgtacatgcagtgagcccctctcgggctccaccgtccagctgtctgtccgtccaggtggccgacctcactgcacagaccccactccagccccttccaccccttcttca

SEQ ID NO: 186283 - DNA, 1193 bp, Homo Sapiens
  misc_feature (564)..(587): n is a, c, g, or t
cttttaaaagcccactttgtacaaaaaagttggctgtctcagagcactggcccgccttcgggatcaagtgtgacggcagaacccgctctgaggtttcctggccatagccaccctttgaaatgctctctgtgtgttagagagatactataccctagaaactctgaacacgccagaatgctgaaatgcccttctacctttgggtttacagccccctccacataaattaagaaattcagtatttctgcactcttagctggattctaaagttctgtatagctcgtaatgatggtatttttatagcagccttttaacagaactagttaatttcgtgtatatgaatctttctcgaagatctggtcaaaactgtattcagtttcctgcccagaatgatcagattgaaggtggttggtttttattattatttagtgtgattgatagtatctagaatggcaggtggtgcataaaagttaaagagaggggaaagattacttagtttggttatacagttataaacaccatgcagtgtattcggtggactgtgctatttctgtttatcctttgggnnnnnnnnnnnnnnnnnnnnnnnngccttcacagtgagactgcaaatgattgttctcataacgtatattattaataaatgtggtcctataatttatactgaaattaccttaggatatttttgcataatactctcttactgcttacattctataaatttttcacgtgataattgtctttgcgtaactgggaaaaatgccgaataacttcctttattatctggaaaaattaaatttgttcatttatattttctacttactaaattgagtttttaaaaagacttagtgtgacatttgacagtgtctttcaaacgaacttctctaacaagtttatagttattttcctgtttcaacactattagaagtcttataaattatgctaattagcatggcagtcatgttacacactcttaacattgccaaagaactgttgatttcgtttgagaaaaccctgggactgtgtgtgtgtaggttttgttttgattttaacaaccaaaaatagaaataaaattagaactgcgttttaagttctaatttgcatttattaatttgtccaaaagcaagaactcttggaaatccttgaaaatataagctggaatgttttacttagccatgcaagtcatttatgtatac

SEQ ID NO: 186284 - DNA, 1619 bp, Homo Sapiens
  misc_feature (1201)..(1290): n is a, c, g, or t
ttggctagaaaataattattattggagtgcaagcgaatgtatgcaggacttcaacaccatgtttacaaattgttacatttataacaagcccacagatgacatagtgctaatggcccaagctttagagaaaatttttctacaaaaagtggcccagatgccccaagaggaagttgaattattaccccctgctccaaagggcaaaggtcggaagccggctgcgggagcccagagcgcaggtacacagcaagtggcggccgtgtcctctgtctccccagcgaccccctttcagagcgtgccccccaccgtctcccagacgcccgtcatcgctgccacccctgtaccaaccatcactgcaaacgtcacgtcggtcccagtccccccagctgccgccccacctcctcctgccacacccatcgtccccgtggtccctcctacgccgcctgtcgtcaagaaaaagggcgtgaagcggaaagcagacacaaccactcccacgacgtcggccatcactgccagccggagtgagtcgcccccgccgttgtcagaccccaagcaggccaaagtggtggcccggcgggagagtggtggccgccccatcaagcctcccaagaaggacctggaggacggcgaggtgccccagcacgcaggcaagaagggcaagctgtcggagcacctgcgctactgcgacagcatcctcagggagatgctatccaagaagcacgcggcctacgcctggcccttctacaagccagtggatgccgaggccctggagctgcacgactaccacgacatcatcaagcacccgatggacctcagcaccgtgaaaaggaagatggatggccgagagtacccagacgcacagggctttgctgctgatgtccggctgatgttctcgaattgctacaaatacaatcccccagaccacgaggttgtggccatggcccggaagctccaggacgtgtttgagatgaggtttgccaagatgccagatgagcccgtggaggcaccggcgctgcctgcccccgcggcccccatggtgagcaagggcgctgagagcagccgtagcagtgaggagagctcttcggactcaggcagctcggactcggaggaggagcgggccaccaggctggcggagctgcaggagcagctgaaggccgtgcacgagcagctggccgccctgtctcaggccccagtaaacaaaccnnnnnnnnnnnnnnnnnnnnnnnnnnnnnnnnnnnnnnnnnnnnnnnnnnnnnnnnnnnnnnnnnnnnnnnnnnnnnnnnnnnnnnnnnngaagaaggccaaggtggctccgcctgccaagcaggctcagcagaagaaggctcctgccaagaaggccaacagcacgaccacggccggcagacagctgaagaaaggcggcaagcaggcatctgcctcctacgactcagaggaagaggaggagggcctgcccatgagctacgatgaaaagcgccagcttagcctggacatcaaccggctgcccggggagaagctgggccgggtagtgcacatcatccaatctcgggagctctcgctcaggactccaaccccgacgagatagaaattgactttgagactctgaaacccaccactttgcggga

SEQ ID NO: 186285 - DNA, 966 bp, Homo Sapiens
ttggggtaatttagttttgtggctgggcattcagtgaagtcttaggacttctttgcagacaactgactgggtatatataggaatgaatctggctttagggttaaatcatttaaggtccttttataggcaggcactagtaactaaaactgaaaactaagtaagtttatttttgaggaatgttgttaaaaatgtctttaggaagtcactaaaacttaattggaagaaaaaatcatgatgcttatacaataaatatgaataaatgttatataaggaaactcacctatttgaaatcatggctatattgtttttattttctagattccaaaaatacaaacactagttgttccagcattgtactttgataagtctgtacattgacgtgtatggactaaatccagggtaaaatcaatgttacaaaatttaagggtatgttaactaaaggatagcatttctaagatattttgaatattagggtcatttggcacttctcagcaagtaggatacttctcatgttttgaaattatatgaatatggaaaaaaatggcttaagaccagcgtctctgtatgacattgtgtggttgaccctctgagataactgttttcatctacagaattgcatttttgcttttaaagaggtcttataatggaactaggaatcaccgttttgagagaacctgcatatataccagtcattatctgtttggtccttatacagttttaacttacttagatttattctagttaagccataagttcaacgtgtaaacttgttttcattaaagaatttttctatcaaactctgctagtaaattactttcttgctatttacaagagtaagtgatggaattctgggtttgctgccaaggaaataatttcttagttaactggtcacagaggttgtgctgttttgggaaacggggtaactaaacagtaagctcaagatgataaaaaataaaggtaatccaa

SEQ ID NO: 186286 - DNA, 1681 bp, Homo Sapiens
ttggaaggatgtctcaccaatgtttactaagcctccaacactaaagcccatcccccacctcccaaaaacttcctggaaatgtccttgttatcacttcccctctcgggctgggcgctgggagcgggcggtctcctccgcccccggctgttccgcccaggcacgctgggtcgctggcgccgccgcgcaccacggctcacaccgaggcgcacaggctcgcacctccccggcgcctaccgctcccgtccccgccgcgacccgccaccgtccctgccggcgcctccccccgcttccaaatgagggtcctgggtgggcgctgccgggcgctgctggcgtgtctcctcctactgcttcccgtctcacacgcaaactttttgtcaaagcaacaggcttcacaagtcctggttaggaagcgtcgtgcaaattctttacttgaagaaaccaaacagggtaatcttgaaagagaatgcatcgaagaactgtgcaataaagaagaagccagggaggtctttgaaaatgacccggaaacggattatttttatccaaaatacttagtttgtcttcgctcttttcaaactgggttattcactgctgcacgtcagtcaactaatgcttatcctgacctaagaagctgtgtcaatgccattccagaccagtgtagtcctctgccatgcaatgaagatggatatatgagctgcaaagatggaaaagcttcttttacttgcacttgtaaaccaggttggcaaggagaaaagtgtgaatttgacataaatgaatgcaaagatccctcaaatataaatggaggttgcagtcaaatttgtgataatacacctggaagttaccactgttcctgtaaaaatggttttgttatgctttcaaataagaaagattgtaaagatgtggatgaatgctctttgaagccaagcatttgtggcacagctgtgtgcaagaacatcccaggagattttgaatgtgaatgccccgaaggctacagatataatctcaaatcaaagtcttgtgaagatatagatgaatgctctgagaacatgtgtgctcagctttgtgtcaattaccctggaggttacacttgctattgtgatgggaagaaaggattcaaacttgcccaagatcagaagagttgtgaggttgtttcagtgtgccttcccttgaaccttgacacaaagtatgaattactttacttggcggagcagtttgcaggggttgttttatatttaaaatttcgtttgccagaaatcagcagattttcagcagaatttgatttccggacatatgattcagaaggcgtgatactgtacgcagaatctatcgatcactcagcgtggctcctgattgcacttcgtggtggaaagattgaagttcagcttaagaatgaacatacatccaaaatcacaactggaggtgatgttattaataatggtctatggaatatggtgtctgtggaagaattagaacatagtattagcattaaaatagctaaagtagctgtgatggatataaataaacctggacccctttttaagccggaaatggattgctggaaaccaaagtatactttgcaggattccctcggaaagtggaaagtgaactcattaaccgattaccctcgttctagatggatgtatacgaagctggaatttgatgagccaggagcttctggaattaa

SEQ ID NO: 186287 - DNA, 1428 bp, Homo Sapiens
ttgggcttcggcgactaggtgtgagtgagccagtatcccaggaggagcaagtggcacgtcttcggacctaggctgcccctgccgtcatgtcccaagggatcctttctccgccagcgggcttgctgtccgatgacgatgtcgtagtttctcccatgtttgagtccacagctgcagatttggggtctgtggtacgcaagaacctgctatcagactgctctgtcgtctctacctccctagaggacaagcagcaggttccatctgaggacagtatggagaaggtgaaagtatacttgagggttaggcccttgttaccttcatagttggaacgacaggaagatcagggttgtgtccgtattgagaatgtggagacccttgttctacaagcacccaaggactcttttgccctgaagagcaatgaacggggaattggccaagccacacacaggttcaccttttcccagatctttgggccagaagtgggacaggcatccttcttcaacctaactgtgaaggagatggtaaaggatgtactcaaagggcagaactggctcatctatacatatggagtcactaactcagggaaaacccacacgattcaaggtaccatcaaggatggagggattctcccccggtccctggcgctgatcttcaatagcctccaaggccaacttcatccaacacctgatctgaagcccttgctctccaatgaggtaatctggctagacagcaagcagatccgacaggaggaaatgaagaagctgtccctgctaaatggaggcctccaagaggaggagctgtccacttccttgaagaggagtgtctacatcgaaagtcggataggtaccagcaccagcttcgacagtggcattgctgggctctcttctatcagtcagtgtaccagcagtagccagctggatgaaacaagtcatcgatgggcacagccagacactgccccactacctgtcccggcaaacattcgcttctccatctggatctcattctttgagatctacaacgaactgctttatgacctattagaaccgcctagccaacagcgcaagaggcagactttgcggctatgcgaggatcaaaatggcaatccctatgtgaaagatctcaactggattcatgtgcaagatgctgaggaggcctggaagctcctaaaagtgggtcgtaagaaccagagctttgccagcacccacctcaaccagaactccagccgcagtcacagcatcttctcaatcaggatcctacaccttcagggggaaggagatatagtccccaagatcagcgagctgtcactctgtgatctggctggctcagagcgctgcaaagatcagaagagtggtgaacggttgaaggaagcacgaaacattaacacctctctacacaccctgggccgctgtattgctgcccttcgtcaaacca

SEQ ID NO: 186288 - DNA, 1921 bp, Homo Sapiens
  misc_feature (974)..(984): n is a, c, g, or t
  misc_feature (1817)..(1825): n is a, c, g, or t
ttgggttattttatttctgacttttttcccgtttcttgttgagatagggttatccatgtgaacttttgcctctgacggtcgcaggtattccatctatgcacatctgtctagatttcatacctgagcttattgcacagccagaacttgagaaacaggtaatgagcattttggagctttaggacaattgatctctctctccagtcttactagttatacaaaacattttataatttttaatacctaaagatattcttgagaaacatgtaataactggattttgtattgcagatatttgctatccagttgctttctcacttgtgtatacaatatgcattaccaaagtcacttagtgtggctcgtttagctgtcaatgtcatgggaactttgttaacagttttaacacaggctaagcggtatgctttttttatgccaactctgccaagtttggtctctttttgtcgagcatttcctccattgtatgaggatattatgtctttgctgatccaaatagggcaagtttgtgcctctgatgttgccactcagacaagagacattgatccaattattacacgtcttcaacaaataaaggagaaaccaagtggatggctcaaatctgtaaagattcatcttataaaaatggatccagggacactggaagcatggatcctgatgtacagctctgtcactgtattgaaagaacagtaattgaaataataaatatgagtgttagtggaatttaaaacaaaatttaaaacaacaaaaagttgtttgctgcatatacccaacatgaatctgcatattagtaacaactctaaactgaatgggaacagtaaagtattgtcttggaatcactaaaacaattcaattcaacatgagtatagtttagaactttatgagaattatgcttgcttgtttctgattggcacatctttggatctactttgctgatatgtttctattgtagcagctgagcnnnnnnnnnnnccactgggaacacatgtaagaaactcattattggaaagggaatttggccttgtatttagcttttgaagtgaagactgccatgcctttaatttcttataaaaatgagtctgtgggtagccctagtgtttattttaactgtgagcttgtaacagaatgtgacaaagatgcaaagatgggagaggaaaaaagggtaaagggaaaggagaattaaggaaataataggagttaaaaacacaagtagaaatctcaaagatttgcagtgcaagtaatagtaatgcaagttggaattctagttctcaagaaagagtattgagaagacttttaaaaaggcaagtagcttttgtaaatgatttctgtggaaatacagatgaggatttaaagatttcacatatttgcttcaatttttattaatatatgaagccatatgtttaaagagatacttgaataatttggaattttaagatactggtgtaaaagtgtttacagaaacatctttgttcaaagaagaacctgagagatctcatttagttttatgttttaaatttatttttataatgctttattaacttacctaatgctcagaggggggaaatatgtatcaaattaaatgaaggtagagcaataaaacccactggattaaagagctcttggtttgtcatcaggattataattcatatcttactttgagaagatctttgagtaagaaaatgcagtgtttgaacctgaggaaaagttaaagtgtagaaaatattgtcttgccgaaggattttgcagtcctctgtcagtaacttccattgattaggcagacatattcaggtaaaccctaatcattnnnnnnnnnttatcaatgtagaaagtaattcccttttttctctctgagatatacctcaatcacacacttccccacccccacttgaaacagacctcttcacttgtg

SEQ ID NO: 186289 - DNA, 1510 bp, Homo Sapiens
ttggatagctcttagcttctgtgtaagaagttgtgagctccttctggaaacatttgcagttacattaagtaaagtgtaaatgcacatgaatggcagcttatagagaaccaccttgtaaccagtatacaggtacaactacagctcttcagaaattggaaggttttgctagccggttatttcatagacactctaaaggtactgcacatgatcagaaaacagctctggaaaatgacagccttcatttctctgaacatactgccttatgggacagatcaatgaaagagtttctagccaaagccaaagaagactttttgaaaaaatgggagaatccaactcagaataatgccggacttgaagattttgaaaggaaaaaaacccttggaacaggttcatttggaagagtcatgttggtaaaacacaaagccactgaacagtattatgccatgaagatcttagataagcagaaggttgttaaactgaagcaaatagagcatactttgaatgagaaaagaatattacaggcagtgaattttcctttccttgttcgactggagtatgcttttaaggataattctaatttatacatggttatggaatatgtccctgggggtgaaatgttttcacatctaagaagaattggaaggttcagtgagccccatgcacggttctatgcagctcagatagtgctaacattcgagtacctccattcactagacctcatctacagagatctaaaacctgaaaatctcttaattgaccatcaaggctatatccaggtcacagactttgggtttgccaaaagagttaaaggcagaacttggacattatgtggaactccagagtatttggctccagaaataattctcagcaagggctacaataaggcagtggattggtgggcattaggagtgctaatctatgaaatggcagctggctatcccccattctttgcagaccaaccaattcagatttatgaaaagattgtttctggaaagaacttttgatatgaacaaaacaaaactttgagaaaaattaacagacaaggcagtgatttatttttgaagaatttgagaagtgtagactctcaagaggactaaaggtcatatgaagaatgatgagagaaccaaaatacattaaaatcacaaatggaagaagaatattttactaatacaaaaactaagaatgtaaatgttataataattgtttcaaatcatttaattgacagtaattataaagttcttgaatctttactatattacttttatttatacttcatataagaaatccagttttctaacaaggatactgtcataactaaatttacatttattaagaaaaactgctttagttaaaattaatgtgtcttcatttttatgcattgggcctcgatttgccaatcattctctattgggttaaaaattatatttcagctgtttatgaatatatattcattttatatcaaactttaaaattttgtatctaataatcagcatatattctaaaatcataa

SEQ ID NO: 186290 - DNA, 1729 bp, Homo Sapiens
agttggcttgggccgttttcaggatcgtttaatgtggataatgattctggaatgtggctatacttactgctctattaacattaaggggttagaattgcaggaaacatcctgtcatactgcagaagctcgcagagttgatgaagtttttgaagatgcttttgagcaagaatacacaagagtatgttcccttaatgaacactttggaaatgtcttgacaccctgtactgttttgcctgtgaaattgtattctgatgccaggaatgttctatcaggcataattgattctcatgaaaacttaaaagaatttaaaggtgacctcattaaagtacttgtgtggatacttgttcaatactgctccaaaaggcctggcatgaaagagaatgttcacaacactgaaaataaagggaaagcacctctaatgttgcctgctttgaacactttgccacctcccaaatccccagaagacatagacagtttaaattcagaaacttttaatgactggtctgatgataatatttttgatgatgagccaactatcaaaaaagtaatagaagaaaaacatcagttgaaagatttgccaggtacaaatttgtttattccaggatcagtagaatcacagagggttggtgatcattctacaggcactgttcctgaaaacgatctttacaaagcagttctattaggataccctgctgttgacaaaggaaaacaagaggacatgccatatattcctctcatggagttcagttgttcacattctcacttagtatgcttacccgcagagtggaggactagctgtatgcccagttccaaaatgaaggagatgagctcgttatttccagaagactggtaccaatttgttctaaggcagttggaatgttatcattcagaagagaaggcctcaaatgtactggaagaaattgccaaggacaaagttttaaaagacttttatgttcatacagtaatgacttgttattttagtttatttggaatagacaatatggctcctagtcctggtcatatattgagagtttacggtggtgttttgccttggtctgttgctttggactggctcacagaaaagccagaactgtttcaactagcactgaaagcattcaggtatactctgaaactaatgattgataaagcaagtttaggtccaatagaagactttagagaactgattaagtaccttgaagaatatgaacgtgactggtacattggtttggtatctgatgaaaagtggaaggaagcaattttacaagaaaagccatacttgttttctctggggtatgattctaatatgggaatttacactgggagagtgcttagccttcaagaattattgatccaagtgggaaagttaaatcctgaagctgttagaggtcagtgggccaatctttcatgggaattactttatgccacaaacgatgatgaagaacgttatagtatacaagctcatccactacttttaagaaatcttacggtacaagcagcagaacctcccctgggatatccgatttattcttcaaaacctctccacatacatttgtattagagctcattttgactgtaatgtcatcaaatgcaatgtttgtattttttcatcctaaaaaagtaactgtgattcttgtaacttgaggacttctccacaaccccattcagatgcgtgagaacagctaagctccgtaaagttggttctcttaaccatcttaatggttcctaaaaa

SEQ ID NO: 186291 - DNA, 848 bp, Homo Sapiens
ctttgtacaaaaaagttggcactgggagagtgcttaaccttcaagaattattgatccaagtgggaaagttaaatcctgaagctgttagaggtcagtgggccaatctttcatgggaattactttatgccacaaacgatgatgaagaacgttatagtatacaagctcatccactacttttaagaaatcttacggtacaagcagcagaacctcccctgggatatccgatttattcttcaaaacctctccacatacatttgtattagagctcattttgactgtaatgtcatcaaatgcaatgtttttattttttcatcctaaaaaagtaactgtgattcttgtaacttgaggacttctccacacccccattcagatgcctgagaacagctaagctccgtaaagttggttctcttagccatcttaatggttctaaaaaacagcaaaaacatctttatgtctaagataaaagaactatttggccaatatttgtgccctctggactttagtaggctttggtaaatgtgagaaaacttttgtagaattatcatataatgaattttgtaatgctttcttaaatgtgttataggtgaattgccatacaaagttaacagctatgtaatttttacatacttaagagataaacatatcagtgttctaagtagtgataatggatcctgttgaaggttaacataatgtgtatatatttgtttgaaatataatttatagtattttcaaatgtgctgatttattttgacatctaatatctgaatgtttttgtatcaagtagtttgttttcatagacttcaattcataaactttaaaaaacttttaataaatattttccttccttt

SEQ ID NO: 186292 - DNA, 1056 bp, Homo Sapiens
ttggaccctccgcccctttaacctttagggtgcgcgggtgcagtatatctcgcgctctctcccctttccccctaccctttccccaccccgggcgctcaggttggtctggaccggaagcgaagatggcgacttctggcgcggcctcggcggagctggtgatcggctggtgcatattcggcctcttactactggctattttggcattctgctggatatatgttcgtaaataccaaagtcggcgggaaagtgaagttgtctccaccataacagcaattttttctctagcaattgcacttatcacatcagcacttctaccagtggatatatttttggtttcttacatgaaaaatcaaaatggtacatttaaggactgggctaatgctaatgtcagcagacagattgaggacactgtattatacggttactatactttatattctgttatattgttctgtgtgttcttctggatcccttttgtctacttctattatgaagaaaaggatgatgatgatactagtaaatgtactcaaattaaaacggcactcaagtatactttgggatttgttgtgatttgtgcactgcttcttttagttggtgcctttgttccattgaatgttcccaataacaaaaattctacagagtgggaaaaagtgaagtccctatttgaagaacttggaagtagtcatggtttagctgcattgtcattttctatcagttctctgaccttgattggaatgttggcagctataacttacacagcctatggcatgtctgcgttacctttaaatctgataaaaggcactagaagcgctgcttatgaacgtttggaaaacactgaagacattgaagaagtagaacaacacattcaaacgattaaatcaaaaaacaaagatggtcgacctttgccagcaagggataaacgcgccttaaaacaatttgaagaaaggttacgaacacttaagaagagagagaggcatttagaattcattgaaaacagctggtggacaaattttgtggcgctctgcgtcccctgaagatcgtctggggaatattttt

SEQ ID NO: 186293 - DNA, 1275 bp, Homo Sapiens
aaaaagtcaagtctattttgtaacaggttacataaaaatatgggccaataaatgcattatgaatgcagaaacagcactgctccatcagcacattcttcagtcttgtttggactagatgccaaacttactgttcatttttcggttcatcttgttttccattaagttcttgatcaactcttttttgtttctttttaaacttttcttcttcatactgttttatgcattctggtatgccaacgtattccatggggacaagttctgctagttctgccaaattaaacacgtatctaattttttggctgaatttcgagctaataaatggtcttgtaacagccagaagtgttctgataaaccaagaaggatgtacaatgattagggattttagatttttccgtaaccttctatcaatttgctgataacatttcctgagccatcccagactgggcatttttcttcgagttgttgcaccatttaaataaactatcatgtagttttctgctactagtagctccaaagtgccaataacatatttaaaaagattgtccatcaggtatctatagttaggctgactactttcaggcatgaaacagacagcaaacacaacaatggcatttaatccatccccataatatcccccatggctgataacttttttatagggttcaattgccttcatatcaaccctgtggtcctgttctccaatcctgaacatacgccagcgtcgtccatcttctttttcctctgctgctgtgtattcagtaattgagcctttcctaattacttcagtagtcttgggttttggaagatcatctgtcaaaatacaaagtttttgaatcacaaattgttacacaacaaaaatcaaattatacgttaaccactttactacctagattttacagagaattttcattataccatctgcacaattttaaatctctcttccataaaggaggaaaaggcttattcttaacatgaggctgttttatgtctttggaaatcatggttctttaacttttattgcccaatttagcaaaaaccacctaatcatagtgaaacgtgtatccacaagttcagaaaatataatttgtagagtcatcaaaatcttagtacactggccttacaatgcctttccagattcaacttgtgacaatattctccctggcagttatgactataggttacttcaagtagctatctgggagccaattttgttgttgttgagcacataaattaactgtaataccagataggaagtggttaactactcaatgccaa

SEQ ID NO: 186294 - DNA, 1370 bp, Homo Sapiens
ttggctaaacggagtggcggcggcatttcctggtgtctgagcctggcgcggaggctatgggcagccaggaggtgctgggccacgcggcccggctggcctcctccggtctcctcctgcaggtgttgtttcggttgatcacctttgtcttgaatgcatttattcttcgcttcctgtcaaaggaaatcgttggcgtagtaaatgtaagactaacgctgctttactcaaccaccctcttcctggccagagaggccttccgcagagcatgtctcagtgggggcacccagcgagactggagccagaccctcaacctgctgtggctaacagtccccctgggtgtgttttggtccttattcctgggctggatctggttgcagctgcttgaagtgcctgatcctaatgttgtccctcactatgcaactggagtggtgctgtttggtctctcggcagtggtggagcttctaggagagcccttttgggtcttggcacaagcacatatgtttgtgaagctcaaggtgattgcagagagcctgtcggtaattcttaagagcgttctgacagcttttctcgtgctgtggttgcctcactggggattgtacattttctctttggcccagcttttctataccacagttctggtgctctgctatgttatttatttcacaaagttactgggttccccagaatcaaccaagcttcaaactcttcctgtctccagaataacagatctgttacccaatattacaagaaatggagcgtttataaactggaaagaggctaaactgacttggagttttttcaaacagtctttcttgaaacagattttgacagaaggcgagcgatatgtgatgacatttttgaatgtattgaactttggtgatcagggtgtgtatgatatagtgaataatcttggctcccttgtggccagattaattttccagccaatagaggaaagtttttatatattttttgctaaggtgctggagaggggaaaggatgccacacttcagaagcaggaggacgttgctgtggctgctgcagtcttggagtccctgctcaagctggccctgctggccggcctgaccatcactgtttttggctttgcctattctcagctggctctggatatctacggaggggaccatgcttagctcaggatccggtcctgttttgctgcgttcctactgtctctatgttctcctgcttgccatcaatggagtgacagagtgtttcacatttgctgccatgagcaaagaggaggtcgacaggtacaattttgtgatgctggccctgtcctcctcattcctggtgttatcctatctcttgacccgttggtgtggcagcgtgggcttcatcttggccaactgctttaa

SEQ ID NO: 186295 - DNA, 1028 bp, Homo Sapiens
  misc_feature (908)..(922): n is a, c, g, or t
ttgggtacattgtctttttaaagacatgttattgcctacttacagtcaagagcatagtgcaaataaaatgctctgtttcactatacagtgtcccagtatcccacctcttacttggccattgaatggaaaaacagaagctccactctgggcaggaaataggatcactgaattataacagtgggaacatactggaagaggttaatgaagcttcttttgctgacaactctttttgcccttaggctccccaaaaaggccacaaagacagccccacctgccctgcctacaggttatgattcagaggaggaggaagagagcaggcccatgagttacgatgagaagcggcagctgagcctggacatcaacaaattacctggggagaagctgggccgagttgtgcatataatccaagccagggagccctctttacgtgattcaaacccagaagagattgagattgattttgaaacactcaagccatccacacttagagagcttgagcgctatgtcctttcctgcctacgtaagaaaccccggaagccctacaccattaagaagcctgtgggaaagacaaaggaggaactggctttggagaaaaagcgggaattagaaaagcggttacaagatgtcagcggacagctcaattctactaaaaagccccccaagaaagcgaatgagaaaacagagtcatcctctgcacagcaagtagcagtgtcacgccttagcgcttccagctccagctcagattccagctcctcctcttcctcgtcgtcgtcttcagacaccagtgattcagactcaagctaaaggggtcaggccagatggggcaggaaggctccgcaggaccggacccctagaccaccctgcccccctgccccttccccctttgctgtgacacttcttcatctcannnnnnnnnnnnnnntctaggagagctggctctgcagtgggggagggatgcagggacatttactgaaggagggacatggacaaaaccacattgaattcccagccccattggggagtgatct

SEQ ID NO: 186296 - DNA, 1820 bp, Homo Sapiens
  misc_feature (758)..(793): n is a, c, g, or t
  misc_feature (918)..(956): n is a, c, g, or t
ccccattctgccctgacccccttagcctgagtctgaatcacctggtgtctgaagacgacgacgaggaagaggaggagctggaatctgagctggagctggaagcgctaaggcgtgacactgctacttgctgtgcagaggatgactctgttttctcattcgctttcttggggggctttttagtagaattgagctgtccgctgacatcttgtaaccgcttttctaattcccgctttttctccaaagccagttcctcctttgtctttcccacaggcttcttaatggtgtagggcttccggggtttcttacgtaggcaggaaaggacatagcgctcaagctctctaagtgtggatggcttgagtgtttcaaaatcaatctcaatctcttctgggtttgaatcacgtaaagagggctccctggcttggattatatgcacaactcggcccagcttctccccaggtaatttgttgatgtccaggctcagctgccgcttctcatcgtaactcatgggcctgctctcttcctcctcctctgaatcataacctgtaggcagggcaggtggggctgtctttgtggcctttttggggagcttggtgccacttcctccagaaggtccaaagccggaagggcctaaagcagcactgccacccccactgccacttgctttcttggacttcttaggttgaggtgggcggggtgccctaggccccttgtcatcttcatcggccccagctcggcctcgatgcttctctgccttccgnnnnnnnnnnnnnnnnnnnnnnnnnnnnnnnnnnnngggcttggatattggaccctgggacagagcagccagttgttcatgtactgcccgaagctgttcctgtagttctgctaagcgatgagccctttcttcctctgagtctgagctttcactctcttctnnnnnnnnnnnnnnnnnnnnnnnnnnnnnnnnnnnnnnngaggagctctcactgctactttcctcactggaggactctgaagacgatttggccaagccagggggcatggcagtagagactggtaaaggccctggttctagtggttcatctggcatcttggcataacggaactcaaatacatcctgtagctttcgtgccattgccacaacatcgtgatctgggggattgtacttatagcagttggagaacataagccgtacatcagcagcaaactcctgtgcatcccggtaatcacggttctccatcttccgctgcagaaggaggcagcatcagaagctgcacaggcaggaagactcacctttccctgccaaccccagacaccacaagaagagccctctcttgagagcacagtggggatgaccttaaggatctgtgccctggggttcaagtttgaagtcaaaggaatttgggtgggttgaagaaatatttatgtctagaaaaagaaatcatttctaagtgacagagaggtggcctatgcctgtctttccaccctataacttccttaacccaacactgccacattagtacttaattatagacagtatttttctcaagacaaagaaaccccaccctactgtttcaaactccaagaaatacaaattctcaaaacaccagaccttctgttccactattattttataaaagtaaaatgccaagaaccaaagactgctgtgtgcccacataaggagacttattgttttgcacctaggctcccatcactgcctgagcatcccatctgccccatgcagtgggtaccttgacagtgctgaggtccatggggtgcttaatgatgtcatggtagtcatgcaggccaagtgcagaagcatccactggtttatccaa

SEQ ID NO: 186297 - DNA, 1309 bp, Homo Sapiens
  misc_feature (1147)..(1192): n is a, c, g, or t
ttggccggattatcacaaaattataaaacagcctatggacatgggtactattaagaggagacttgaaaacaattattattgggctgcttcagagtgtatgcaagattttaataccatgttcaccaactgttacatttacaacaagcccactgatgatattgtcctaatggcacaaacgctggaaaagatattcctacagaaggttgcatcaatgccacaagaagaacaagagctggtagtgaccatccctaagaacagccacaagaagggggccaagttggcagcgctccagggcagtgttaccagtgcccatcaggtgcctgccgtctcttctgtgtcacacacagccctgtatactcctccacctgagatacctaccactgtcctcaacattccccacccatcagtcatttcctctccacttctcaagtccttgcactctgctggacccccgctccttgctgttactgcagctcctccagcccagccccttgccaagaaaaaaggcgtaaagcggaaagcagatactaccacccctacacctacagccatcttggctcctggttctccagctagccctcctgggagtcttgagcctaaggcagcacggcttccccctatgcgtagagagagtggtcgccccatcaagcccccacgcaaagacttgcctgactctcagcaacaacaccagagctctaagaaaggaaagctttcagaacagttaaaacattgcaatggcattttgaaggagttactctctaagaagcatgctgcctatgcttggcctttctataaaccagtggatgcttctgcacttggcctgcatgactaccatgacatcattaagcaccccatggacctcagcactgtcaagcggaagatggagaaccgtgattaccgggatgcacaggagtttgctgctgatgtacggcttatgttctccaactgctataagtacaatcccccagatcacgatgttgtggcaatggcacgaaagctacaggatgtatttgagttccgttatgccaagatgccagatgaaccactagaaccagggcctttaccagtctctactgccatgccccctggcttggcaaatcgtcttcagagtcctccagtgaggaaagtagcagtgagagctcctctnnnnnnnnnnnnnnnnnnnnnnnnnnnnnnnnnnnnnnnnnnnnnntgaaagctcagactcagaggaagaaagggctcatcgcttagcagaactacaaggaacagcttcgggcagtacatgaacaactggctgctctgtcccagggtccaatatccaagccca

SEQ ID NO: 186298 - DNA, 1051 bp, Homo Sapiens
  misc_feature (565)..(580): n is a, c, g, or t
  misc_feature (904)..(948): n is a, c, g, or t
ttgtacaaaaaagttggaacaaattacctggggagaagctgggccgagttgtgcatataatccaagccagggagccctctttacgtgattcaaacccagaagagattgagattgattttgaaacactcaagccatccacacttagagagcttgagcgctatgtcctttcctgcctacgtaagaaaccccggaagccctacaccattaagaagcctgtgggaaagacaaaggaggaactggctttggagaaaaagcgggaattagaaaagcggttacaagatgtcagcggacagctcaattctactaaaaagccccccaagaaagcgaatgagaaaacagagtcatcctctgcacagcaagtagcagtgtcacgccttagcgcttccagctccagctcagattccagctcctcctcttcctcgtcgtcgtcttcagacaccagtgattcagactcaggctaaggggtcaggccagatggggcaggaaggctccgcaggaccggacccctagaccaccctgccccacctgccccttccccctttgctgtgacacttcttcatctcannnnnnnnnnnnnnnntttaggagagctggctctgcagtgggggagggatgcagggacatttactgaaggagggacatggacaaaacaacattgaattcccagccccattggggagtgattttttggacacagagcccccattcaaaatggggcagggcaagggtgggagtgtgcaaagccctgatctggagttacctgaggccatagctgccctattcacttttaagggccctgttttgagattgtttgttttaatttattttaagctaggtaaggctggggggagggtggggccgtggtcccctcagcctccatggggagggaagaagggggagctcnnnnnnnnnnnnnnnnnnnnnnnnnnnnnnnnnnnnnnnnnnnnnccttccgctccatttggggccctgggggtttcagtcatctccccatttggtcccctggactgtctttgttgattctaacttgtaaataaagaaaatattattc

SEQ ID NO: 186299 - DNA, 1320 bp, Homo Sapiens
  misc_feature (822)..(847): n is a, c, g, or t
  misc_feature (1075)..(1088): n is a, c, g, or t
ttgggctactctataaatttgagagaccacagtatgctgaaattcttgcagatcatcccgatgcacccatgtccctcagcctcctcggaagaaaagggcccgggtagatcctactgttgaaaatgaggaaacattcatgaacagagttgaagttaaagtaaagattcctgaagagctaaaaccgtggcttgttgatgactgggacttaattaccaggcaaaaacagctcttttatcttcctgccaagaagaatgtggattccattcttgaggattatgcaaattacaagaaatctcgtggaaacacagataataaggagtatgcggttaatgaagttgtggcagggataaaagaatacttcaacgtaatgttgggtacccagctactctataaatttgagagaccacagtatgctgaaattcttgcagatcatcccgatgcacccatgtcccaggtgtatggagcgccacatctcctgagattatttgtacgaattggagcaatgttggcttatacacctctggatgagaagagccttgctttattactcaattatcttcacgatttcctaaagtacctggcaaagaattctgcaactttgttcagtgccagcgattatgaagtggctcctcctgagtaccatcggaaagctgtgtgagaggcactctcactcacttatgtttggatctccgtaaacacatttttgttcttagtctatctcttgtacaaacgatgtgctttgaagatgttagtgtataacaattgatgtttgttttctgtttgattttaaacagagaaaaaataaaagggggtaatagctcnnnnnnnnnnnnnnnnnnnnnnnnnncatttcaaaattgctgccagtgttttcaatgatggacaacagagggatatgctgtagagtgttttattgcctagttgacaaagctgcttttgaatgctggtggttctattcctttgacactacgcacttttataatacatgttaatgctatatgacaaaatgctctgattcctagtgccaaaggttcaattcagtgtatataactgaacacactcatccatttgtgcnnnnnnnnnnnnnnatggtgcttaaagtaaagagcccatcctttgcaagtcatccatgttgttacttaggcattttatcttggctcaaattgttgaaaaatggtggcttgtttcatggtttttgtatttgtgtctaatgcacgttttaacatgatagacgcaatgcattgtgtagctagttttctggaaaagtcaatcttttaggaattgtttttcaaatcttcaataaattttttctttaaattt

SEQ ID NO: 186300 - DNA, 1024 bp, Homo Sapiens
tttgtacaaaaaagttgggctttgagaagggaacaaactacacggtgaggttggagctgcctcagtacacctcctctgatagcgacgtggagagcccctacacgctgatcgattctcttgttctcatgccatactgtaaatcactggacatcttcaccgtgggaggttcaggagatggggtggtcaccaacagtgcctgggaaacctttcagagataccgatgtctagagaacagcagaagcgttgtgaaaacaccgatgacagatgtttgcagaaacatcatctttagcatttctgccctgttacaccagacaggcctggcttgtgaatgcgaccctcagggttcgttaagttccgtgtgtgatcccaacggaggccagtgccagtgccggcccaacgtggttggaagaacctgcaacagatgtgcacctggaacttttggctttggccccagtggatgcaaaccttgtgagtgccatctgcaaggatctgtcaatgccttctgcaatcccgtcactggccagtgccactgtttccagggagtgtatgctcggcagtgtgatcggtgcttacctgggcactggggctttccaagttgccagccctgccagtgcaatggccacgccgatgactgcgacccagtgactggggagtgcttgaactgccaggactacaccatgggtcataactgtgaaaggtgcttggctggttactatggcgaccccatcattgggtcaggagatcactgccgcccttgcccttgcccagatggtcccgacagtggacgccagtttgccaggagctgctaccagatcctgttactttacagcttgcctgtgtttgtgatcctggatacattggttccagatgtgacgactgtgcctcaagatactttggcaatccatcagaagttggggggtcgtgtcacccttgccagtgtcacaacaacattgacccgacagacccagaagcctgtgacaagagactgggaaggtgtctcaagtgcctgtaccacacggaaggg

SEQ ID NO: 186301 - DNA, 776 bp, Homo Sapiens
ataaagagatgcatagggtaaagtatgagaaaagcacttggagcttccatgccctcctgcaaagactgaaggggtcttaagcaacaaggcctttattataacacaaatcagggcaataggtggcaggctgtctgagattcatgactggcaggctggaaaattccatcttaagaattctgtgagatccaaaagatccctgaaaaaggtagtccattttttcaagttatcaaaagagtcctctgtgccaaaaatgagtcaagttcatggcctaactcattggagagaaagaaatgagaatagaatgagtgctgaggatactaaaaaatccctctgttgaatgaaacaaaatcaaagttacttctggatcatgatgagttaggcgaatgatgtactgtgggcacctgccaagtggtaaaggtgaaatgctttttagaagagaactgtaagtcacagaagtctagcaagagacctgggcaggtcgaaaaatactatgcagttcccacatacctggaatgtatgcagctatttgatgtatgacattcaatttaggcagatggcatcctcataaggggtttcctccagtgttatattgaagaaaaaataatattacctccacatctgtggtattttcctcatgtaaatattgtggtaaccaatgagagagggctgaaggctttctcacattcattgcactcaaaaggcacttcttcagtgggagcactcttttatgtaaagaagctagcattctagctaaagaatattctccaggatttgtc

SEQ ID NO: 186302 - DNA, 1666 bp, Homo Sapiens
gaagggctgagtagtagacgatggtgggaaggagggccgagaagcaccacagcagcagggtggggaagaactgggtgatgatggggttgttgaggtactccacaggcttggtgacgttgaacttgtccatggtggtgatgatgatggctggagtggtgaggaagaagaggaggatgaagaggacgacattgatgaccaggcagcgcagccaccagatgaagcctcggatggagaggtgctcccagtagatgttctgagggtcaggggcataggacacggtccagttggagatgtgcagggactcgctgcaggatgaggggcgtggctccccacggcaggtgcagccctggcatttacacacgttgaagtccttcaggatgatggcggtgatagtctcattgtggaaggtgacaaaggccatgccaagaggcttctcattcaccttctccttctcccgcttgtagtcttccttcagcttctgctccagctttgtgtagtactcaatggcctccacctgctcacagcctcgcaccacacagcagcagaggtggccacagggcttggggttgatcatggtaggcacgttctccttgctctggaggtttgtgaagtacagctttccccgctcggccttcttcctctctgcatcgaggaacattaggcgagccacgttgtaacacgggcgggcttcgagaactgtgcagttggggtaggcttcctcaaaatgcttcttgatcttttctgactctgcatatttggagattccattgatgaagagggtccgcttcaccagatcatcctccttgtagcgcatcttggaggtgtgtctacgcatgctgtagacggtgagcagcagatacaggaaggcgaaggaggtgtgcagccatagcaggttgttccctgatttcaagttggcaatggtggttctcccaaagctgtaggcattgttctccagcaggtcccctgagaagttgacaggcagcacgatgttacggagaggacgcccacaaccaccagcagcccgatgatgtgccgctgaaaggacaggtagtgcacggcatcgcccccacatttgtcccggatctcatcatcctttatcctgaagatggctgtcagccaggaacagaaaccattgtccctttggtcaaagtcaacggagctggagacagaggtgagacgctcataccggtcatggctgtccccgtgcatagctgaagccacatattcctgttccactcggtccctctcctgccgccgaagcctgtctgcatctgtcaccaaggccagccgcccatagtcccaggccaccttccggaggatagagaataagaacagcagtgcaaggaagcacatgaagtcgagagccagcacggtggggacgcccccaaagggcaggccctgcaggacagtgctgcggatgcgggcgctgtagcagtagtccttggggttgctgttgttgagggctgtggtgcccagtgtggccagcagaaagggcagcatggctgctactgccgcatggtcctcctgctttccccgggttgcggcgtcgacttggggagggcgggctgcgttcagccgtcgctggtcactccggagcgtctcctccggcttctccgctttccgcgctcccctcccctttcccaacttaggtctggagatgagccaa

SEQ ID NO: 186303 - DNA, 1435 bp, Homo Sapiens
  misc_feature (352)..(364): n is a, c, g, or t
  misc_feature (366)..(413): n is a, c, g, or t
  misc_feature (1121)..(1149): n is a, c, g, or t
ttgggtcatattctcaggccaactgttttgaaattcggtatctcactgagctaatctggaacaaacctctcacctcaggccagaaggggatgacctccatttgcttctctgagtagtttcctctgctgacattccaaatcccaccatcgattgtgcagcgctttggatttccttcagttctccaggtccacctggaaagtatagttggccagttgagtctctcaaatgaggggctactgggagtgctcttggtaacaatcatgatgtgaatgggtgtgaacgatacttggctatgttaagtgccttgtccgcaccttgcttttatctctagagacatgaagttattattaannnnnnnnnnnnnannnnnnnnnnnnnnnnnnnnnnnnnnnnnnnnnnnnnnnnnnnnnnnngggccatgcctggccagggacatgaatttgtacaaagaaatttccctccctgcctgcacaatatcacccattgactcaccttatccaaagcaagtttcctgtgaatcggccagttcttctatattcattggatcattgcctccttcctaaccttccccatttaccaagaacactgggagactaatccttttagatagtagctttttgatgctcaaaacatcacatttaaatttagtttaaaaattttttaacttttgtgtcaaataggagttgaggaattgagcaggattctaccctagtccgattgtatagaaaacaccattttgattcaggtattatttttcatatttcaggtttgacttgttcttttcagaaggctaaagtcagaggaatgggggctgggccactcccttggagctctcagatctacagacaagctgtgtgaatgcatagatgtaatcttgtctcaaatactaatacagtggagatttggtttatgttaccattaagttcctctaaaaagtttttcttcctctcttcagagccaaaataaaagtgaactacactgttcagataaggtcacaatctgatgctgtcagtttgaccgagctggttttgcttatggtcatgctgcaatttgttagaataatagggatcaagttttaaatcctcctccttcccttttttctggagtcttgagggccagannnnnnnnnnnnnnnnnnnnnnnnnnnnncctgcttgctactgttttgtggtgttgaaaagtggtttaaacctgagactaacttaaacacttccttgaccttcttgttgcctgttcatttttgtgccaaggaagtagctgccccagtgtatgtcttgccttctccgcgtcattgttggaagaggagagatgcatcgagcagtcccagctgcttttcatttattacttcttctttccaggacctgacagaagtcagggaagagtccctgggttatgtccaaacttagcacctgcaattgttgggatgtgggatgga

SEQ ID NO: 186304 - DNA, 2043 bp, Homo Sapiens
  misc_feature (935)..(947): n is a, c, g, or t
  misc_feature (949)..(996): n is a, c, g, or t
  misc_feature (1704)..(1732): n is a, c, g, or t
ttggcgcgtgctgtggagcatccgagtgtgccagagtctccagaattcgtcagggtcagatcatatgaatcccaaatggttatccgtccccacaagtcatttgatgagaatggctttgactacttactaacatacagtgacaatccccaaacggtgtttcctcgctactgtgttagttggatggtttccagtggcatgggccagatttcctggagaagctgcacatggccactctgaaagccaagaatatggagattaaagtaaaggactacatctcagctaagcctctggaaatgagtagtgaagccaaggccaccagccagtcctctgagcgaaagaacgagggcagctgtggccctgctcggattgagtatgcttgacaggctttgggataagaagggacaaggtgcttctagccctgtctcagtccgttatcactctgctgtagaagggggacatgccacatgtattagaaggcatctgctgtaacttccagtgcaagataattcaataactgatgtcccatttcattcagagcccttattgctcttatcaaaacagaagaaggctacatttgtgggagtgttgtcatattctcaggccaactgttttgaaattcggtatctcactgagctaatctggaacaaacctctcacctcaggccagaaggggatgacctccatttgcttctctgagtagtttcctctgctgacattccaaatcccaccatcgattgtgcagcgctttggatttccttcagttctccaggtccacctggaaagtatagttggccagttgagtctctcaaatgaggggctactgggagtgctcttggtaacaatcatgatgtgaatgggtgtgaacgatacttggctatgttaagtgccttgtccgcaccttgcttttatctctagagacatgaagttattattaannnnnnnnnnnnnannnnnnnnnnnnnnnnnnnnnnnnnnnnnnnnnnnnnnnnnnnnnnnngggccatgcctggccagggacatgaatttgtacaaagaaatttccctccctgcctgcacaatatcacccattgactcaccttatccaaagcaagtttcctgtgaatcggccagttcttctatattcattggatcattgcctccttcctaaccttccccatttaccaagaacactgggagactaatccttttagatagtagctttttgatgctcaaaacatcacatttaaatttagtttaaaaattttttaacttttgtgtcaaataggagttgaggaattgagcaggattctaccctagtccgattgtatagaaaacaccattttgattcaggtattatttttcatatttcaggtttgacttgttcttttcagaaggctaaagtcagaggaatgggggctgggccactcccttggagctctcagatctacagacaagctgtgtgaatgcatagatgtaatcttgtctcaaatactaatacagtggagatttggtttatgttaccattaagttcctctaaaaagtttttcttcctctcttcagagccaaaataaaagtgaactacactgttcagataaggtcacaatctgatgctgtcagtttgaccgagctggttttgcttatggtcatgctgcaatttgttagaataatagggatcaagttttaaatcctcctccttcccttttttctggagtcttgagggccagannnnnnnnnnnnnnnnnnnnnnnnnnnnncctgcttgctactgttttgtggtgttgaaaagtggtttaaacctgagactaacttaaacacttccttgaccttcttgttgcctgttcatttttgtgccaaggaagtagctgccccagtgtatgtcttgccttctccgcgtcattgttggaagaggagagatgcatcgagcagtcccagctgcttttcatttattacttcttctttccaggacctgacagaaagtcaagaagagtccctgggttatgtccaaacttagcacctgcaattgttgggatgtggatggatgtgtgcataagagagagagagaata

SEQ ID NO: 186305 - DNA, 1533 bp, Homo Sapiens
  misc_feature (1291)..(1300): n is a, c, g, or t
ttggggcttgatcttgtgaatattaccacaagaaatattttgtggcactttactgtttgagtaacgttggtgtgaagcttaattgatgccttttgctttatgtcccgcttaagtctgtgtgaaggatttgtgtttttctgccttacaaatagaatttgatttattgggcaggaattcatggatagtaatgctctctgccccctttacttcagaaaacacagtgactttagtgaatttgaatagtgaaactgctctgaaatgctatggaaagccgactccccaaagagtggtttcttctagaagtttgaatttgtagctacagtttccaagaagaaaaatagtagttggataatttagtaaaataataacatcattttcattttcttacctattcttaactttggtttcctaaaggaagaaaatgagcaggtagcacataatctatttaagtagatttaaagagagtttcaaaataaatctcctggtctagctcttaggtgaataaaatagattttgtttgagacctcaaaatattttgaggttagctggtaattttcaataatttacaagcttccttccaaactaatctcatacttttgtatgtttcatcttgaaaatatcttttgggaaataccactttagtgattatttagcatttagcagttacacataggaaaatacacagttacatagaaaaatacacatttgaagatagaggaaaccttgaatggaggggaagtgttgacaaattttaatttttaaaggagaaactttttgactatctgggttagaggaagatatgtgtaccgcctttagggcattttgttatttccgctgaatcattagttattaggatagataaatttttccaattagtttcagcaagcgttgttggaaacactgtgcagtcaaggattgtgcagtgctggttgtgtgaccacaccctgagtcagtggtgtggggaagtaaagtgtgaagaagcagtaagattggtttttaattttgcccatgttttaaattttcctggtgttttcggtagctgactataaaatgatagagacatttgggacaggcactttaaactgaacaccccttttggttttaccaaaggtcttcagtaattgttcttttctttttcctcctggactgcaggttcctgaagagggtttctgaggaaatgggcaagatgttgaaggaggttacatgcagctgcttttgggggagggtattagagttgtcaggctcaaagagagtgagagaagcaagttgcatgagtgcatgcagacatgannnnnnnnnnactaacttcattagcatttccatacattgtttttaaaaatcataataccaacccttaagttcctagttcacagttattcccacaaaagaaaaagccaacaatagtgtaccatttttctatttattttattgctgtctaatcaataaagaatgcagagctgtcaaaaaatgtgtcttacattagctgtcccaacaggattgtcttccctcccagctctgttttaattggctttt

SEQ ID NO: 186306 - DNA, 2234 bp, Homo Sapiens
  misc_feature (219)..(228): n is a, c, g, or t
actttgtacaaaaaagttggcttttggttttaccaaaggtcttcagtaattgttcttttctttttcctcctggactgcaggttcctgaagagggtttctgaggaaatgggcaagatgttgaaggaggttacatgcagctgcttttgggggagggtattagagttgtcaggctcaaagagagtgagagaagcaagttgcatgagtgcatgcagacatgannnnnnnnnnactaacttcattagcatttccatacattgtttttaaaaatcataataccaacccttaagttcctagttcacagttattcccacaaaagaaaaagccaacaatagtgtaccatttttctatttattttattgctgtctaatcaataaagaatgcagagctgtcaaaaaatgtgtcttacattagctgtcccaacaggattgtcttccctcccagctctgttttaattggcttttagacccactatctgtcagatccttgccatctgtcagtgtctgcctgcgccacctccgtgcttgcttaacatcctgttgcatgtctagcgtgattggctagatttttcaggcatgtctttagattcccttgttcttgtcaaagccttgttttgttttacatttgtagtgcaaatcactttgtcaaacatctccagcactaatgtttccatcttagtatttgtgcacactgctataacttccccactgcaaacattccagttttggcattacgaagaagtagctgtgaacctgaagtatttatgataagaaaaagaaaacatctctgctgtagcctacagcccagttgaaagaactctttgaaacgtgatacatcttcagcacctcagtctgggaagaatctagtcagcactgaaatcctggcataataaacacagaagatattcaccacctcaagacaaaggactattgtcaaaagtcagctgcttccattcaaatgctgccttaaacttgagtgcctaaatctgttgattgccaacactaccactacagtatcccacaaagggctttatgtgtcagctcagtgcgacctgctttaactctgcagcaccgctgcagctgccgatgtagcctcggtaggtggctattagagctctaccatatacagtggtgcatcttcaaatttatgcatcaaactaaagacatgtccaagtccattttaatttcctcagtggttttatgagaagttttatgggcctcccccaattgtctttttattttgggttatgacgatcatgtttgataattacaatgatagtctctttccacgtgatgcttttgtttgaacctgataaaatttagtgaaactttgtaatgatctatgtgcacttttacttgtaaaatggaatttctgtatgtttatacttgtaaatatgattgttgttagtgctcctgttgctcatggtgtcctgcctcgcatttgtgattctgttaatgacatgtatcttaactaatttcttagtggtgttgtaatagggagatggggcaggtggggggttatttgtaccactgaatcttcattaatttggttctttactgttttgaggggagaaagaacgtgaaatggtttgtgtattattgaattttaagcaatattttagaagctgtgtgactgctttaataactttttcccagtgttatttgaatcatactacccgttatactaaagctgaatgacaattgtgtgaaagttactgccttcataagatcaagtcaccactgttacacagctgacatatagtgtattacctttgcagctagtaaactataaagtttagatattgaatctcgttacagggttatttatataatgtgacattattcagtactgacagactacatgaagtagttttaaaatctagtgctatttttattttaaaggttagcaatgaggaggaaatgtgatctggctgtgtttgtcttctgtacaaagcctgaagtgcttatggttttttggctaacagccacagagggcaaagtttaagactttcttgtaaggactaactgttcttttcaagctactgtttgtttttctaaaagcaggatttgcttccgtaggaggcaagttccttgatgtggaatagtgcaacctgtatatgggttattataataggaaagacatttgtacttgcacagtttaaatcattcttaaattttgaacatgtgaattgtcccaaaaaatccttaattttttggtaatttttactctttttgtgc

SEQ ID NO: 186307 - DNA, 2968 bp, Homo Sapiens
aaaaagttggggttgtcctgcttggctgcggagggagtggaacctcgatattggtggtgtccatcgtgggcagcggactaataaaggccatggcgccagcagaaatcctgaacgggaaggagatctccgcgcaaataagggcgagactgaaaaatcaagtcactcagttgaaggagcaagtacctggtttcacaccacgcctggcaatattacaggttggcaacagagatgattccaatctttatataaatgtgaagctgaaggctgctgaagagattgggatcaaagccactcacattaagttaccaagaacaaccacagaatctgaggtgatgaagtacattacatctttgaatgaagactctactgtacatgggttcttagtgcagctacctttagattcagagaattccattaacactgaagaagtgatcaatgctattgcacccgagaaggatgtggatggattgactagcatcaatgctgggagacttgctagaggtgacctcaatgactgtttcattccttgtacgcctaagggatgcttggaactcatcaaagagacaggggtgccgattgccggaaggcatgctgtggtggttgggcgcagtaaaatagttggggccccgatgcatgacttgcttctgtggaacaatgccacagtgaccacctgccactccaagactgcccatctggatgaggaggtaaataaaggtgacatcctggtggttgcaactggtcagcctgaaatggttaaaggggagtggatcaaacctggggcaatagtcatcgactgtggaatcaattatgtcccagatgataaaaaaccaaatgggagaaaagttgtgggtgatgtggcatacgacgaggccaaagagagggcgagcttcatcactcctgttcctggcggcgtagggcccatgacagttgcaatgctcatgcagagcacagtagagagtgccaagcgtttcctggagaaatttaagccaggaaagtggatgattcagtataacaaccttaacctcaagacacctgttccaagtgacattgatatatcacgatcttgtaaaccgaagcccattggtaagctggctcgagaaattggtctgctgtctgaagaggtagaattatatggtgaaacaaaggccaaagttctgctgtcagcactagaacgcctgaagcaccggcctgatgggaaatacgtggtggtgactggaataactccaacacccctgggagaagggaaaagcacaactacaatcgggctagtgcaagcccttggtgcccatctctaccagaatgtctttgcgtgtgtgcgacagccttctcagggccccacctttggaataaaaggtggcgctgcaggaggcggctactcccaggtcattcctatggaagagtttaatctccacctcacaggtgacatccatgccatcactgcagctaataacctcgttgctgcggccattgatgctcggatatttcatgaactgacccagacagacaaggctctctttaatcgtttggtgccatcagtaaatggagtgagaaggttctctgacatccaaatccgaaggttaaagagactaggcattgaaaagactgaccctaccacactgacagatgaagagataaacagatttgcaagattggacattgatccagaaaccataacttggcaaagagtgttggataccaatgatagattcctgaggaagatcacgattggacaggctccaacggagaagggtcacacacggacggcccagtttgatatctctgtggccagtgaaattatggctgtcctggctctcaccacttctctagaagacatgagagagagactgggcaaaatggtggtggcatccagtaagaaaggagagcccgtcagtgccgaagatctgggggtgagtggtgcactgacagtgcttatgaaggacgcaatcaagcccaatctcatgcagacactggagggcactccagtgtttgtccatgctggcccgtttgccaacatcgcacatggcaattcctccatcattgcagaccagatcgcactcaagcttgttggcccagaagggtttgtagtgacggaagcaggatttggagcagacattggaatggaaaagttttttaacatcaaatgccggtattccggcctctgcccccacgtggtggtgcttgttgccactgtcagggctctcaagatgcacgggggcggccccacggtcactgctggactgcctcttcccaaggcttacatacaggagaacctggagctggttgaaaaaggcttcagtaacttgaagaaacaaattgaaaatgccagaatgtttggaattccagtagtagtggccgtgaatgcattcaagacggatacagagtctgagctggacctcatcagccgcctttccagagaacatggggcttttgatgccgtgaagtgcactcactgggcagaagggggcaagggtgccttagccctggctcaggccgtccagagagcagcacaagcacccagcagcttccagctcctttatgacctcaagctcccagttgaggataaaatcaggatcattgcacagaagatctatggagcagatgacattgaattacttcccgaagctcaacacaaagctgaagtctacacgaagcagggctttgggaatctccccatctgcatggctaaaaacacacttgtctttgtctcacaacccagagcaaaaaggtgtccctacagggcttcattctgcccattcgcgacatccgcgccagcgttggggctggttttctgtacccctttagtaagaacgatgagcacaatgcctggactccccacccggcctgtttttatgatattgatttggaccctgaaacagacgggtgaatggattattctaacagatcaccctcccatcttcaagaaactacttggaattctggcaggtgtctattcaaggccccctgggga

SEQ ID NO: 186308 - DNA, 971 bp, Homo Sapiens
ccaactttgtacaaaaaagttgggttctttgccgggaagggggaaatggcccttcgggactggccctaaccatggggttaagggggtttacccaacctgtgccactacccaggccctgcggctgtcagggtgttcctaagtctcctttctcccagctacctgttttctactccagatcagtggagcccagcatttatggtgcctgattcctgcatggtcagtgagctgccctttgatgctcatgcccacatcctgcccagagcaggcaccgtagccccagtgccctgtacaaccctgctgccctgtcaaaccctgttcctgaccgatgaggagaagcgtctgctggggcaggaaggggtttccctgccctctcacctgcccctcaccaaggtaacatgcttcccctaagggtatcccaacccaggggcctcaccatgacctctgaggggccaatatcccaggagaagcattggggagttgggggcaggtgaaggacccaggactcacacatcctgggcctccaaggcagaggagagggtcctcaagaaggtcaggaggaaaatccgtaacaagcagtcagctcaggacagtcggcggcggaagaaggagtacattgatgggctggagagcagggtggcagcctgttctgcacagaaccaagaattacagaaaaaagtccaggagctggagaggcacaacatctccttggtagctcagctccgccagctgcagacgctaattgctcaaacttccaacaaagctgcccagaccagcacttgtgttttgattcttcttttttccctggctctcatcatcctgcccagcttcagtccattccagagtcgaccagaaagctgggtctgaggattaccagcctcacggagtgacttccagaaatatcctgacccacaaaggacgtaacagaaaatctgggagacccaagtggtaaagtcccagactgagggagccac

SEQ ID NO: 186309 - DNA, 1741 bp, Homo Sapiens
  misc_feature (335)..(352): n is a, c, g, or t
  misc_feature (408)..(417): n is a, c, g, or t
  misc_feature (463)..(483): n is a, c, g, or t
  misc_feature (1430)..(1449): n is a, c, g, or t
  misc_feature (1637)..(1666): n is a, c, g, or t
ttggcatagggaaagctgtgactactctgaaatggaacctagcattatatccttgtagggtagattataaatcatttccagttcatttctcttagaggtgattacctctagccatcagccttactccatcccatgtttggtatgcaatttgagccacaaggctcgtatcgccaacagctatatacattttgttccatttttctgtcttacagagccatgataaaactgtggttagtgagttaaaattcctggagtaactactgtttttctcctttgaaacttaggtttctaaagttgcacctaaggaatctgtcacattttctgttgaatcatgnnnnnnnnnnnnnnnnnnaacagatattccttctgatacggacttgaaaattagtgtatggtgacctgtgtttnnnnnnnnnngtacaatacaactacatatagctatatagcttaatgagacttccannnnnnnnnnnnnnnnnnnnnggtttgttgttgttgtagtagtctggtgctggccacatttaagtcttaaaaatttttaaattttgttgttgatgtttgtagacagccctgttgttgaaatcatggctttattcattttatttattttttaaacttgcctgaatttgttctaaaggaatatttaagagacataattttcttctctttaccataacattacacaaaactttttcctaaaacacggttgtgaggtactgatgaggtgtaagtggagctgttaaaaacagcagtgctgtattgcagttatgtatattcgtgtacagtatgtttagatcccaggtaaacatattcttttctgagaggataaatacctgcattcagatattccaggtaaatataattgagtcagggagtagtaaatctgatggagaattcactttggggaggggaaaaagaatagtatgcaagacccttattggcttttaattatacctgaaaccaaaatggatatttttagtctctctgcatgtgagatttggtgtaacaagatagaactataatatatacagtatatggaaggatagatatagtgctttgttcattttaattgcaaagctgccaaaatagttgaagcttaattacttgacttgccttgatttataggactggggcttggagaaaatgagcagatgttcctctaagacatcgattacagaagccttatatacatggatttgattttgtatttgtagctgaaagtcactgttgtctaaaactaacttttctaagttatcaaaacaacctaatttcttttccaacaaggagaacttaatggcatgaaggattgtgtgacacattggaaaagccagcttactgccactctcttcctttggccattagagggaggtgttgcctttcattgacgcttagaagcaaattgttcacttgttaagaaaagtaaatccttnnnnnnnnnnnnnnnnnnnntttaaccaatttttcttaatacccagaaggaattatactcaatatttccctagttaagaaaagaggagataatgttcgtctaaaaaaactccaacgttgtaattacaactctacattcatttacttacttgacatactgccacaaagtagtttttgagttcattaaaaattccaaaggcattagttgnnnnnnnnnnnnnnnnnnnnnnnnnnnnnnagttaactttatagacattttagtaacttgctaaagattcaggggaatctatgaaaccccgaatttaaaaacatc

SEQ ID NO: 186310 - DNA, 1243 bp, Homo Sapiens
ttggctctagcagtgctggagccaggtggcgagaggcacttcctggacctcactactacacatggggagaccacggcggaatcatcacggccattgcccagggcatggaaaccaacgagctaaaatacagtaccaatgaaggggagacctggaaaacattcatcttctctgagaagccagtgtttgtgtatggcctcctcacagaacctggggagaagagcactgtcttcaccatctttggctcgaacaaagagaatgtccacagctggctgatcctccaggtcaatgccacggatgccttgggagttccctgcacagagaatgactacaagctgtggtcaccatctgatgagcgggggaatgagtgtttgctgggacacaagactgttttcaaacggcggaccccccatgccacatgcttcaatggagaggactttgacaggccggtggtcgtgtccaactgctcctgcacccgggaggactatgagtgtgacttcggtttcaagatgagtgaagatttgtcattagaggtttgtgttccagatccggaattttctggaaagtcatactcccctcctgtgccttgccctgtgggttctacttacaggagaacgagaggctaccggaagatttctggggacacttgtagcggaggagatgttgaagcgcgactggaaggagagctggtcccctgtcccctggcagaagagaacgagttcattctgtatgctgtgaggaaatccatctaccgctatgacctggcctcgggagccaccgagcagttgcctctcaccgggctacgggcagcagtggccctggactttgactatgagcacaactgtttgtattggtccgacctggccttggacgtcatccagcgcctctgtttgaatggaagcacagggcaagaggtgatcatcaattctggcctggagacagtagaagctttggcttttgaacccctcagccagctgctttactgggtagatgcaggcttcaaaaagattgaggtagctaatccagatggcgacttccgactcacaatcgtcaattcctctgtgcttgatcgtcccagggctctggtcctcgtgccccaagagggggtgatgttctggacagactggggagacctgaagcctgggatttatcggagcaatatggatggttctgctgcctatcacctggtgtctgaggatgtgaagtggcccaatggcatctctgtggacgaccagtggatttactg

SEQ ID NO: 186311 - DNA, 896 bp, Homo Sapiens
  misc_feature (307)..(324): n is a, c, g, or t
gccaactttgtacaaaaaagttgggtttgtcctacccatttctactacagttttttccttatggacccatactaggttgtacaaaccttaaggactcgttaccatttgcagttaccataagtgctttatcttctctatgcacaggcttaaacttgactgttgtatgttagcatattttctatgcagcagttggtcaacttcaactcaaaacactgttttcttatgtttgttacaaacttaattttttgaaagtactctgtagcatgacaatttttagagctgcaggttagctattatagctcaagcnnnnnnnnnnnnnnnnnncttcactttcttcacatctgaggtttctttctctaatccactgaaattattgtgtgctaaatttgggaaacagatctattctaactcattaacccagttgaaatttaggtctgtcatcttaatatatcatgcagtaaaaggaagaatctttttaaagtgacccacctttcatgctgctccagcattgtcctgcttgtgctgatggtgtgattaggtgtagagaatttgcttaaatttaacttcaaagttcatcacacagcttaatgagtcacattgaaatactcagtaattgaactgcaaatcacttttagttacaaaaagagctaaagcatgtcagtggcatgatgcttgccaagccagatctaggcatctaggataattaaggtattttagtatgcaatttactgccataatatcaaaggtcagtaacagtgttctttctttcttcaagcttatgtatacctttaaagataacttgcatgaattactttgattactttggtctcaattatttgtcaccccagttaaacatgaaaggttgcagtgcttcctgttcccttactggaagttag

SEQ ID NO: 186312 - DNA, 2629 bp, Homo Sapiens
ttgggacagggcatgctgggtcggcggagctgaggctcccagctgtgggcctcgctggcccggtcgcccagtctcgcgagagttgggagtaaacagccccgaatggagtgcccaggcgtgttcgccgcggaggcgccgttatcccgggcccgccggccctgagctcccggcggcgcagattggctcacagtggttgattgatcaaccccattggacgttggttctgtggtacaaatggagtacaggactcagtcgtcacggcctgagtgagagaagccttatttccaagatggagaagaagcggagaaagaaatgaaagcctctcttcaggctgaaccacaaaaggccatgggatttaacttttatttatgttgggcaagactgtaagatggctgattagtaatgttgcagcttttagctgaaacaaaaattcacttttaatcaagaagaaaaaagtgtgatttgaatatatgcaattttatgatcatattcgcttgtgaccatgaagcttgtcaacatctggctgcttctgctcgtggttttgctctgtgggaagaaacatctgggcgacagactggaaaagaaatcttttgaaaaggccccatgccctggctgttcccacctgactttgaaggtggaattctcatcaacagttgtggaatatgaatatattgtggctttcaatggatactttacagccaaagctagaaattcatttatttcaagtgccctgaagagcagtgaagtagacaattggagaattatacctcgaaacaatccatccagtgactaccctagtgattttgaggtgattcagataaaagaaaaacagaaagcggggctgctaacacttgaagatcatccaaacatcaaacgggtcacgccccaacgaaaagtctttcgttccctcaagtatgctgaatctgaccccacagtaccctgcaatgaaacccggtggagccagaagtggcaatcatcacgtcccctgcgaagagccagcctctccctgggctctggcttctggcatgctacgggaaggcattcgagcagacggctgctgagagccatcccgcgccaggttgcccagacactgcaggcagatgtgctctggcagatgggatatacaggtgctaatgtaagagttgctgtttttgacactgggctgagcgagaagcatccccacttcaaaaatgtgaaggagagaaccaactggaccaacgagcgaacgctggacgatgggttgggccatggcacattcgtggcaggtgtgatagccagcatgagggagtgccaaggatttgctccagatgcagaacttcacattttcagggtctttaccaataatcaggtatcttacacatcttggtttttggacgccttcaactatgccattttaaagaagatcgacgtgttaaacctcagcatcggcggcccggacttcatggatcatccgtttgttgacaaggtgtgggaattaacagctaacaatgtaatcatggtttctgctattggcaatgacggacctctttatggcactctgaataaccctgctgatcaaatggatgtgattggagtaggcggcattgactttgaagataacatcgcccgcttttcttcaaggggaatgactacctgggagctaccaggaggctacggtcgcatgaaacctgacattgtcacctatggtgctggcgtgcggggttctggcgtgaaaggggggtgccgggccctctcagggaccagtgttgcttctccagtggttgcaggtgctgtcaccttgttagtgagcacagtccagaagcgtgagctggtgaatcccgccagtatgaagcaggccctgatcgcgtcagcccggaggctccccggggtcaacatgtttgagcaaggccacggcaagctcgatctgctcagagcctatcagatcctcaacagctacaagccacaggcaagtttgagccccagctacatagatctgactgagtgtccctacatgtggccctactgctcccagcccatctactatggaggaatgccgacagttgttaatgtcaccatcctcaacggcatgggagtcacaggaagaattgtagataagcctgactggcagccctatttgccacagaacggagacaacattgaagttgccttctcctactcctcggtcttatggccttggtcgggctacctggccatctccatttctgtgaccaagaaagcggcttcctgggaaggcattgctcagggccatgtcatgatcactgtggcttccccagcagagacagagtcaaaaaatggtgcagaacagacttcaacagtaaagctccccattaaggtgaagataattcctactcccccgcgaagcaagagagttctctgggatcagtaccacaacctccgctatccacctggctatttccccagggatcatgcctggccgctacaaccaggaggtgggccagaccattcctgtctttgccttcctgggagccatggtggtcctggccttctttgtggtacaaatcaacaaagccaagagcaggccgaagcggaggaagcccagggtgaagcgcccgcagctcatgcagcaagttcacccgcccaaagaccccttccggtgtgaccggcagcc

SEQ ID NO: 186313 - DNA, 1252 bp, Homo Sapiens
ttggattttttccatgaaaccggtctgtagcttagatttcgcaggtgtagccttgcgtgtgtcagtggtggtcagcaaagtttgaccagccagtgctgtgcacacatctgcccatcttcaagggaacggttctgattttctcacccaccttcagcaatggaaacacacattgtccgggaggaaccaatcaggcgtggctcctgcggctcatggaggatagcttaatagagcacaggggctctgtgctgtgttgtgggaaagcagacagactcataataaggccctcctttttcctttgcattttagtaatagagatgattttcttttttgttgatgttgctgctaaccacaggaaaccatcttcatcggtactccaaggttctggaggcccatttgggagacccaaaacctcggcctctaccagcctgtccacgcttgtcttgggccaagccacagcctttaaacgagacggcgcccagtaacctttggaaacatcagaagctactctccattgacctggacaaggtggtgttacccaactttcgatcgaatcgccctcaagtgaggcccttgtcccctggagagagcggcgcctgggacattcctggagggatcatgcctggccgctacaaccaggaggtgggccagaccattcctgtctttgccttcctgggagccatggtggtcctggccttctttgtggtacaaatcaacaaggccaagagcaggccgaagcggaggaagcccagggtgaagcgcccgcagctcatgcagcaggttcacccgccaaagaccccttcggtgtgaccggcagcctggctgaccgtgagggccagagagagccttcacggacggcgctggtgggtgagccgagctgtggtggcggctggtttaaaagggatccagtttccagctgcaggtttgttagagtctgttctacatgggcctgccctcctgtgatgggcagaggctcctggtacatcgagaagattcctgtggatcccgtcaggagggacttagtggctctgccgccagtgagacttcccgccggcagctgtgcgcaccaaagactcgggagaactggaaaggctgtctggggtcttctgactgcaggggaaggatgtactttccaaacaaatgatacaaccctgaccaagctaaaagacgcttgttaaagggtattttctatatttattgttgggaaaagtcactttaaagacttgtgctatttggaagcaaagctatttttttt

SEQ ID NO: 186314 - DNA, 1721 bp, Homo Sapiens
actttgtacaaaaaagttggctggcagccctatttgccacagaacggagacaacattgaagttgccttctcctactcctcggtcttatggccttggtcgggctacctggccatctccatttctgtgaccaagaaagcggcttcctgggaaggcattgctcagggccatgtcatgatcactgtggcttccccagcagagacagagtcaaaaaatggtgcagaacagacttcaacagtaaagctccccattaaggtgaagataattcctactcccccgcgaagcaagagagttctctgggatcagtaccacaacctccgctatccacctggctatttccccagggataatttaaggatgaagaatgaccctttagactggaatggtgatcacatccacaccaatttcagggatatgtaccagcatctgagaagcatgggctactttgtagaggtcctcggggcccccttcacgtgttttgatgccagtcagtatggcactttgctgatggtggacagtgaggaggagtacttccctgaagagatcgccaagctccggagggacgtggacaacggcctctcgctcgtcatcttcagtgactggtacaacacttctgttatgagaaaagtgaagttttatgatgaaaacacaaggcagtggtggatgccggataccggaggagctaacatcccagctctgaatgagctgctgtctgtgtggaacatggggttcagcgatggcctgtatgaaggggagttcaccctggccaaccatgacatgtattatgcgtcagggtgcagcatcgcgaagtttccagaagatggcgtcgtgataacacagactttcaaggaccaaggattggaggttttaaagcaggaaacagcagttgttgaaaacgtccccattttgggactttatcagattccagctgagggtggaggccggattgtactgtatggggactccaattgcttggatgacagtcaccgacagaaggactgcttttggcttctggatgccctcctccagtacacatcgtatggggtgacaccgcctagcctcagtcactctgggaaccgccagcgccctcccagtggagcaggctcagtcactccagagaggatggaaggaaaccatcttcatcggtactccaaggttctggaggcccatttgggagacccaaaacctcggcctctaccagcctgtccacgcttgtcttgggccaagccacagcctttaaacgagacggcgcccagtaacctttggaaacatcagaagctactctccattgacctggacaaggtggtgttacccaactttcgatcgaatcgccctcaagtgaggcccttgtcccctggagagagcagcgcctgggacattcctggagggatcatgcctggccgctacaaccaggaggtgggccagaccattcctgtctttgccttcctgggagccatggtggtcctggccttctttgtggtacaaatcaacaaggccaagagcaggccgaagcggaggaagcccagggtgaagcgcccgcagctcatgcagcaggttcacccgccaaagaccccttcggtgtgaccggcagcctggctgaccgtgagggccagagagagccttcacggacggcgctggtgggtgagccgagctgtggtggcggctggtttaaaagggatccagtttcagctgcaagtttgttagagtctgttctacatgggcct

SEQ ID NO: 186315 - DNA, 1413 bp, Homo Sapiens
ttggcacaggggtgttgtgaggctctattcatttgctcctttattctttcctgtattctctgtatgtccagcactttgtagccatgggaggaaagggactataaaagtgtacaatgttaatggaatgatacggtacctgaaagccttgttttctagtaagaaaatgctaccttgctgtacatacttataaccttgtatttggaaatgagaaataggtttatattttcagatctctcaaaaatcacatcatttgaccaaagaataatttaagacacatagaacagatttttttaatttatattttcatcctgaccagcttagttctaataatttttagttgtgagtgattaaaaaactttggatcaattttggtcaaacatgccaactttgtagtctgagtgacaggcaaggatttttgggtttaagatgcacttttagcacacatttgtatttcccttggcatatcagattgagctaatggtgatgttatttcaatctaacagccaccaatctgaaattgtatttcaaatgttgattctgtagttctttaaataataatgaagctcatcttatacattttgctttcaccaattgattccttcttcttttagcccactattaaaacatttcttactgaatggttcatgtaggcttgctgaacagcacgcattacttgcttcctgaagagttcccccattcatccatttgtcccattagttgctgcggattatcaagttttgaaggaactgtacatcccaacagactgaaacattctaagtgaaatgagtataatccaagtaactggtgaactttggaggtttggagcttgaagagaatggctaagaagatttgaattatagggagggaacagaaatcatacatgaaaaggttttactgagaaggggaaaaccttagatagagggacatgtgaaacaaaatcatttgaaattttgattcagacatccatttccagtggcaaacagcaaagcctgaacccataaacccaaatgataggtgaagttgggtggttttatccaatgtctcaagcaagcaatgtctgggaatatcatagagtaacaagtgctggtcagccaaagaaacattcactgctggtgaaccaataccataagcatgtattatctaagcacttgatcaagaaatatacatgttgtacaagctctcaattttgttcatttattatcaaatttttaaaatacaagtttggtatgtgatttggaaaagatgccttctggatcttaagccagttgtcagtggaggtcctcagggctgcaaatgtcaagacataaccctgttcctcaccatcatgataccagatacaggtgaatacataggaactatctgcctgtgtcctcaatctcccttcaaacaagatgctgatttgtacggtacttg

SEQ ID NO: 186316 - DNA, 1300 bp, Homo Sapiens
ttggcgagcagacacccagcgctgccggaactcggggcgcgcatcccgcaagtcggaacccggcggatcggatcccgcagatcggagacggggcctggagggtggcagcacgcaaagggtgtccctgtccctcaaggggtcatggcctccatgttgctcgcccagcgcctggcctgcagcttccagcacagctaccgcctgctggtgcctggatccagacacattagtcaagctgcagccaaagtcgacgttgaatttgattatgatgggcctctgatgaagacggaagtcccagggcctagatctcgggagttaatgaaacagctgaatataattcagaatgcagaggctgtgcattttttctgcaattacgaagagagccgaggcaattacctggttgatgtggacggcaaccgaatgctggatctttattcccagatctcctctgtccccataggttacagccaccccgccctgctgaaactcatccaacagcctcaaaatgcgagcatgtttgtcaacagacccgccctcggaatcctgcctccggagaactttgtggagaagctccggcagtccttgctctcggtggctcccaaagggatgtcccagctcatcaccatggcctgcggctcctgctccaatgaaaacgccttaaagaccatcttcatgtggtaccggagcaaggaaagagggcagaggggcttctcccaggaggagctggagacgtgcatgattaaccaggcccctggctgccccgactacagcatcctctccttcatgggcgcgttccatgggaggaccatgggttgcttagcgaccacgcactctaaagccattcacaagatcgacatcccttcctttgactggcccatcgcaccgttcccacggctgaaataccctctggaagagtttgtgaaagagaaccaacaggaggaggcccgctgtctggaagaggtggaggatctgattgtgaaatatcggaaaaagaagaagacggtggccgggatcatcgtggagcccatccagtccgagggtggagacaaccacgcatccgatgacttctttcggaagctgagagacatcgccaggaagcatggctgcgccttcttggtggacgaggtacagaccggaggaggctgcacgggcaagttctgggcccatgagcactggggcctggatgacccagcagacgtgatgaccttcagcaagaagatgatgactggggggcttcttccacaaggaggagttcagggcctaatgctccctaccggatcttcaacacctggctgggggaccc

SEQ ID NO: 186317 - DNA, 1316 bp, Homo Sapiens
ttccttctgatctagcagtggtaacccctgctgttgctgccactgcttcaatatttgtaagtgctgctttattcttcattctgaaaagaagagattatagtaaacaagtctttatctccacatatgatagtgttataaatactgtaaaagcatggaaggtgcaaaactcagtatttctacaattgcagctaagaacattaggatgaatggctggctgcttctaggaatataagatgcctcaagcattcattatttatgatttgaatactgtagctattttttgttgcttggcttttgaatgaatgtaaattgttttcttttgtgtatttatacttgtatgtatgatttgcatgtttcaatgataaagggataaaacagtatactgacaactgtttacaagaaagtggagaaaaatgtacatacatttttgtatgtttagatattaccgtaaatactcaggattggagctgcttgtaagtataacaatatacagaataactttattttatcttgtcagagtccatcactaatctaaaacaaaggtggcacttttttatgttaaccttaaactctaggccttactggaagccactgataggggacacttcactaccagatgtgtgcagtgcaacagatggtcatatacactgtgaggcactgaaattttgccttcagaggttctgaccagattggctgctgaaatagcccctaactttctgaaggcttgaagaggaaaaaataaagtttacatactcttgatgtgaagtgcatttaaatgtttgttggcttgttgcagttctatgaaacagagctgttaataatggttatgtggattactgtgatttgaaaactaaattcacaataacttacctagtagagatttagtgagttgtttcctttaaagaattttacactacatattttaatagtaaacagggatcacttttcctttagcattcagaatgacaccatattcttaaatatactccttccctgaagcgtgtttgtgtgtgatgccatatttctttttcaggtaaatgtagtcttccttataaaaatgaaattaaacctatgctctcaattcttttatattctaacaataaataaaaaagaaaagattactgactgtgcattgtacctgtatttatagtttatggttatcaggaagctctgtaagaaagaaaagtcagcctcccaggcaaaccagtagtggaggttttacatttgtttgcacatctcagtatatttctgttgaggtaaagtttgcacagtcatctgacttctgatcagcattagattttaacttgtttagattt

SEQ ID NO: 186318 - DNA, 3385 bp, Homo Sapiens
  misc_feature (1545)..(1553): n is a, c, g, or t
ttggctagaaatatggtaattatatggaattaaagttattgtttttgtttgcctttttttaaattaagaaaatagtattctcagatgtgttcaaggaatattttattaagaatttgttagagtccagaatgtatttaggattctatcttattagttatagccatatcctgtattttatagataagaacactgagactaggaaagctaaattgacttgattgatttacataggtaagtagtgccagaattgattaatttaaacactgttcaatattgagaatttgaattttgattcaattaatctgctacatccatgtcttatttatagtatacttgcagagtagtatcatagaaacgtaaactaatcagtgttgtttctatacagtgagagaatcaaagaagctactgacaataattctgaaaaatacagtaaaaattagcaaaagagaagggaaagaattgcttttgtattttgacgcatcactagaaatcactaatgtaactcaaaaaatttttggtgcaactaaacatagggaatctatcagaaaacaaggtatttcagttgccaaaacgtcgctgcatatactttttgacgcaagtggatcacagattctagtgccagaaagtcaaatctcaccagtcggagaagagctcgttagtttaaaggaaaaatcaaagtccccaaaggaatttgctaaaccttcaaaatatatcaaaaacagtgacaaagggaatagaaataatagtcagcttgagaaaactactcctagcaaaagaaaaatgtctgaagcatcaatgattgtttctggtgcagatagatacactatgagaagtccagtgcttttcagcaacacatcatatcaaaactgctaagtgtgtagaaaacacagaaaataagaatgttgaattcccaaaccaaaattttagtgaactccaggatgttataccagattcacaggcagcggaaaaaagagatcatactatattacctggtgttttagacaacatctgtggaaataaaatacacagcaaatgggcatgttggacacctgtaacaaacattgaactatgtaataaccaaagagcaagtacttcgtcaggagacacattgaatcaagatattgttataaataaaaaacttactaaacaaaaatcatcctcttcaatatctgatcataattctgaaggaacaggaaaagtgaaatataagaaagaacaaaccgaccatatcaaaatagataaagcagaagtagaagtttgcaagaaacacaatcagcaacaaaatcatcctaaatattcagggcagaaaaatactgaaaatgccaagcagagtgattggcctgttgaatctgaaactacttttaaatcggttctcctaaataagacaattgaagaatcgctgatatataggaagaaatacatattgtcaaaagatgtgaatactgctacttgcgataaaaatccatctgctagcaaaaatgtgcaaagtcatagaaaagcagagaaagaattgacttctgagcttaattcctgggattcgaaacnnnnnnnnntgagagaaaagtcaaaagggaaagaatttaccaatgtagcagaatccttgataagccaaatcaataaaagatacaaaacaaaagatgacatcaagtctacaagaaaattaaaggagtctttgattaacagtggtttttcaaacaaacctgttgtacaactcagtaaggaaaaagttcagaaaaaaagctacagaaaactgaagactacctttgttaatgttacttctgaatgcccagtgaatgatgtttacaattttaatttgaatggagctgatgaccctatcataaaacttggaatccaagagtttcaagctacagctaaagaagcttgtgcggataggtcaattagattggtaggtccaaggaatcatgatgaacttaaatcttctgtcaaaacaaaagataaaaaaattataacaaatcatcaaaagaaaaatctgtttagtgatactgaaacagagtacagatgtgatgacagcaagactgatattagctggctaagagaaccgaaatcaaaaccacagctaatagactatagcagaaataaaaatgtgaagaatcataaaagtggaaaatcaagatcatccttggaaaagggacagccaagctctaaaatggaggagaatatccattccagaatgaaaacggtaaagctaccaaagaaacaacagaaagtcttctgtgctgaaacagaaaaggaactatcaaaacaatggaaaaactcatctctactaaaagatgctatacgagataattgccttgacttatctcccagatctttatctggcagtccatcatctatagaagtaacgagatgtatagagaaaataacagaaaaggattttactcaggattatgactgcataacaaaatctatatcaccttatccaaaaacttcatcacttgaatccttaaatagtaacagtggagttggaggtacaataaagtcacccaaaaacaatgagaaaaacttcctgtgtgcaagtgaaagttgttcaccaattccacgaccactgtttttgcccagacatactccaactaagagtaatactattgtaaatagaaaaaaaataagttctctggtacttacacaagaaacacaaaacagtaacagctattcagatgtaagcagttatagttcagaagaacggtttatggaaattgaatctccacatatcaatgaaaattatatacaaagcaaaagagaggaaagtcatttagcatcttcattatccaagtctagtgaaggaagagagaaaacgtggtttgacatgccctgtgatgctactcatgtatcagtgtctgaaagtgtatcttcattatcaacaaatgacttttctattccttgggagacctggcaaaatgaatttgcagggatagagatgacttatgagacttacgagaggctcaattcagaatttaagagaaggaataatatccgacataaaatgttgagttattttactacgcagtcttggaaaacagctcagcaacatctgagaacaatgaatcatcaaagtcaggactctaggacttttgggaaaagatatttcagaagttcagtgcatatcaaaaaagcgaacaacagaggcttcatcttttgaaaacttcattggctaaaagtgtcttctgtaatactgatagtgaagaaactgtttttacatccgagatgtgtttgatgaaagaagatatgaaagtgctgcaagacaggcttcttaaggacatgctagaagaggagcttcttaatgtacgcagagaactgatgtcagtattcatgtctcatgaaagaaatgctaatgtgtgaaattctagtttttatcaccatactttat

SEQ ID NO: 186319 - DNA, 2084 bp, Homo Sapiens
  misc_feature (68)..(81): n is a, c, g, or t
  misc_feature (1738)..(1746): n is a, c, g, or t
  misc_feature (1818)..(1826): n is a, c, g, or t
ttggatcacaaaaaagatggacaagacaattccggaaggaagaatcagacttccacgaaaagcaaccnnnnnnnnnnnnnnctataaagatctctcaaattcagaatcagagtgtgaacaagaattttcacattcatttaaagagaacataccagtaaaggaggagaatatccattccagaatgaaaacggtaaagctaccaaagaaacaacagaaagtcttctgtgctgaaacagaaaaggaactatcaaaacaatggaaaaactcatctctactaaaagatgctatacgagataattgccttgacttatctcccagatctttatctggcagtccatcatctatagaagtaacgagatgtatagagaaaataacagaaaaggattttactcaggattatgactgcataacaaaatctatatcaccttatccaaaaacttcatcacttgaatccttaaatagtaacagtggagttggaggtacaataaagtcacccaaaaacaatgagaaaaacttcctgtgtgcaagtgaaagttgttcaccaattccacgaccactgtttttgcccagacatactccaactaagagtaatactattgtaaatagaaaaaaaataagttctctggtacttacacaagaaacacaaaacagtaacagctattcagatgtaagcagttatagttcagaagaacggtttatggaaattgaatctccacatatcaatgaaaattatatacaaagcaaaagagaggaaagtcatttagcatcttcattatccaagtctagtgaaggaagagagaaaacgtggtttgacatgccctgtgatgctactcatgtatcaggccccacccaacatcttagtcgcaaaagaatatatatagaagataatctaagtaattccaatgaagtagaaatggaagagaaaggagaaaggagagcaaacttgcttcccaaaaaactgtgtaaaattgaagatgcagatcatcatatccacaaaatgtctgaaagtgtatcttcattatcaacaaatgacttttctattccttgggagacctggcaaaatgaatttgcagggatagagatgacttatgagacttacgagaggctcaattcagaatttaagagaaggaataatatccgacataaaatgttgagttattttactacgcagtcttggaaaacagctcagcaacatctgagaacaatgaatcatcaaagtcaggactctaggattaaaaaacttgataaattccaattcattatcatagaggagctggagaattttgaaaaagattcacagtctttaaaagatttggaaaaggaatttgtggacttttgggaaaagatatttcagaagttcagtgcatatcaaaaaagcgaacaacagaggcttcatcttttgaaaacttcattggctaaaagtgtcttctgtaatactgatagtgaagaaactgtttttacatccgagatgtgtttgatgaaagaagatatgaaagtgctgcaagacaggcttcttaaggacatgctagaagaggagcttcttaatgtacgcagagaactgatgtcagtattcatgtctcatgaaagaaatgctaatgtgtgaaatctagtttttatcaccatactttatctaattattattctctgtatataactgaggaaataagaatagtcctacaaagagaaaaatatacatgtcaccgaagcaagtgtaccctttataggaaccctcaaattnnnnnnnnntgtcttttaatggatgagagggaaccactataacatgagtccaagcccagaagacttctgtctatacaatannnnnnnnnaattttggagataaaagctttaagaaactttttgagttaattatactcataaaatgagtttctttaataaattaaattttattgtgtaaaatgtattattacataaaatgtgtttttgaatcaatgcagtttggggatgaatataattaaaatatgtttaataaacttagatttcaactaataaaaatttagccacacttacaagggggaggaagtccctagtttaaatgtataactgagtggtagatcagtactttc

SEQ ID NO: 186320 - DNA, 1623 bp, Homo Sapiens
tttgtacaaaaaagttgggatgaacttcccttgtaatctctcgaggtctcaccccagtctttgggccgtatactcggccctctgagagtgagctgtgggacatgtgggcagggatccgcaacaatgacgggaacttagtcattgacagtctcttacagtacatcaatcagaggaagaagttcagaaggcgctgggtgggagctcttgcctctgtaactatccccattcattttatctatgggccattggatcctgtaaatccctatccagagtttttggagctgtacaggaaaacgctgccgcggtccacagtgtcgattctggatgaccacattagccactatccacagctagaggatcccatgggcttcttgaatgcatatatgggcttcatcaactccttctgagctggaaagagtagcttccctgtattacctcccctactcccttatctgttgtgtattccacttaggaagaaatgcccaaaagaggtcctggccatcaaacataattctctcacaaagtccactttactcaaattggtgaacagtgtataggaagaagccagcaggagctctgactaaggttgacataatagtccacctcccattactttgatatctgatcaaatgtatagacttggctttgttttttgtgctattaggaaattctgatgagcattactattcactgatgcagaaagacgttcttttgcataaaagacttttttttaacactttggacttctctgaaatatttagaagtgctaatttctggcccacccccaacaggaattctatagtaaggaggaggagaaggggggctccttccctctcctcgaatgacgttatgggcacatgccttttaaaagttctttaagcaacacagagctgagtcctctttgtcatacctttggatttagtgtttcatcagctgtttttagttataaacattttgttaaaatagatattggtttaaatgatacagtattttaggtatgatttaagactatgatttacctatacattatatatattttataaagatactaaaccagcatacccttactctgccagagtagtgaagctaattaaacacgtttggtttctgaataaattgaactaaatccaaactatttcctaaaatcacaggacattaaggaccaatagcatctgtgccagagatgtactgttattagctgggaagaccaattctaacagcaaataacagtctgagactcctcatacctcagtggttagaagcatgtctctcttgagctacagtagaggggaagggattgttgtgtagtcaagtcaccatgctgaatgtacactgattcctttatgatgactgcttaactccccactgcctgtcccagagaggctttccaatgtagctcagtaattcctgttactttacagacaggaaagttccagaaactttaagaccaaactctgaaagacctatgagcaaatggtgctgaatacttttttttaaagcccacatttcattgtcttagtcaaagcaggattattaagtgattattttaaattcgtttttttaaattagcaacttcaagtataacaactttgaaaactgggataactgtttatttttctatta

SEQ ID NO: 186321 - DNA, 901 bp, Homo Sapiens
ttgggcatgcgcaaccggttctccgaaacatggagtcctgtaggcaaggtcttacctgaatcaggatgagggagtggtgggtccaggtggggctgctggccgtgcccctgcttgctgcgtacctgcacatcccaccccctcagctctcccctgcccttcactcatggaagtcttcaggcaagtttttcacttacaagggactgcgtatcttctaccaagactctgtgggtgtggttggaagtccagagatagttgtgcttttacacggttttccaacatccagctacgactggtacaagatttgggaaggtctgaccttgaggtttcatcgggtgattgcccttgatttcttaggctttggcttcagtgacaaaccgagaccacatcactattccatatttgagcaggccagcatcgtggaagcgcttttgcggcatctggggctccagaaccgcaggatcaaccttctttctcatgactatggagatattgttgctcaggagcttctctacaggtacaagcagaatcgatctggtcggcttaccataaagagtctctgtctgtcaaatggaggtatctttcctgagactcaccgtccactccttctccaaaagctactcaaagatggaggtgtgctgtcacccatcctcacacgactgatgaacttctttgtattctctcgaggtctcaccccagtctttgggccgtatactcggccctctgagagtgagctgtggggacatgtgggcagggatccgcaacaatgacgggaactttagtcattgacagtctcttacagtacatcaatcagagggaagaagttcatacgcgctgggttgggagctcttgcctctgtaactatcccattcatttatctatggggccattggatcctgtaaat

SEQ ID NO: 186322 - DNA, 1181 bp, Homo Sapiens
  misc_feature (97)..(109): n is a, c, g, or t
ttggcaaactacaaaagttaatttttttgtaaaggagctgatccaactgccatgaggcaggcaacactggttgcagagtgcagtgggtgtaacaagnnnnnnnnnnnnnccaacagcaacaaaacagagcccatccatgtcagccacaccaatagtttcatgttaattctttgccactggagtcaattttgctatgagcaatgtaaggctggtaacctttaaattatttggttgatgtggaaaattggtgatgtaacactgtttctagatttttttcattgcctttttattctgatattaggttaatcactttgaagctatagttatgctgtaacatttagcatggcttcacaccaagttagtgtagccaatgaggaaaaagttaccataatgacagcagttgtccgagaagtgacagctgtattactcagagcttttacttcttacacctagaatattaaaatataaaacaaggggagaaatgtgacagtctattttcagttgcacatatgttccttatatataatgtttgacagttcaatctctgggtggaataaagaacacttacgtatcagtaatgggaatttttaaagatttaaaacaaatatgcaaaaatttgctatgccaagatgctggagcataatataagactgtatttggtgtgcttgttttgtttctttggtagagtttattaggtgaatcttctaaaactttccttctgttggatcccagtgacgtggaagtcatcagaaccccacggtacttggagtacctctctgcaccaagatagctggctgattttctgctcagtcacaattttacttgaaagcaagaattgtcctagctccttttccattattccaaacgtttaacgttcaaagcagggtctcattaaaaaagaaactactggttgatataattgagatattacaatttcagaataaacatttgattaaaaataaggaaatcctcagttcatactgtatttaaaagagaattggtaacttgaatgtgtgtaattttttggaacctgtctaaaaaccaaatacccctgcaaacagatacagcccaccctattctatttaaatattttgctgttttattttatagaaattattttgctgaattcacaaatagaatttgatttaaggagaactttttgtcctgtggtgtgtgtttgg

SEQ ID NO: 186323 - DNA, 4721 bp, Homo Sapiens
  misc_feature (4113)..(4131): n is a, c, g, or t
ttggattgcactgtcacagcaaaactgttcgtcaggtggcacaggagcagttctttttaatgtgcaccagatgttgcatgggacaccggcctctacttttcttcattactctactctttactgttttggggagcacagcaagagagagagctaaacactcaggcgactactttactcttttaagacaccttcttaattacgcttacaatagtaatattaatgtacccaatgctgaagttcttctcaataatgaaattgattggcttaaaagaattagggatgatgttaaaagaacaggagaaacgggtattgaagagacgatcttagagggccaccttggagtgacaaaggaattactggcctttcaaacttctgagaaaaaatttcatattggttgtgaaaaaggaggtgctaatctcattaaagaattaattgatgatttcatatttcctgcatccaatgtttacctacagtatatgagaaatggagagcttccagctgaacaggctattccggtctgtggttcaccacctacaattaatgctggttttgaattacttgtagcattagctgttggctgtgtgaggaatctcaaacaaatagtagattctttgactgaaatgtattacattggcacagcaataactacttgtgaagcacttactgagtgggaatatctgccacctgttggaccccgcccacccaaaggattcgtggggctgaaaaatgccggtgctacttgttacatgaattctgtgattcagcaactctacatgattccttccattaggaacggtattcttgccattgaaggcacaggtagtgatgtagatgatgatatgtctggggatgagaagcaggacaatgagagcaatgttgatcccagggatgatgtatttggatatcctcaacaatttgaagataaaccagcattaagtaaaactgaagatagaaaagagtacaacattggtgtcctaagacaccttcaggtcatctttggtcatttagctgcttctcgactgcaatactatgtgcccagaggattttggaaacagttcaggctttggggtgagcctgttaatctgcgtgaacaacacgatgctttagaattttttaattcattggtggatagtttagatgaagctttaaaagctttaggacatccagctatgctaagtaaagtcttaggaggttcctttgctgatcagaagatctgccaaggctgcccacataggtacgaatgtgaagaatcttttacgaccctaaacgtagacattagaaatcaccaaaatcttcttgattctttggaacagtatgtcaaaggagatttactagaaggtgcaaatgcatatcattgtgaaaaatgcaataaaaaggttgataccgtaaagcgcttgctgattaaaaaattacctcctgttcttgctatacaactaaagcgatttgactatgactgggaaagagaatgtgcaatcaagttcaatgattattttgaatttcctcgagagctggacatggaaccttacacagttgcaggtgtcgcaaagctggaaggggataatgtaaacccagagagtcagttgatacaacagagtgagcagtctgaaagtgagacagcaggaagcacaaaatacagacttgtgggtgtgctcgtacacagtggtcaagcgagtggggggcattattattcttacatcatccaaaggaatggtggagatggtgagagaaatcgctggtataaatttgatgatggtgatgtaacagaatgtaaaatggatgatgacgaagaaatgaaaaaccagtgttttggtggagagtacatgggagaagtgtttgatcacatgatgaagcgtatgtcatacaggcgccagaaaaggtggtggaatgcttatatacttttttatgaacgaatggacacaatagaccaagatgatgagttgataagatatatatcagagcttgctatcaccaccagacctcatcagattattatgccatcagccattgagagaagtgtacggaaacagaacgtacaattcatgcataaccgaatgcagtacagtatggagtattttcagtttatgaaaaaactgcttacatgtaatggcgtttacttaaaccctcctcccgggcaagatcacctgttgcctgaagcagaagaaatcactatgatcagtattcaacttgctgctaggttcctctttactacaggatttcacacaaagaaagtagtccgtggctctgccagtgattggtatgatgcattgtgtattctccttcgtcacagcaagaatgtacgtttttggtttgctcataacgtcctttttaatgtttcaaatcgcttctccgaataccttctggagtgccctagtgcagaagtgaggggtgcgtttgcaaaacttatagtctttattgcacatttttccttgcaagatgggccatgtccttcaccttttgcctctcctggaccttctagtcaggcttatgacaacttaagcttgagtgatcacttactaagagcagtactaaatctcttgagaagggaagtttcagagcatgggcgtcatttacagcagtatttcaacctgtttgtaatgtatgccaatttaggtgtggcagagaagacacagcttctgaaattgagtgtacctgctacttttatgcttgtgtctttagatgaaggtccaggtcctccaatcaaataccagtatgctgaattaggcaaattatactcagtagtgtcacagctgatccgctgttgcaatgtctcttcaagaatgcagtcttcaatcaatggtaatcctcctcttcccaatccttttggtgatcctaatttatcacaacctataatgccaattcagcagaatgtggcagacattttatttgtgagaacaagttatgtgaagaaaatcattgaagactgcagtaattcagaggaaaccgtcaaattgcttcgtttttgctgctgggagaatcctcagttctcatctactgtcctcagtgaacttctctggcaggttgcatattcctatacctatgaactgcggccctatttggatctgcttttgcaaatcttactgattgaggactcctggcaaactcacagaattcataatgcactgaaaggaattccagatgaccgagatgggctgtttgacacaatccagcgctctaagaatcactatcaaaaaagagcataccagtgtataaaatgtatggtagctctatttagtaactgtcctgttgcttaccaaatcctgcagggcaatggagatcttaaaagaaagtggacctgggcagtggaatggcttggagatgaacttgaaagaagaccatatactggcaatcctcagtacacttacaacaattggtctcccccagtgcaaagcaatgaaacgtccaatggttatttcttggagagatcacatagtgctaggatgacacttgcaaaagcttgtgaactctgtccagaggaggagccagatgaccaagatgctccagatgaacatgagtcgcctccacctgaagatgccccattgtacccccattcacctggatctcagtatcaacagaataaccatgtgcatggacagccatatacaggcccagcagcacatcacatgaacaaccctcagagaactggccaacgagcacaagaaaattatgaaggcagtgaagaagtatccccacctcaaaccaaggatcaatgaaatgcacataattaactggttccatcaagactgtgcacccaggccttacagtccaacctttttctgtgtctggctaatatttaaaactagaaaaactattcctaatcaacatggagtggagagtttattcactgtcttatctgcagaaatttgctgtcaatatataacccgcctgcagtggaaagtgtatagtgttttgtaataaatggcctgatgctaatgtgtaaatggcaaaggtgtatatagtatattaatgttgactgttaattcttaagcaagaaacttttttcttgatgagactcacagatctacacaaactacaaaagttaattttcttgttacacccactgcactctgcaaccagtgttgcctgcctcatggcagttggatcagctcctttacnnnnnnnnnnnnnnnnnnnccaacagcatcaaaacagagcccatccatgtcagccacaccaatagtttcatgttaattctttgccactggagtcaattttgctatgagcaatgtaaggctggtaacctttaaattatttggttgatgtggaaaattggtgatgtaacactgtttctagatttttttcattgcctttttattctgatattaggttaatcactttgaagctatagttatgctgtaacatttagcatggcttcacaccaagttagtgtagccaatgaggaaaaagttaccataatgacagcagttgtccgagaagtgacagctgtattactcagagcctttacttcttacacctagaatattaaaatataaaacaaggggagaaatgtgacagtctattttcagttgcacatatgttccttatatataatgtttgacagtttcaatctctgggtggaataaagaacacttacgtatcagtaatgggaatttttaaagatttaaacaaatatgcaaaaatttgctatgccaagatgctggagcataatataagactgtatttggtgtgcttgtttgtttctttggtagagtttattaagtgaa

SEQ ID NO: 186324 - DNA, 1343 bp, Homo Sapiens
  misc_feature (447)..(534): n is a, c, g, or t
gagcaatgcttttttataatgccaactttgtacaaaaaagttggcggggaaggaaggtaaaaaaggagcgctaaagattggcgggggttgtgggaaagcaagccgagtgtacgggaagggccggctgcggcccgccatgtttgaacctggcaagagcgaaagaagccggttggaatgccttcttcctgcccaaactaataaaaccgcatgcctaccttttgcttagtattggctagggatgactaatcataacatttgtaagtacttacggggtttcctccatggagacacagaagtctgggacgtttctagaagcctgtggcaaatttgaaaagcaagatacaaaatagcgtatggagtctgattatcgctatgtcaataaattttcttaaaggacaaggcactgaaataaaatggaaataataattcttttaaaaaatttttaannnnnnnnnnnnnnnnnnnnnnnnnnnnnnnnnnnnnnnnnnnnnnnnnnnnnnnnnnnnnnnnnnnnnnnnnnnnnnnnnnnnnnnngtctccgcctcccaaagtgttaggatcacaggcgtgagccaatgcgacccgtctggaaagaattctaaaacatggcctgcttggccaccgcccaggatctgcaagctgcgcgcccacaagtttcggcacccatttggactttcacaatcggagatggcagtggtgaaggcatcaacatcaaaagctaccaggccttggtattctcatccagtatatgcaagatactggcaacattatcatcaagcaatggcttggatgcaaagccaccacaatgcctacaggaaggcggcggaatcctgtttcagtcttccatggttcttccttcctgcgcttcttccccaaagctcttacgataaccaggctgcgtatcctcagtccttctatgaccatcatgtggcctagcaggactccccctgcagttcttcacatttcagagggtctgggcaacatccacatggcagcagtaggatccaggcatccacaagagaagaccaagccttatccaaggaggaagagatggagaccgagtcagatgcagaggtagcatgtgacctgagcaatatggaaatcaccgaagagctccgccagtactttgcagagacagagaggcacagagaagaactactgcggcggcaacagctggatgcggagcgcctgaacagctacgtgaacgctgaacacgacctgtactgcaacacccgccggtcggtagaggccccagctgagaggcctggtgagcggcgccaggccgaaatgaagcgtttgtactgggacagcgccgccagatccagccatggaggctacgtgca

SEQ ID NO: 186325 - DNA, 1802 bp, Homo Sapiens
  misc_feature (1208)..(1269): n is a, c, g, or t
ttggtactatctcaaataggaatataaacctggagtcaacaagcttaggcagcattgatttaggtcactttcccagtgaggaaaatttctgtgttttcagaatttccatttctactaacctcttggagaaaaagaaattgaattagaggtaaatagaagacgtcactgtggctgcttctggaagtgctggaagcatcaccccaattggctccaaatactgtcatgttttcttgcacactgacttctggtttccactgtatcagtatgtacctttgtaattgttatttttatgtcttttatgcccttgattattagttgggctcttcataaacagaggccatctctactactgtttatttttccctgctgtgcccagaacattggcgtagacacagtaagaacctagtaaatattactgtttctagccatcagggagattgtggaactcctcccagtataatttttacaaactccaagcaaatctgacccaaactcccaaattgtcaagtcctgcttaactttctctggaaaatagaccccttctcaacatcagaataggaagagaggaagaacttacaaagacacttaaaagttattcttaaatggtggttgggcatttaaaacagtgaactaacatatatataatttttgattagttggagctttctttgtattatgagagtaatatatctcattacagaaaatttggaaactataaatttagaaacgtatcacccatacgtccaacatcgaaagaaaaccagtgttatgactttgttccatttgaagactaattgggagtccatctctctattggcactgggttcgattgcccctggctaatagagttcaattagttctatccctgggtttcctttcttagctatggggtggaagataggagggggagatctacaatttgaatatgtgttacttaataaggctaggctggccatcagttgcttatttcagatgtgtcactaaattttccttctagatggtccttgagcaaaacttaataattactgttttttatttccactgcctttataaaatcaaaattttctccttttgataaaaactgttgaatactattgatgtagagaatgtgtatatgtgtatatttgcattgattaaattattggaaaacttttcattgacaggtaatgtattttggttgtgcggatggtttgtaaaaagtatcctgnnnnnnnnnnnnnnnnnnnnnnnnnnnnnnnnnnnnnnnnnnnnnnnnnnnnnnnnnnnnnngtaagatatataagaaaccccagagtttccagggtgaaagttcacattagcagcttgtccaaaatatttacacctcacaaatattttgaaagaaaccatgttgaaattttctgattttgtgagttacaaccacagcccagtaaaaccaatacttgttatttggctactttcaagcaatgcagatattctttagtatttaaaaatgagcaaataaacaaaatgaggcaaataaatgaagaaaatgagtttctgagacactgtttaggtaaccataaatcagacagatatttttatggtgggcaaattgatgaagatacttttagtaggtgatttatattcataacaaatacatattgaaataattgtcactactgtatcagaattaaaaaccagcttcacattaggacttctccatacaaatgctttatcattggttcttaaattggaaaaatatctataaatgattacatttttaagctaaataaaatgcagatattttggcttcttgtgaatgtaataaagaatcataaaac

SEQ ID NO: 186326 - DNA, 1703 bp, Homo Sapiens
ttggcactaatcaacaaaccagctttcggggtctgacgcgatccttgcctcaggcctctcgaggtccagacagccgcccagcccgctctgcgacgcagcagtgaatagtgtggtacctccttgtctcggttcaggtccagacctccccgtcttccggctgccctgaacgtcaggcgacctcaggaccctgtgattggcgcctgcgccggcggaccgtgaccgaggaaacccctggagggacttgggcattccttgggctccgtgcctgttcttcgtgctcctttcgggcaaggatctcacattatcagtctttgaccgacacagaatgcctggcatttgataaatgtttgttgaacttgaagagacatatggacaatgaatctgcaaagatactggggagagataccaatatcatcaagccagaccaacagaagttccttcgatttgctcccacgggagttccgtctggtggaagtccatgacccacccctgcaccaaccctcagccaacaagccgaagccccccactatgctggacatcccctcagagccatgtagtctcaccatccatacgattcagttgattcagcacaaccgacgtcttcgcaaccttattgccacagctcaggcccagaatcagcagcagacagaaggtgtaaaaactgaagagagtgaacctcttccctcgtgccctgggtcacctcctctccctgatgacctcctgcctttagattgtaagaatcccaatgcaccattccagatccggcacagtgacccagagagtgacttttatcgtgggaaaggggaacctgtgactgaactcagctggcactcctgtcggcagctcctctaccaggcagtggccacaatcctggcccacgcgggctttgactgtgctaatgagagtgtcctggagaccctaactgatgtggcacatgagtattgccttaagtttaccaagttgctgcgttttgctgtggaccgggaggcccggctgggacagactccttttcctgatgtgatggagcaggtattccatgaagtgggtattggcagtgtgctctccctccagaagttctggcagcaccgcatcaaggactatcacagttacatgctacagattagtaagcaactctctgaagaatatgaaaggattgtcaatcctgagaaggccacagaggacgctaaacctgtgaagatcaaggaggaacctgtgagcgacatcacttttcctgtcagtgaggagctggaggctgaccttgcttctggagaccagtcactgcctatgggagtgcttggggctcagagcgaacgcttcccatctaacctggaggttgaagcttcaccacaggcttcaagtgcagaggtaaatgcttctcctctttggaatctggcccatgtgaaaatggagcctcaagaaagtgaagaaggcaatgtctctgggcatggtgtgctgggcagtgatgtcttcgaggagcctatgtcaggcatgagtgaagctgggattcctcagagccctgatgactcagatagcagctatggttcccactccactgacagcctcatggggtcctcccctgttttcaaccagcgctgcaagaagaggatgaggaaatataaaaggaaaagagggagatgttttgtccagacctactagacccacagaaaaggttttgtattagaatctgtttccttaaaaattga

SEQ ID NO: 186327 - DNA, 2183 bp, Homo Sapiens
  misc_feature (1716)..(1724): n is a, c, g, or t
ttggattgataacaagtgtagtccctggggattatgatggagattctcaaatggatgtccttctgacatatcttcccaaaaattatgccaagagtgaattaggagctgttatcttctggggacaaaatcaaacattagatcctaacaatatgaccatactcaataggacttttcaagatgagccactaattatggatttcaatggtgatctaattcctgatatttttggtatcacaaatgaatccaaccagccacagatactattaggagggaatttatcatggcatccagcattgaccactacaagtaaaatgcgaattccacattctcatgcatttattgatctgactgaagattttacagcagatttattcctgacgacattgaatgccaccactagtaccttccagtttgaaatatgggaaaatttggatggaaacttctctgtcagtactatattggaaaaacctcaaaatatgatggtggttggacagtcagcatttgcagactttgatggagatggacacatggatcatttactgccaggctgtgaagataaaaattgccaaaagagtaccatctacttagtgagatctgggatgaagcagtgggttccagtcctacaagatttcagcaataagggcacactctggggctttgtgccatttgtggatgaacagcaaccaactgaaataccaattccaattacccttcatattggagactacaatatggatggctatccagacgctctggtcatactaaagaacacatctggaagcaaccagcaggcctttttactggagaacgtcccttgtaataatgcaagctgtgaagaggcgcgtcgaatgtttaaagtctactgggagctgacagacctaaatcaaattaaggatgccatggttgccaccttctttgacatttacgaagatggatcttggacattgtagtgctaagtaaaggatatacaaagaatgattttgccattcatacactaaaaaataactttgaagcagatgcttattttgttaaagttattgttcttagtggtctgtgttctaatgactgtcctcgtaagataacaccctttggagtgaatcaacctggaccttatatcatgtatacaactgtagatgcaaatgggtatctgaaaaatggatcagctggccaactcagccaatccgcacatttagctctccaactaccatacaacgtgcttggtttaggtcggagcgcaaattttcttgaccatctctacgttggtattccccgtccatctggagaaaaatctatacgaaaacaagagtggactgcaatcattccaaattcccagctaattgtcattccataccctcacaatgtccctcgaagttggagtgccaaactgtatcttacaccaagtaatattgttctgcttactgctatagctctcatcggtgtctgtgttttcatcttggcaataattggcattttacattggcaggaaaagaaagcagatgatagagaaaaacgacaagaagcccaccggtttcattttgatgctatgtgacttgcctttaatattacataatggaatggctgttcacttgattagttgaaacacaaattctggcttgaaaaaataggggagattaaatattatttataaatgatgtatcccatggtaattattggaaagtattcaaataaatatggtttgaatatgtcacaaggtcnnnnnnnnnaaagcactttgtatataaaaatttgggttctctattctgtagtgctgtacatttttgttcctttgtggaatgtgttgcatgtactccagtgtttgtgtatttataatcttatttgcatcatgatgatggaaaaagttgtgtaaataaaaataattaaatgagcaggaatttttgtgtccacttgacttggtcttgcttcttattctaatgatgcaaattatacttttgtgaatatatcacggagtcattaggcattcagcttcatcacagcaagtcaggggtctcactgatggcatacaatatagtgatcgggtactctgacttggtagcacagtaagacagacttgccttaaactcctaaattcaaccacttacaaaagtcattgtttgaacttggctcttgtttaacctctgtaaacctcagttttctttgtttattcagtggggctaaatacttga

SEQ ID NO: 186328 - DNA, 616 bp, Homo Sapiens
ttgggaaaactctgaagatgataagaagaggggacgttccacagacagtgaagtcagccagtctccagccaaaaacggctccaagcctgtccacagcaaccagcaccctcagtccccagctgtgccgcccacctacccctccggccccccgcctgctgcctctgccttgagcaccactcctggcaacaatggggtccccgcccccgcagcacccccaagtgccctgggccccaaggccagtccagctcccagccacaactcgggcacccctgctccctatgcccaggctgtggccccaccagctcccagtgggcccagcacgacccagccccggccccccagcgtccagcctagcggaggcggaggcggcggcagcggaggtggagggagcagcagcagtagtaacagcagtgccggtggaggggctggcaagcagaatggcgccaccagttacagctcagttgtggcagacagcccggcagaggtggctttgagcagcagtgggggcaacaatgccagcagtcaggccttgggctctcttttcggctcctacaactcacctctcagcatctcgaaggaactcagtgcggcagctccaacgggggctgggggcgtg

SEQ ID NO: 186329 - DNA, 1772 bp, Homo Sapiens
ttgggagaaatacaggtatcaggatgaagatacacctcctcaagagcatatttccccacaaatcacaaatgaagtgataggtccagaattggttcatgtctcagagaagaacttatcagagattgagaatgtccatggatttgtttctcattctcatatttcaccaataaaggttaatggcacagatgcagattatgaatatgaagaaatcacacttgaaaggggaaattcagggcttggtttcagcattgcaggaggtacggacaacccacacattggagatgactcaagtattttcattaccaaaattatcacagggggagcagccgcccaagatggaagattgcgggtcaatgactgtatattacaagtaaatgaagtagatgttcgtgatgtaacacatagcaaagcagttgaagcgttgaaagaagcagggtctattgtacgcttgtatgtaaaaagaaggaaaccagtgtcagaaaaaataatggaaataaagctcattaaaggtcctaaaggtcttgggtttagcattgctggaggtgttggaaatcagcatattcctggggataatagcatctatgtaaccaaaataattgaaggaggtgcagcacataaggatggcaaacttcagattggagataaacttttagcagtgaataacgtatgtttagaagaagttactcatgaagaagcagtaactgccttaaagaacacatctgattttgtttatttgaaagtggcaaaacccacaagtatgtatatgaatgatggctatgcaccacctgatatcaccaactcttcttctcagcctgttgataaccatgttagcccatcttccttcttgggccagacaccagcatctccagccagatactccccagtttctaaagcagtacttggagatgatgaaattacaagggaacctagaaaagttgttcttcatcgtggctcaacgggccttggtttcaacattgtaggaggagaagatggagaaggaatatttatttcctttatcttagccggaggacctgctgatctaagtggagagctcagaaaaggagatcgtattatatcggtaaacagtgttgacctcagagctgctagtcatgagcaggcagcagctgcattgaaaaatgctggccaggctgtcacaattgttgcacaatatcgacctgaagaatacagtcgttttgaagctaaaatacatgatttacgggagcagatgatgaatagtagtattagttcagggtcaggttctcttcgaactagccagaagcgatccctctatgtcagagccctttttgattatgacaagactaaagacagtgggcttcccagtcagggactgaacttcaaatttggagatatcctccatgttattaatgcttctgatgatgaatggtggcaagccaggcaggttacaccagatggtgagagcgatgaggtcggagtgattcccagtaaacgcagagttgagaagaaagaacgagcccgattaaaaacagtgaaattcaattctaaaacgagagataaagggtcattcaatgacaagcgtaaaaagaacctcttttcccgaaaattccccttctacaagaacaaggaccagagtgagcaggaaacaagtgatgctgaccagcatgtaacttctaatgccagcgatagtgaaagtagttaccgtggtcaagaagaatacgtcttatcttatgaaccagtgaatcacaagaaggtaaattatactcgaccagtgatcatattggggacctatgaaa

SEQ ID NO: 186330 - DNA, 1151 bp, Homo Sapiens
ctttgtacaaaaaagttgggttctgtagaagagatcgctccagatccctcagaggctaagcgtcctgagccaccctcgacatccactttgaaacaagttactaaagtggattgtcctgtttgcggggttaacattccagaaagtcacattaataagcatttagacagctgtttatcacgcgaagagaagaaggaaagcctcagaagttctgttcacaaaaggaagccgctgcccaaaactgtatataatttgctctctgatcgtgatttaaagaaaaagctaaaagagcatggattatctattcaaggaaataaacaacagctcattaaaaggcaccaagaatttgtacacatgtacaatgcccaatgcgatgctttgcatcctaaatcagctgctgaaatagttcaagaaatcgaaaatatagagaagactaggatgcgtcttgaagctagtaaactcaatgaaagtgtaatggtttttacaaaggaccaaacagaaaaggaaatagatgaaatccacagtaaatatcgtaaaaaacataagagtgaatttcagcttctggtggatcaggctagaaaaggatacaagaaaattgctggaatgtcacaaaaaacagtaacaataacaaaagaagatgaatctacagaaaagctatcttctgtatgcatgggacaggaagataatatgacctcagtaacaaaccacttttctcaatcaaagctggactccccagaggaattggaacctgacagagaagaggattcttctagctgtattgatattcaagaagttctttcttcatcagaatcagattcatgcaatagttccagttcagacatcataagagattttttagaagaagaggaagcctgggaagcatcacataaaaacgatcttcaagacacagaaataagtccaagacagaatcgccgcacaagagccgctgaaagtgctgagattgaaccaagaaacaagcgtaataggaattaatgtgggcttttgctgacttttcaaatgcattgattagaataccgtacttttggttgccacagatagattttctatttataaatgcccaaggaaagatgctaaattctaaatattacggttagctgatattcattcttttctgcttttccagaggggaaaaa

SEQ ID NO: 186331 - DNA, 1053 bp, Homo Sapiens
ttggcccagcggcgtcggagcgcccgggaccgccgcggccgttctgagcgcagtggcgccgagcagcccctcccgcagccggtgtgacctgtcccttcaggctccaaccaggaatggagacgccattggatgttttgtccagggcagcatctctggtgcatgctgatgacgaaaaacgcgaagctgctctcaggggagaacccagaatgcagaccctgccggtggcctctgccctcagcagtcaccgcaccggccctcccccaatcagccccagcaagaggaagttcagcatggagccaggtgacgaggacctagactgtgacaacgaccacgtctccaaaatgagtcgcatcttcaacccccatctgaacaagactgccaatggagactgccgcagagacccccgggagcggagccgcagccccatcgagcgcgctgtggcccccaccatgagcctgcacggcagccacctgtacacctccctccccagccttggcctggagcagcccctcgcactgaccaagaacagcctggacgccagcaggccagccggcctctcgcccacactgaccccgggggagcggcagcagaaccggccctccgtgatcacctgtgcctcggctggcgcccgcaactgcaacctctcgcactgccccatcgcgcacagcggctgtgccgcgcccgggcctgccagctaccggaggccaccgagcgctgccaccacctgtgaccccgtggtggaggagcatttccgcaggagcctgggcaagaattacaaggagcccgagccggcacccaactccgtgtccatcacgggctccgtggacgaccactttgccaaagctctgggtgacacgtggctccagatcaaagcggccaaggacggagcatccagcagccctgagtccgcctctcgcaggggccagcccgccagcccctctgcccacatggtcagccacagtcactccccctctgtggtctcctgaagggagcgcctcctccaacaacacgtggatctgcatggtttgcctgagctttgaacagtcagtactt

SEQ ID NO: 186332 - DNA, 1454 bp, Homo Sapiens
ttggcgaagtgatctcccggggagttctcctggcccaagaatgtgaagaccaactatgttgtttgggggactggaaaggaaggccaacccagagagtactacacattggattccattttatttctacttaataacgtgcacctttctcatcctgtttatgtccgacgtgcagctactgaaaatattcctgtggttagaagacctgatcgaaaagatctacttggatatctcaatggtgaagcgtcaacatcggcaagtatagacagaagcgctcccttagaaataggtcttcagcgatctactcaagtcaaacgagctgcagatgaagttttagcagaagcaaagaaaccacgaattgaggatgaagagtgtgtgcgccttgataaagagagattggctgcccgtttggagggtcacaaagaagggattgtacagactgaacagattaggtctttgtctgaagctatgtcagtggaaaaaattgctgcaatcaaagccaaaattatggctaagaaaagatctactatcaagactgatctagatgatgacataactgcccttaaacagaggagttttgtggatgctgaggtagatgtgacccgagatattgtcagcagagagagagtatggaggacacgaacaactatcttacaaagcacaggaaagaatttttccaagaacatttttgcaattcttcaatctgtaaaagccagagaagaagggcgtgcacctgaacagcgacctgccccaaatgcagcacctgtggatcccactttgcgcaccaaacagcctatcccagctgcctataacagatacgatcaggaaagattcaaaggaaaagaagaaacggaaggcttcaaaattgacactatgggaacctaccatggtatgacactgaaatctgtaacggagggtgcatctgcccggaagactcagactcctgcagcccagccagtaccaagaccagtttctcaagcaagacctcccccaaatcagaagaaaggatctcgaacacccattatcataattcctgcagctaccacctctttaataaccatgcttaatgcaaaagaccttctacaggacctgaaatttgtcccatcagatgaaaagaagaaacaaggttgtcaacgagaaaatgaaactctaatacaaagaagaaaagaccagatgcaaccagggggcactgcaattagtgttacagtaccttatagagtagtagaccagccccttaaacttatgcctcaagactgggaccgcgttgtagccgtttttgtgcagggtcctgcatggcagttcaaaagttggccatggcttttgcctgatggatcaccagttgatatatttgctaaaattaaagccttccatctgaagtatgatgaagttcgtctgggatccaaatgttcagaaatgggatgtaacagtattagaactcagctatcacaacgtcattt

SEQ ID NO: 186333 - DNA, 2110 bp, Homo Sapiens
ttggcgaaaaaggaaaatctggcttatggaaaaggtgtactgagtggggaagaatgtaagaaacagttgattaacaccctgtgttctggcaggtgggatcagcaatatgtaatccaactcacctccatgttcaaggatgtccctctgactgcagaagaggtggaatttgtggtggaaaaagcattgagcatgttctccaagatgaatcttcaagaaataccacctttggtctatcagcttctggttctctcctccaagggaagcagaaagagtgttttggaaggaatcatagccttcttcagtgcactagataagcagcacaatgaggaacagagtggtgacgagctattggatgttgtcactgtgccatcaggtgaacttcgtcatgtggaaggcaccattattctacacattgtgtttgccatcaaattggactatgaactaggcagagaactcgtgaaacacttaaaggtaggacagcaaggagattccaataataacttaagtcccttcagcattgctcttcttctgtctgtaacaagaatacaaagatttcaggaccaggtgcttgatcttttaaagacttcggttgtaaagagctttaaggatcttcaactcctccaaggctcaaaatttcttcagaatctagttcctcatagatcttatgtttcaaccatgatcttggaagtagtgaagaatagcgttcatagctgggaccatgttactcagggcctcgtagaacttggtttcattttgatggattcatatgggccaaagaaggttcttgatggaaaaactattgaaaccagcccaagtctttctagaatgccaaaccagcatgcatgtaagctcggagctaatatcctgttggaaacttttaagatccatgagatgatcagacaagaaattttggagcaggtcctcaacagggttgttaccagagcatcttctcccatcagtcatttcttagacctgctttcaaatatcgtcatgtatgcacccttagttcttcaaagttgttcttctaaagtcacagaagcttttgactatttgtcctttctgccccttcagactgtacaaaggctgcttaaggcagtgcagccccttctcaaagtcagcatgtcaatgagagactgcttgatacttgtccttcggaaagctatgtttgccaaccagcttgatgcccgaaaatctgcagttgctgggtttttgctgctcctgaagaactttaaagttttaggcagcctgtcatcctctcagtgcagtcagtctctcagtgtcagtcaggttcatgtggatgttcacagccattacaattctgtcgccaatgaaactttttgccttgagatcatggatagtttgaggagatgcttaagccagcaagctgatgttcgactcatgctttatgaggggttttatgatgttcttcgaaggaactctcagctggctaattcagtcatgcaaactctgctctcacagttaaaacagttctatgagccaaaacctgatctgctgcctcctctgaaattagaagcttgtattctgacccaaggagataagatctctctacaagaaccactggattatctgctgtgttgtattcagcattgtttggcctggtataagaatacagtcatacccttacagcagggagaggaggaagaggaggaggaagaggcattctacgaagacctagatgatatattggagtccattactaatagaatgattaagagtgagctggaagactttgaactggataaatcagcagatttttctcagagcaccagtattggcataaaaaataatatctgtgcttttcttgtgatgggagtttgtgaggttttaatagaatacaatttctccataagtagtttcagtaagaataggtttgaggacattctgagcttatttatgtgttacaaaaaactctctgacattcttaatgaaaaagcgggtaaagccaaaactaaaatggcccaacaagacaagtgatagtcttttgtccatgaaatttgtgtccagtcttctcactgctcttttcagggatagtatccaaaagccaccaagaaagcctttctggttctcaggtccagcaatgagtttatgc

SEQ ID NO: 186334 - DNA, 1246 bp, Homo Sapiens
ttggctccatcgagtgccttcctgaactgatccatgcctgtggagggaaagaccatgtatttagctccatggtagaaagtgagctacatgctgcaaaaacgaaacaggcatggaatttcttatctcacttgccagtgataaatgttggcataagtgttaaaggctcgtgggatgacttagttgaaggacataatgaactctctgtctcaactctgactgcagacaaacgagatgacaacaaatggatcaaattgcatgctgaccaagagtatgtgcttcaagtgagcttgcagagagtccactttgggttccacaagggaaagccagagagctgtgcagttactcctcgatttcccaaatcaaaagacgaaggatggtttttgatattaggagaagtggataagagagaacttattgctttgaaaagagtaggatatattcgaaatcatcatgttgcttccctttctttttatacccctgaaatacctggaaggtatatctacacattatatttcatgagtgactgctaccttggcctggaccagcagtatgacatctatctcaacgttacacaagcgagtctttctgcacaggtcaacaccaaggtctctgattccctgactgacctggcattaaagtaacttgacctgaacaatccatttgaaaggagtggctaagaattctctctgttcagtcatctagacaaatcgaattacttgatgtttgccttgaaagaatcaacttctaacctcaaccatccaggaaattgacagtggctgcagtattgactccagtgacataaagttaaccacagtggccttttaacaaatgttgccttttataatgttatctttatgagtttcttgatatgtaagatgaaaaagcatttagaataatcttttaatttgtgtatatttgggatgatatttaggagctatcaatcaaattttacatctcacaatgtactgtttacatggatattggctgctttttttaaggaaaaccacattgagatgtgacaagtgttaggacttgtcacagatttctaactctgccgcataaactataaatctgtaaggtggtacacagcgtgtcttgttagcaaaatttatactttgatatgatcacatgtagaagtagcttcaagaatttcttgtagtcataaatgtttaataatatatgatgtaaaattatattatggagcctaatgatgataacaaagaaaacaatatactgatcttagaaa

SEQ ID NO: 186335 - DNA, 1724 bp, Homo Sapiens
ttggctgaggcggcggcgggagcccggttggcgtctggtcttcgcgtcggccccgcggagccagacgctgcccccggcgcggggagaagatggtgcctagcggcctcgggcccgccacgcgccgccacgagtgagcccagcgcgaccgcgggcgtccgccgagcagctggcccggctgggcccggggcgcgcagctgcccgccggggcggggtggagctgatcagaataatgttcagcatcaaccccctggagaacctgaaggtgtacatcagcagtcggcctcccctggtggtcttcatgatcagcgtaagcgccatggccatagctttcctgaccctgggctacttcttcaaaatcaaggagattaaatccccagaaatggcagaggattggaatacttttctgctacggttcaatgatttggacttgtgtgtatcagagaatgaaaccctcaagcatctcacaaacgacaccacaactccggaaagtacaatgaccagcgggcaggcccgagcttccacccagtccccccaggccctggaggactcgggcccggtgaatatctcagtctcaatcaccctaaccctggacccactgaaacccttcggagggtattcccgcaacgtcacccatctgtactcaaccatcttagggcatcagattggactttcaggcagggaagcccacgaggagataaacatcaccttcaccctgcctacagcgtggagctcagatgactgcgccctccacggtcactgtgagcaggtggtattcacagcctgcatgaccctcacggccagccctggggtgttccccgtcactgtacagccaccgcactgtgttcctgacacgtacagcaacgccacgctctggtacaagatcttcacaactgccagagatgccaacacaaaatacgcccaagattacaatcctttctggtgttataagggggccattggaaaagtctatcatgctttaaatcccaagcttacagtgattgttccagatgatgaccgttcattaataaatttgcatctcatgcacaccagttacttcctctttgtgatggtgataacaatgttttgctatgctgttatcaagggcagacctagcaaattgcgtcagagcaatcctgaattttgtcccgagaaggtggctttggctgaagcctaattccacagctccttgttttttgagagagactgagagaaccataatccttgcctgctgaacccagcctgggcctggatgctctgtgaatacattatcttgcgatgttgggttattccagccaaagacatttcaagtgcctgtaactgatttgtacatatttataaaaatctattcagaaattggtccaataatgcacgtgctttgccctgggtacagccagagcccttcaaccccaccttggacttgaggacctacctgatgggacgtttccacgtgtctctagagaaggattcctggatctagctggtcacgacgatgttttcaccaaggtcacaggagcattgcgtcgctgatggggttgaagtttggtttggttcttgtttcagcccaatatgtagagaacatttgaaacagtctgcacctttgatacggtattgcatttccaaagccaccaatccattttgtggattttatgtgtctgtggcttaataatcatagtaacaacaataatacctttttctccattttgcttgcaggaaacataccttaa

SEQ ID NO: 186336 - DNA, 1496 bp, Homo Sapiens
ttggcttttgctggaagagcgctgctggggttaggattctgcgcggcgaggcaagatgctcaagtccaagacgttcttaaaaaagacccgggcgggcggcgtgatgaagatcgtgcgcgagcactacctgcgagacgacatcggctgcggtgcgcccgggtgcgcagcgtgtggaggggcgcacgaggggccggccctggagccgcagccccaggacccggcgagcagcgtctgcccgcaaccgcactacttgctgcccgacactaatgtgttactgcaccagattgtaagtgcctggaggccggggacctgggcttctgtggcctccagcctgcgactcccaggcagcttaagaaacctatgtagaacaagaacagggagaaaatgctaatgacaggaatgatagagcgattcgagtagcagcaaaatggtacaatgaacatttgaaaaaaatgtcagcagacaaccagctgcaagttatcttcataacaaatgacaggagaaacaaagagaaagccatagaagaaggaataccagctttcacttgtgaagaatatgtaaagagcctaactgctaaccccgaactcatagatcgtcttgcttgtttgtctgaagaagggaatgaaatagaaagtggaaaaataatattttcagagcatcttcccttaagtaagctacagcaaggcataaaatctggtacataccttcaaggaacatttagagctagcagggaaaattacttggaagctacagtatggattcatggcgacaatgaagaaaataaagagataatcttacagggacttaaacatttaaacagagctgttcacgaagatattgtggctgtggagcttctccccaagagtcagtgggtagcaccatcttctgtggttttacatgatgaaggtcaaaatgaagaagatgtggagaaagaagaagagagagaacgaatgcttaagactgctgtaagcgagaaaatgttgaagcctacaggtagagttgtaggaataataaaaaggaattggagaccatattgtggcatgctttccaagtctgacattaaggagtcaagaagacatctctttacacctgctgataagagaatccctcgaattcgcatagaaaccagacaggcttccacattagaaggacggagaattattgttgctattgatggttggcccagaaattccagatatccaaatggacactttgtgagaaatttaggtgatgttggagagaaagagactgaaacagaagttttgttacttgaacacgatgttccccatcagcctttttcacaggctgttcttagttttctgccaaagatgccctggagcattactgaaaaggacatgaaaaaccgagaagacctgaggcatctgtgtatttgtagtgcagacccaccaggatgtactgatatagacgatgctctacattgtcgagaactcgaaaatggaaatttggaggttggtgttcatattgctgatgtgagc

SEQ ID NO: 186337 - DNA, 2197 bp, Homo Sapiens
ttggctgtttatttgaagttgtaaataaaggaatggaccctgttgataaaatgaaactagtggaatctttgtgtcaagtattacagtctgctgggtttttcagcattgaccaggaagaagatgttgacttcctggccagattttctaagttggtaaatggaatgggacagtcattgatagttagttggagtaaattaattaagaatggggatattaagaatgctcaagaggcactacaagctattgaaacaaaagtggcactgatgttgcagctactaattcatgaggatgatgatatttcttctaatattattggattttgttacgattatcttcatattttgaaacagcttacagtgctctcggatcagcaaaaagctaatgtagaggcaatcatgttggccgttatgaaaaaattgacttacgatgaagaatataactttgaaaatgagggtgaagatgaagccatgtttgtagaatatagaaaacaactgaagttactgttggacaggcttgctcaagtttcaccagagttactactggcctctgttcgcagagtttttagttctacactgcagaattggcagactacacggtttatggaagttgaagtagcaataagattgctgtatatgttggcagaagctcttccagtatctcatggtgctcacttctcaggtgatgtttcaaaagctagtgctttgcaggatatgatgcgaactctggtaacatcaggagtcagttcctatcagcatacatctgtgacattggagttcttcgaaactgttgttagatatgaaaagtttttcacagttgaacctcagcacattccatgtgtactaatggctttcttagatcacagaggtctgcggcattccagtgcaaaagttcggagcaggacggcttacctgttttctagatttgtcaaatctctcaataagcaaatgaatcctttcattgaggatattttgaatagaatacaagatttattagagctttctccacctgagaatggccaccagtccttactgagcagcgatgatcaactttttatttatgagacagctggagtgctgattgttaatagtgaatatccggcagaaaggaaacaagccttaatgaggaatctgttgactccactaatggagaagtttaaaattctgttagaaaagttgatgctggcacaagatgaagaaaggcaagcctctctagcagactgtcttaaccatgctgttggatttgcaagtcgaaccagtaaagctttcagcaacaaacagactgtgaaacaatgtggctgttccgaagtttatctggactgtttacagacattcttgccagccctcagttgtcccttacaaaaggatattctcagaagtggagtccgtactttccttcatcgaatgattatttgcctggaggaagaagttcttccgttcattccatctgcttcagaacatatgctcaaagattgtgaagcaaaagatctccaggagttcattcctcttatcaaccagattacggccaaattcaagatacaggtatccccgtttttacaacagatgttcatgcccctgcttcatgcaatttttgaagtgctgctccggccagcagaagaaaatgaccagtctgctgctttagagaagcagatgttgcggaggagttactttgctttcctgcaaacagtcacaggcagtgggatgagcgaagttatagcaaatcaaggtgcagagaatgtagaaagagtgttggttactgttatccaaggagcagttgaatatccagatccaattgcacagaaaacatgttttatcatcctctcaaagttggtagaactctggggaggtaaagatggaccagtgggatttgctgattttgtttataagcacattgtccccgcatgtttcctagcacctttaaaacaaacctttgacctggcagatgcacaaacagtattggctttatctgagtgtgcagtgacactgaaaacaattcatctcaaacggggcccagaatgtgttcagtatcttcaacaagaatacctgccctccttgcaagtagctccagaaataattcagagttttgtcaagcgcttcagcagcctgatgctaaagtttttaaaaattacttaacggtgttcttccagagagcagagccctgaggactggatttccctgtgcctacttcatgatcatgaatt

SEQ ID NO: 186338 - DNA, 1586 bp, Homo Sapiens
  misc_feature (1327)..(1340): n is a, c, g, or t
tttgtacaaaaaagttggcagaagtggacctttcgtactttccttcatcgaatgattatttgcctggaggaagaagttcttccgttcattccatctgcttcagaacatatgctcaaagattgtgaagcaaaagatctccaggagttcattcctcttatcaaccagattacggccaaattcaagatacaggtatccccgtttttacaacagatgttcatgcccctgcttcatgcaatttttgaagtgctgctccggccagcagaagaaaatgaccagtctgctgctttagagaagcagatgttgcggaggagttactttgctttcctgcaaacagtcacaggcagtgggatgagcgaagttatagcaaatcaaggtgcagagaatgtagaaagagtgttggttactgttatccaaggagcagttgaatatccagatccaattgcacagaaaacatgttttatcatcctctcaaagttggtagaactctggggaggtaaagatggaccagtgggatttgctgattttgtttataagcacattgtccccgcatgtttcctagcacctttaaaacaaacctttgacctggcagatgcacaaacagtattggctttatctgagtgtgcagtgacactgaaaacaattcatctcaaacggggcccagaatgtgttcagtatcttcaacaagaatacctgccctccttgcaagtagctccagaaataattcaggagttttgtcaagcgcttcagcagcctgatgctaaagtttttaaaaattacttaaaggtgttcttccagagagcaaagccctgaggactggatttccctgtgcctacttcatgatcatgaattccagttaatttataaagaggcgatttttgtgtgccattcacactggtctttttcacattgttttgagcttattgcagtatatgttttgggatttttctgtaaaatgggtgtaattttcctaatacaggtatgtaacaacaaaagaagttgcctgcatgccggtccaaattgttctgtataaagatgctcttaaaagacacaagagttatcctagaaccttaattcttttttatttgaaattttaagtcaagtcctttataaagaccatagcagtggaaaacagtgtactttttaaaaaattgctgaatataaaatctttgaaaattttctttatgtgtgaagacacaaagtatgggggaagacagcaatcaaaactaactttttgtagatagccatttcatttctttaaactgtttcaacgccaatatgtattctacaaaagagaatggttttaggctccagtgttatactttttttnnnnnnnnnnnnnnaaaataaactttacgtagtgaaatcttccaagtcttttctggaattattataaatactttagttttattttctcatcttaatctctccataatttcccatttaaaggtttacaaatatgagtgtgtggatgctttaattcatttaacctcactcctcaaaggtaacatgcaacttagttctgttatatgagagtctttttctttaatgtactggaaaaagcctatgtgaatctgttgatagaattt

SEQ ID NO: 186339 - DNA, 1672 bp, Homo Sapiens
ttggctggatttcagccaaattctttcagagttcaaaagtacaaagctctttaggaggtttgttcttttgaaacattttttcagaggttaaaaattaaatttcaaaagaatacctggagtggaaaagagttctcagcagagacaaagaccccgaacacctccaacatgaagcttcttcatgttttcctgttatttctgtgcttccacttaaggttttgcaaggtcacttatacatctcaagaggatctggtggagaaaaagtgcttagcaaaaaaatatactcacctctcctgcgataaagtcttctgccagccatggcagagatgcattgagggcacctgtgtttgtaaactaccgtatcagtgcccaaagaatggcactgcagtgtgtgcaactaacaggagaagcttcccaacatactgtcaacaaaagagtttggaatgtcttcatccagggacaaagtttttaaataacggaacatgcacagccgaaggaaagtttagtgtttccttgaagcatggaaatacagattcagagggaatagttgaagtaaaacttgtggaccaagataagacaatgttcatatgcaaaagcagctggagcatgagggaagccaacgtggcctgccttgaccttgggtttcaacaaggtgctgatactcaaagaaggtttaagttgtctgatctctctataaattccactgaatgtctacatgtgcattgccgaggattagagaccagtttggctgaatgtacttttactaagagaagaactatgggttaccaggatttcgctgatgtggtttgttatacacagaaagcagattctccaatggatgacttctttcagtgtgtgaatgggaaatacatttctcagatgaaagcctgtgatggtatcaatgattgtggagaccaaagtgatgaactgtgttgtaaagcatgccaaggcaaaggcttccattgcaaatcaggtgtttgcattccaagccagtatcaatgcaatggtgaggtggactgcattacaggggaagatgaagttggctgtgcaggctttgcatctgtggctcaagaagaaacagaaattttgactgctgacatggatgcagaaagaagacggataaaatcattattacctaaactatcttgtggagttaaaaacagaatgcacattcgaaggaaacgaattgtgggaggaaagcgagcacaactgggagacctcccatggcaggtggcaattaaggatgccagtggaatcacctgtgggggaatttatattggtggctgttggattctgactgctgcacattgtctcagagccagtaaaactcatcgttaccaaatatggacaacagtagtagactggatacaccccgaccttaaacgtatagtaattgaatacgtggatagaattattttccatgaaaactacaatgcaggcacttaccaaaatgacatcgctttgattgaaatgaaaaaagacggaaacaaaaaagattgtgagctgcctcgttccatccctgcctgtgtcccctggtctccttacctattccaacctaatgatacatgcatcgtttctggctggggacgagaaaaagataacgaaagagtcttttcacttcagtggggtgaagttaaactaataaggcaactgctctaagttttactgaatcgtt

SEQ ID NO: 186340 - DNA, 1318 bp, Homo Sapiens
  misc_feature (1115)..(1165): n is a, c, g, or t
gacttcatttagctttaccaccctgaacccatccatgcaggttgcagagcacagatggggtcgatttcggtaatgtagacaattgctccaagagctttgagagcagcacagcagcccttgctacctcaccatagccacacaccaccacttgtttcccaccaaacatcacatctgtggtcctcttcaggccatccaaaatggattctcggcagcagtacaagttatcaaacttctgtttggtaacagaatcattgacgttcatggccggaacacagagcttcccagctttggagagctgatacagcctgtgaacaccagtcacgctctcttccacaatgcctcggatcttcttaaacacgtttggatacttcttataaacccagtgggttaagtctcccccatcatccaggatcatgttggcctgccacccatccatgttcacacagcggtcaatacaccaccagaagtcatcttctgactcgcccttccaagcgaacactgcaactccagcctcagccagtgctgcagctacttcattctgagttgagtagatgttacaagcagaccagcggcactgagcccccagggcacagagtgtctcaatcaacaccgctgtctgggctgtgatgtgtgtacagcccactattttagcaccagccaagggcttctccccctgagcacgtttcctgagtgaaatcagagcagacatgtcttgctctgcaatctcaatctcccggcgtccaaattctgcctgcttgatgttcttcacacagaaattgctgctgcccttggagttggtttgctgcttctctcggggagaaacctcatcatcagagctatctgtgtaggatgcagctgaactgtagctgtcagtggaggactgtgagatcgagcgagacaaagatcttcggccagttttggtggggaatttggtgaactcctgcatgtcatcagcaaactggatttgcttcttgggcgccttggtgacggtggccatgaaggagtacttctcggcgtcctcgatctccttggcctgcttcagctcctccccgaccccgggcagcggcatcgcgtcaggcatcgacattccccggccggcccggccagcggctgannnnnnnnnnnnnnnnnnnnnnnnnnnnnnnnnnnnnnnnnnnnnnnnnnnggcgccctccgacacgcgatcgcccaccctcctgccggcccctgcgtcgagctgcgtcggcttctgaggtgctgtggcccacgccttgtctgttcggcagcccaaggcagccggacagcgacggcggccacaagagaaccagaagcagcccaa

SEQ ID NO: 186341 - DNA, 2100 bp, Homo Sapiens
ttggcacaactgcacatatggattgctttggcgctggaatactacaagcaaggaaaaacagaagagtttgtaaaattgttggaagcagcacgtatagatggcaatttggactatagagaccatgaaaaagaccagatgacttgcttggatacattggcagcgtattatgtacaacaggctcggaaagaaaagaataaggacaataaaaaggatcttattacacaggccaccttgttgtatacaatggccgataaaattattatgtatgatcagaaccatttgttgggaagagcctgcttctgcctacttgagggtgacaaaatggatcaagctgatgcacagtttcattttgtactcaatcagtctccaaataatattccagcccttcttggtaaagcttgcatttccttcaacaagaaggattacagaggagctcttgcttactataagaaagcattgcgtactaacccaggatgtccagcggaagttcgtttaggaatgggtcattgctttgtgaaacttaacaaactggaaaaagctcgtctggcattcagcagagccctggaactcaattccaaatgcgtgggagcattggttggactggctgttctagaactcaacaataaagaggctgattccattaaaaatggtgtccagcttctttccagagcctatactattgatcctagcaaccctatggtattgaaccatttggcaaatcactttttcttcaaaaaggattatagtaaagtccagcatctggccctccatgcattccataatacagaagtggaagctatgcaagcagagagctgctatcagctagctagatcattccatgttcaggaagattatgaccaagcttttcagtactattatcaagccacacagtttgcctcatcctcttttgtgctcccattttttggtttgggacaaatgtatatttatcgaggtgacaaagaaaatgcatctcagtgctttgagaaggttttgaaagcttatcctaataattacgaaactatgaaaattctcggctctctctatgctgcctcagaagatcaagaaaaacgagatattgccaagggccatttgaagaaggtcacagaacagtatcccgatgatgttgaagcttggattgaattggcacaaatcttagaacagactgatatacagggtgccctttcagcctatggaacagcaacacgaatccttcaggagaaagtgcaggccgatgttcctccagagattctcaataatgtgggtgccctccattttagacttggaaacctaggggaggctaagaaatattttttggcgtcattggaccgtgcaaaagcagaagcggaacatgatgagcattactataacgccatttccgttaccacgtcatataatctcgccaggctatatgaggcgatgtgtgaattccatgaagcagaaaaactgtataaaaacatcttacgcgaacatcctaattatgttgactgctatttgcgcctaggagccatggctagagataagggaaacttttatgaggcttcagattggtttaaggaagctcttcagattaatcaggatcatccagatgcttggtctttgattggcaatcttcatttggcaaaacaagaatggggtcctgggcagaagaagtttgagaggatattaaaacagccatccacacagagtgatacctattctatgctagcccttggcaacgtgtggctccaaactttacatcagcccacccgagatcgagaaaaggaaaagcgtcatcaagatcgtgctctggccatctacaaacaagtactcagaaatgatgcaaagaatctgtatgctgccaatggcataggagctgttttggcccacaaaggatattttcgtgaagctcgtgatgtatttgcccaagtaagagaagcaacagcagatattagtgatgtgtggctgatcttagcacacatctatgtggagcaaaagcagtacatcagcgccgttcagatgtatgaaaactgcctccgaaagttctataagcaccaaaacactgaagttgtactctatttggcccgggccctcttcaagtgtggcaagttacaggaatgcaac

SEQ ID NO: 186342 - DNA, 2160 bp, Homo Sapiens
  misc_feature (49)..(87): n is a, c, g, or t
  misc_feature (2052)..(2076): n is a, c, g, or t
ttgggaaagaatgtgtgtgaaggggtagaatttgtgcggtaaagacttnnnnnnnnnnnnnnnnnnnnnnnnnnnnnnnnnnnnnnntgcttccttatctggaagcctttctggattaatccagtgatggtcccacctttagtgtttgagctttgtcattgcttgtctccctggcatgtgccagttatagactgtccagcatccaagacgtttcggttatgtcgggtcctcagatcgcctctgacttgttaccacaacaaatcattttgatttcagtgcctgttggggacttgatttcttctcagttttgtttgtttgtttgtttccttaatctggctcatttgaaatttcttctccctctcaaccatcccactaagttatagccaagaagggaaggagacacggggatttggggttctctgcttgaatgtcttctcctttaccacctcaccttgttggtacctccctccctggatctctgagccagcagccaggaggacctgacccagcagttctttactggcccctttgtagggccttgctgccagggggcagggatgctttccagcctgcagcaacagaacacttgaccttaaaagtctcttctggtctttggattagaaaaggcttatgttagcatagcttaagagcaacctcagagatttgagccctactaagtgactgaccactgtttagagtgtctggtatctgatgttcatttattcccatgttcttgtgtgtcacagttcagccagttttggtttatgcctagagctacttcaaggaactagactaattagctatataggcccagcgatgcttcttattgatcttaatagtatgcccctccttcccctgtcctttcatttctctatccaagtagcagtcaggttcttggtgtgatgggactgaaagaattccagtcagccagagccttggcagctctgaagctaaccttagcatctaagtgtcgatcttgaattccctgaaaaaatttctataggaaatgaagcttccctggtcccctcctttctggccattgtcatccatttcccagttagggcaacaatgaaggaggacccagccaagctagaaggaattttgtggatgggagacagcaggattagcttcagcttgggctggagcagtcaatataggatctcaggccaggcccgcttttctagaatgtgtttaattttgagtttgctttattagatatgttttttaagagctctgtatatttgaactgctccttatgtgacaaaataggtagctcttgggctcatgtcctgggttttggctctttaatgattactccaggccagcatttagtcgtttgagaattgtagcctgttgttttcgctgtgacttgggtctcagtgctagggtattgagtcaggcagctggagggttgtggcccgaggctgcagtcagaggtatacttcccatagtgcttcacacagctcccctgcttctaaaggataaggtactgtagccttggtcctggggaccacctgcctggggcagtggacatcctaactaaacaggcttctggcagtagctttggttcctatcccatcgaaattccccaaagccctgggccactgccattgggttagtcaagatgaaggaggaggactggctgcctccattttgccttgtttgttagtttgcctgggtctgtctgaggaaggagggggtcccgccttccacctcaacacatcccttcagtgactcagagtctcagaaggaaaccctgactcctggggccatttcctaatggtactgtaagccaagcagctttgcttctgcctctgtttccaagcccacccttttcccctgagctcagggttagggatgggcgctttcctctctggttgtgaacgaaaggaaggaacatctttctatggctaacaaaaactaaaggggaagtgaggaaacaggaagaagtatggtgggggctggggtagactcccctggagccaagcctatccagctaacaagagctccctggggctggtcacagctggctcatgatgctgaacttgaaannnnnnnnnnnnnnnnnnnnnnnnngtggctcctccaagatatagtacatgaagtttagttaaaggggtgggattctttattttatttttgtattgtatgtgtcaagaa

SEQ ID NO: 186343 - DNA, 3172 bp, Homo Sapiens
  misc_feature (373)..(397): n is a, c, g, or t
  misc_feature (1769)..(1779): n is a, c, g, or t
ttggctgaggaaggaccggggtcccgccttccacctcaacacatcccttcagtgactcagagtctcagaaggaaaccctgactcctggggccatttcctaatggtactgtaagccaagcagctttgcttctgcctctgtttccaagcccacccttttcccctgagctcagggttagggatgggcgctttcctctctggttgtgaacgaaaggaaggaacatctttctatggctaacaaaaactaaaggggaagtgaggaaacaggaagaagtatggtgggggctggggtagactcccctggagccaagcctatccttctaacaagagctccctggggctggtcacagctggctcatgatgctgaacttgaaannnnnnnnnnnnnnnnnnnnnnnnngtggctcctccaagatataggtacatgaagtttaggttaaaggggtgggattctttatttttatttttgtattgtatgtgtcaagaattactctgttgttcaccttttgctttttgcactgtttgttctcttatctgtattttgagcttagtgctaggactgagaggctgcaccatagggaatgtatgggagatggtgaggggtgccagtgaggggtgcgtggaggagaggcctgggctcctctactggatctacactctgtcccaggtttttagatcccactgagcccagctgactgaaaacaaggacagtcagggtgaaacttcttttgccagaagtgtggcctgagttgaatttctgggaggatgacgcagatgtctgctgcagagctgggctgagagttctgcagtctagctctgacttaggtcaggggcctgttggtctctcattggacgtttttgggtctcactcatgcttactgaaacattgtgccaagaaactctgtgggatttgtgtcccttaaaccagactcacttttctgaaaaatctccattgttgaggagaggctgctcaatcgacaccccgagttctcatgactgggaagatagttttcttcaggtgtcaatggcgttagactcccaggaagactagccctgcccacagggccacctgttggtttgagagcgtgttcgtgttctcttgccctccctgcctaagagctactgggatcacgttagcgggcatttaggctttgatgagagggcacagtttgagttaggtttacctccccctttctgtgcctgggaactgtttggtccagctttagaactgtggttttgacttccttatctcttgggagaagcttctgttttaaggaatttctcttccttcttctcctgcctctagcctctcctggaaaggcctggatatggtttctaaaatctcagctgagaacttcagaaaacagcagcagtattttccttttcctagtgctaaaatccctttccctagaaattggctcaccttgggaaacccagggaaagaatcagcaggttctctgccctccctaggggttggggaaggacccaccccggtcagcacagtgccttttcctctcctgctctgagccagggtggggcattccctctagattcaggtttgggcaggggtcctatagtccctgccatggggctgcttccctgtcccttccctcccctttgctggcctactctggcataattcaagtgtcttcttgccttggggatccttagtggcatcaaatggcaacatggaatattgtcctccatgcccctccagaaggacctaggagagtaggtgagctttccaaagtgagagacgaatctttctttcnnnnnnnnnnnaaagggcaggatgggtatgctttgggctttctccttctgtggccccggaggaaggagagactgaggcaaggcaaagtgatagtacacggaagcagaaccggaaacacccaggaactgttcagaaatctcagaagaaatctgcttctcttcgatggaaagatataattaacgatcaaagagctctaagaaaattgcaaagaagccttaatgttcaagctttagaaagatcagagcaatttttctctttcagtccaaactaagactctctgtatttaaatctctctggggcaagagggctagatttcctcattttgttatgagactagattggtaccagtagatcagctgcctagcgagggcaggtttcttctttgcatctgtgtggcttgcttccagtctggcctgtcctttccagctgccttttgtctagcctgctatggggggccagattatcttgataagagcaggtgatttggggactagctgggttggcaggaaaagagcaggatggatctcttgggacaggttcccccaggagtataaacacaaggagccaggattgtgctggcagccaaggaaacagtagtgcctgtttgagttggcagagagggccttggcacctcttgcatccaggcagtcttgtgagatgggggcacatagcactggggaaagcagaactccattctcacctctattttgagcttcagtgctttatttcagtatgaggaaaaacaacaacaaactgaagtgcgctttccgtcctttcaaaggacaactgtcgggaagggagagccgagttgcgaggtaggaggggagcactggcagggagagacattcttgactcctctcttccctggtgtgttgtgatccagggaatgaaaagaaatttgaccctggattggttctctccttggacttaaggaatcttaccttttccttccacaaagttctcccaggcaaggaccagctgcccattctgagcccagggcagcctcttcaaccattattggtctaacctggcttgtcaggaaaccaagcccacccttccacattgggcctggctgctctattctgtaccaagtactggagaaaaagcatcaagttcttagcccttgtagcttctaccctagtttcccatcctctctctgtggaggccaaaccaactctttgccagcagccacaacatgcattgacagcggcacagtgagatataactgatgggctttgaacctggttggccggggaagctgtaggggtggatagagctggctttccttctgggctgtctccatctgaccctaccccttccatgtcccaccccactcccaccaaaaagtacaaaatcaggatgtttttcactgtccattgctttgtgttttaataaacaatttgc

SEQ ID NO: 186344 - DNA, 1650 bp, Homo Sapiens
ttggccctcatcctcatatggcaaatcctctatgccttcttcagctatgctgaggtgctgaagcgggagccgggggccctgggagcacgctgctggtcactctatggccgctgctacctccgccacttcaacgagctggagcacgagctgcagtcccgcctcaaccgtggctacaagcccgcctccaagtacatgaattgcttcttgtcacctcttttgacactgctggccaagaatggagccttcttcgctggctccatcctggctgtgcttattgccctcaccatttatgacgaagatgtgttggctgtggaacatgtgctgaccaccgtcacactcctgggggtcaccgtgaccgtgtgcaggtcctttatcccggaccagcacatggtgttctgccctgagcagctgctccgcgtgatcctcgctcacatccactacatgcctgaccactggcagggtaatgcccaccgctcgcagacccgggacgagtttgcccagctcttccagtacaaggcagtgttcattttggaagagttgctgagccccattgtcacacccctcatcctcatcttctgcctgcgcccacgggccctggagattatagacttcttccgaaacttcaccgtggaggtcgttggtgtgggagatacctgctcctctgctcagatggatgttcgccagcatggtcatctctagtggctatctgctgggcagacagaggcctcagtgtaccagcaagctgaggatggaaagacagagttgtcactcatgcactttgccatcaccaaccctggctggcagccaccacgtgagagcacagccttcctaggcttcctcaaggagcaggttcagcgggatggagcagctgctagcctcgcccaagggggtctgctccctgaaaatgccctctttacgtctatccagtccttacaatctgagtctgagcccctgagccttatcgcaaatgtggtagctggctcatcctgccggggccctccactgcccagagacctgcagggctccaggcacagggctgaagtcgcctctgccctgcgctccttctccccgctgcaacccgggcaggcgcccacaggccgggctcacagcaccatgacaggctctggggtggatgccaggacagccagctccgggagcagcgtgtgggaaggacagctgcagagcctggtgctgtcagaatatgcatccacagagatgagcctgcatgccctctatatgcaccagctccacaagcagcaggcccaggctgaacctgagcggcatgtatggcaccgccgggagagtgatgagagtggagaaagcgcccctgatgaagggggagagggcgcccgggccccccagtctatccctcgctctgctagctatccctgtgcagcaccccggcctggagctcctgagaccaccgccctgcatgggggcttccagaggcgctacggtggcatcacagatcctggcacagtgcccagggttccctctcatttctctcggctgcctcttggagggtgggcagaagatgggcagtcggcatcaaggcactctgagctcgtgcccgaagagggctcggaggatgagctaccctctcagtgcacaaggtaagggccccggggcctaggaaaactgccagaaata

SEQ ID NO: 186345 - DNA, 2124 bp, Homo Sapiens
  misc_feature (1686)..(1734): n is a, c, g, or t
ttggccgtttgctgcggtaggaacatggcggatcggctcacgcagcttcaggacgctgtgaattcgcttgcagatcagttttgtaatgccattggagtattgcagcaatgtggtcctcctgcctctttcaataatattcagacagcaattaacaaagaccagccagctaaccctacagaagagtatgcccagctttttgcagcactgattgcacgaacagcaaaagacattgatgttttgatagattccttacccagtgaagaatctacagctgctttacaggctgctagcttgtataagctagaagaagaaaaccatgaagctgctacatgtctggaggatgttgtttatcgaggagacatgcttctggagaagatacaaagcgcacttgctgatattgcacagtcacagctgaagacaagaagtggtacccatagccagtctcttccagactcatagcatcagtggataccatgtggctgagaaaagaactgtttgagtgccattaagaattctgcatcagacttagatacaagccttaccaacaattacagaaacattaaacactatgacacattacctttttagctatttttaatagtcttctattttcactcttgataagcttataaaatcatgattgaatcagctttaaagcatcataccatcattttttaactgagtgaaattattaaggcatgtaatacattaatgaacataatataaggaaacatatgtaaaattctgttatgacataatttatgtctccattttgttgtattggccagtacttttacaaatcaaaacatctctcaagccaaaggagaagacagtaagaacagacataagggacattttagtttaggctagtgtcctgcctcttagaggtggcattgtgtaaatctgagctttgagcaagaaagttttggaaattgtgttgcttttaagaaatagagttagtgtggctggataagaaagtcacatttatgcaaatgtttcttctgctagaacctcatacctgttctagttcatctccacgtttattttaccaagagatcctctgtcaagagaatttcctggctgttgtgaaagaatttttctacatcctgaactatttttcctatttcttttcaccttgctttttttcatccttaatttgcttgtcatcacaatgaagtatgttttttgaatcatcaattctttctcattctccatttatctgaaggttcttttgcccttattaacctctcaacttttattgctgtattctagtcagaccagaacatacttccactacatcagttacttggcatcatttcacctcagtttattattgccaaataataatttgtgtcagcattttcaactatggttattcatccaacccttggatctctttgagtctactgataatctccactggaaaggtggaattgaaatgtggtccacattttaactagctatttcctggggctgtatttttcagaatatgctgagctacatttgctgcaatctgttgctattcagagtttaagtttcaggagaaaacaggaacaatagaacactctgcctgttatttttgttgtaatcaagcttttccacagttcttgaaaagtactatgtttcaaatttcaggaacaccagcgttagctgtaaaagttgcagcaatttattggctagtcatannnnnnnnnnnnnnnnnnnnnnnnnnnnnnnnnnnnnnnnnnnnnnnnnactttgctatcagatatttggcataaatctgtactcttcattatagttttggggggagagaagattcagtcagaaaacttattcaaagtacctaagtattataaaggagtcaaaaaggtacaaagagaaaaggtcaagacatttttcaaatgagggaaaactaacaggatttatcactagtaaacctgctctaaaagaattcaagggaagctttttaaaaagaagggaagttatagcagaaggaaacttagaatggcaggaataaagaaggcataaatgtataggggtaaatataatagacttctcttgaggttttaaaaattacattttgttatttgaaagaaaaaaattaacgttggttgtatgtgatttctctgtagaggatataca

SEQ ID NO: 186346 - DNA, 1475 bp, Homo Sapiens
gttttacatcaggtttatttcaatacatcgtgaagcaattggtttacttcaggtggcagaaattctgatgttgttggctctggagagagaaaacagatgtgattctaggcatcataggtgaatcgacattagaaaagtcttcccatttagatttttcagtcgcacactctaaattttgattttcattactgtacaggttttgtccatcaatgttttgtcctttttctaaaacatactgttcttcaatttcagattttgcttttaaagttccatctttatcatttaaaaggctaatagatgctaataggctatctggttttgagctctcctgcctcactagtgataaaaatgattcactaattggttgttggacaactgttttgctggatgaagattctctttgagggttttcatacactgctgttcctgaaaacctacgacgtttattagaattattcacttttgagtaattatgaaaaggtaatgatccttggttggaggattcaacaggtaactcacagttgccataattaatgcaataattatgcatatctccactgttgtatgcatttggtttggcaacacagttgactttatctggacttttaatggtggtacctaatacctcagggtgactctgagtgagatgatttccccagaagtcaacattatctcttgtttcaaattttgtggtcaaattcactgatgctgtaaccaattctgatgttgctgacaaagaagatacacttttctcataatccattgtttgaagcatattattcctttgagatatcaaagtcatttctttttctgaacttgctttccctgaaagtatagaagatgaacatgaaaatggagtagctgctttcatataaactgtgtcatttaactcagttgttactcctgttaaaaatccattagtgtccaaagtctggggctgcaaattagcagtaccgtcctttgcagcacctgactgtgagcctggtgaacatacattttgtttgataggcaccaattttaatacaatatgctgttttccatccatcatcttgaagcccataaacgtagcattatagttaggggaaactgctagtttattatttttcatcattacatttttcagtgtaggtcctagtacagcagtcttcatgaaacctgaactagcgtttggtccctcttcagctctattaccttgcccagtggacagaggagttggcttctctgactctgattcaggggctttatcattattctcacagtgtagtctttcatccttttcttcacttaaatgctcttgaacaacatggctctggtcttcagatttagtctgtgttttgttcattttcttaagcacttgagtgttcttttctatacttctgtcacttccactgttaattttcttacgtttccagaacgtcttccttgatgcacctattttatatcttttcagtattagcttaagtcctgcagaagtc

SEQ ID NO: 186347 - DNA, 1818 bp, Homo Sapiens
  misc_feature (858)..(866): n is a, c, g, or t
  misc_feature (1670)..(1709): n is a, c, g, or t
ctttgtacaaaaaagttggattctaattaacccctaaaaaagttttcgggatgccctctgtatgattacctccatagataatgtacgtccaacggatgaactgtccagaacctctttaatgaatcatttttatcattgtggaggcaggagagctgttgaccgatagcctcctcccaatcctcttcctcttaaatgacctcctcttcacattctgactcatccgactctgattctgcagtatgtttagcaaaaaggacatcaccttgatggacaaaacactcttcgtaatgaaaatcacattttacagtgtccgactgagatgtctaaatgggaggacttttctaatgtcgattcacctatgatgcctagaatcacatctgttttctctctccagagccaacaggcatcagaatttctgccacctgaagtaaaccaattgcttcaggatgtattgaaaataaaacctgatgtaaaacaagactctagtaacactccaaataaaggcttgccacttcattgtgaccagtcatttcaaaaacacgagagagaaggcaaaattgttgaatcttcgaaagatttcaaagtgcaaggcatcttcccagttccacctggcagtgtgggtattaatgtgcctacaaatgatttgaatttgaaatttggaaaagaaaaacaagtgtcatcaataccacaagatgtgagagattcagagaagatgcctagaatttcaggttttggcacattacttaagactcagtcagatgcgataataacacagcagcttgtaaaagacaaactacgagccaccacacaaaatttaggttctttttatatgcagagtccacttttaaattcagaacnnnnnnnnnctataattgttcagacttcaaaaggattcttaataccattgaacattactaacaagcctgggctaccagttattcctggaaatgcacttccattggttaattcacaaggtatccctgcttctctttttgtaaacaagaaacctgggatggttttaacacttaataatgggaaacttgaaggtgtttccgctgtcaaaaccgagggtgccccagctcgtggaactgtgactaaggagccttgcaaaacacctattttgaaggtagaaccaaacaataattgtcttacacctggactttgttccagcattggcagttgtttgagcatgaaaagtagctcagaaaatactttgccattaaaaggcccttacattttgaaaccaacgagttctgtgaaagctgttcttattcctaacatgctatctgagcaacagagcactaagttgaatatctccgattcagtaaaacagcagaatgagatttttccaaaaccacctctttataccttcttgcctgatggcaaacaagctgtttttttaaagtgtgtgatgccaaataaaactgagctgcttaagcccaaattagtccaaaatagtacttatcaaaatatacagccaaagaaacctgaaggaacaccacaaagaatattgctgaaaatttttaaccctgttttaaatgtgactgctgctaataatctgtcagtaagcaactctgcatcctcattgcaaaaagacaacgtaccatctaatcagattataggaggagagcagaaagagccagaatctagagatgccttacccttcttannnnnnnnnnnnnnnnnnnnnnnnnnnnnnnnnnnnnnnnctactgcaacatgcccagaatcttctgaggaaccaatatgtgtcagtgactgttcagagtccagggtattaagtgtaaaacaaattgtagaattgagaggaacttcata

SEQ ID NO: 186348 - DNA, 1086 bp, Homo Sapiens
ttgggtaaaacaatacctagtgtaacaagcttgggtttcttttgcagtaagttgctctgctagccgggatgctccctttccttttctctagggggcagataatttttaggccatctgctgaaacttggtaggctttttgagggtttaaagggaatgtatttttagtttccatttatgcctttatcattaaactcgaagacatgtttatgcttcatgttctttaaccatgtagaggaagcaagggaagagttgagagaacaggtttatgacgccatgggagaaaaagaagaagccaaaaaaacagaagacaagtctttggcaaagcctgaaactgataaagaacaggacagtgaaatggagaagggtggaagagaagatatggatataagtaaatctgcagaggagccacaggaaaaagttgacttgactctagattggttaactgaaacctctgaagaggcaaaaggaggagcagcaccagaaggaccgaatgaagctgaggtcacttctgggaagccagaacaggaagtaccagatgctgaggaagaaaaatcagtttctggaactgatgtccaagaagagtgcagagaaaaaggaggtcaggagaagcagggagaggtaattgtgagcatagaggagaagccaaaagaagtttcagaagagcagcctgtggtgactctagaaaagcagggcactgcagtggaggtagaagcagagtctttagacccaacagtcaagccagtggatgtgggtggggacgagccagaggagaaggtagttacctctgaaaacgaggcaggaaaggcggttcttgaacaactggtaggtcaagaagtaccacctgctgaagagtcaccagaggtgacaacagaggctgcagaggcctcagctgtagaggctggatcagaagtctctgaaaagcctgggcaggaggctccagttctctctaaggatggtgcagtcaatggaccgtcagttgtaggagatcagactcctattgaaccacagacttctatagaaagactgacagaaacaaaagatggctcacactagaggagaaggtcagggcaaagctggttcctagtc

SEQ ID NO: 186349 - DNA, 1206 bp, Homo Sapiens
ttgtacaaaaaagttgggataaaacaaagttccttgtacctgaccatgtcaacatgagtgagctcatcaagataattagaaggcgcttacagctcaatgctaatcaggccttcttcctgttggtgaacggacacagcatggtcagcgtctccacaccaatctcagaggtgtatgagagtgagaaagatgaagatggattcctgtacatggtctatgcctcccaggagacgttcgggatgaaattgtcagtgtaaaaccagaaaaaatgcatctcttctagaattgtttaaacccttaccaaggaaaaaaaaggggtgttaccaactgagatcgatcagttcatccaatcacagatcatgaaacagtagtgttcccacctaggagtgttaggaagttgtgtttgtgtttcaagcagaaaaactgagctccaagtgagcacattcagctttggaaactatattatttaatgtaggctagcttgttttcaaattttaaaagtttaaaaataaaatactttgcattctaagttgccaataaaatagaccttcaagttattttaatgctcttttctcactaataggaacttgtaattccagcagtaatttaaaggctttcagagagaccctgagtcttctcttcaggttcacagaacccgccgcctttttgggtagaagttttctactcagctagagagatctccctaagaggatctttaggcctgagttgtgaagcgcaacccccgcaaaacgcatttgccatcacagttggcacaaacgcagggtaaacgggctgtgtgagaaaacggccctgactgtaaactgctgaaggtccctgactcctaagagaaccacacccaaagtcctcactcttgcaggggtagacatttctggtttggtttgttctctagatagttacacacataaagacaccactcaaaaggaaacttgaataatttataattttgatcgagtttcttaaaagaccctggagaaagagtggcatttcttctgtttcaagttttgtctgagttcaaactagtgcctgtgttgttacggaaagcagcagtgtaccagtgtcactctggagtacagcgggagaaacacaaaatagtataactgaaaacattaacattcaaacacactcccttctgccttccggcttaaagctgtggatgatccacgtttttgttttttaatgttaaatgtg

SEQ ID NO: 186350 - DNA, 1389 bp, Homo Sapiens
ttggatttggagatgtcatcaaggcatttatatgagtccagagaatccagctttggcggttgcaattaaaacatgtaaaaactgtacttcggacagcgtgagagagaaatttcttcaagaagccttaacaatgcgtcagtttgaccatcctcatattgtgaagctgattggagtcatcacagagaatcctgtctggataatcatggagctgtgcacacttggagagctgaggtcatttttgcaagtaaggaaatacagtttggatctagcatctttgatcctgtatgcctatcagcttagtacagctcttgcatatctagagagcaaaagatttgtacacagggacattgctgctcggaatgttctggtgtcctcaaatgattgtgtaaaattaggagactttggattatcccgatatatggaagatagtacttactacaaagcttccaaaggaaaattgcctattaaatggatggctccagagtcaatcaattttcgacgttttacctcagctagtgacgtatggatgtttggtgtgtgtatgtgggagatactgatgcatggtgtgaagccttttcaaggagtgaagaacaatgatgtaatcggtcgaattgaaaatggggaaagattaccaatgcctccaaattgtcctcctaccctctacagccttatgacgaaatgctgggcctatgaccccagcaggcggcccaggtttactgaacttaaagctcagctcagcacaatcctggaggaagagaaggctcagcaagaagagcgcatgaggatggagtccagaagacaggccacagtgtcctgggactccggagggtctgatgaagcaccgcccaagcccagcagaccgggttatcccagtccgaggtccagcgaaggattttatcccagcccacagcacatggtacaaaccaatcattaccaggtttctggctaccctggttcacatggaatcacagccatggctggcagcatctatccaggtcaggcatctcttttggaccaaacagattcatggaatcatagacctcaggagatagcaatgtggcagcccaatgtggaggactctacagtattggacctgcgagggattgggcaagtgttgccaacccatctgatggaagagcgtctaatccgacagcaacaggaaatggaagaagatcagcgctggctggaaaaagaggaaagatttctgaaacctgatgtgagactctctcgaggcagtattgacagggaggatggaagtcttcagggtccgattggaaaccaacatatatatcagcctgtgggtaaaccagatcctgcagctccaccaaagaaaccgcctcgccctggtagctcccggtcatctgggaagccttgccagcctcagcagcc

SEQ ID NO: 186351 - DNA, 1631 bp, Homo Sapiens
  misc_feature (1156)..(1174): n is a, c, g, or t
ttggtgatgaaccaccgcccaagcccagcagaccgggttatcccagtccgaggtccagcgaaggattttatcccagcccacagcacatggtacaaaccaatcattaccaggtttctggctaccctggttcacatggaatcacagccatggctggcagcatctatccaggtcaggcatctcttttggaccaaacagattcatggaatcatagacctcaggagatagcaatgtggcagcccaatgtggaggactctacagtattggacctgcgagggattgggcaagtgttgccaacccatctgatggaagagcgtctaatccgacagcaacaggaaatggaagaagatcagcgctggctggaaaaagagattggaaaccaacatatatatcagcctgtgggtaaaccagatcctgcagctccaccaaagaaaccgcctcgccctggagctcccggtcatctgggaagccttgccagcctcagcagccctgctgacagctacaacgagggtgtcaagccatggaggcttcagccccaggaaatcagcccccctcctactgccaacctggaccggtcgaatgataaggtgtacgagaatgtgacgggcctggtgaaagctgtcatcgagatgtccagtaaaatccagccagccccaccagaggagtatgtccctatggtgaaggaagtcggcttggccctgaggacattattggccactgtggatgagaccattcccctcctaccagccagcacccaccgagagattgagatggcacagaagctattgaactctgacctgggtgagctcatcaacaagatgaaactggcccagcagtatgtcatgaccagcctccagcaagagtacaaaaagcaaatgctgactgctgctcacgccctggctgtggatgccaaaaacttactcgatgtcattgaccaagcaagactgaaaatgcttgggcagacgagaccacactgagcctcccctaggagcacgtcttgctaccctcttttgaagatgttctctagccttccaccagcagcgaggaattaaccctgtgtcctcagtcgccagcacttacagctccaacttttttgaatgaccatctggttgaaaaatctttctcatataagtttaaccacactttgatttgggttcannnnnnnnnnnnnnnnnnncaatcatgatattcagaaaaatccaggatccaaaatgtggcgtttttctaagaatgaaaattatatgtaagcttttaagcatcatgaagaacaatttatgttcacattaagatacgttctaaagggggatggccaaggggtgacatcttaattcctaaactaccttagctgcatagtggaagaggagagcatgaagcaaagaattccaggaaacccaagaggctgagaattcttttgtctaccatagaattattatccagactggaatttttgtttgttagaacacccttcagttgcaatatgctaatcccactttacaaagaatataaaagctatattttgaagacttgagttatttcagaaaaaactacagccctttttgtcttacctgccttttactttcgtgtggatatgtgaagcattgggtcgggaactagctgtagaacacactaaaaac

SEQ ID NO: 186352 - DNA, 2420 bp, Homo Sapiens
ctttgtacaaaaaagttggcctaaatcttctgcttcaagtactttcacttctgttccttccatgggcattggtatgatgttttctacaccaactgataatacaaagagaaatttgacaaatggcctaaatgccaatatgggctttcagacttcaggattcaacatgcccgttaatacaaaccagaacttctacagtagtccaagcacagttggagtgaccaagatgactctgggaacacctcccactttgccaaacttcaatgctttgagtgttcctcctgctggtgcaaagcagacccaacaaagacccacagatatgtctgcccttaataatctctttggccctcagaaacccaaagttagcatgaaccagttatcacaacagaaaccaaatcagtggcttaatcagtttgtacctcctcaaggttctccaactatgggcagttcagtaatggggacacagatgaacgtgataggacaatctgcttttggtatgcagggtaatcctttctttaacccacagaactttgcacagccaccaactactatgaccaatagcagttcagctagcaatgatttaaaagatctttttgggtgaggtgtcttacttctattttgaaggattatttcagtttcaatcatgggtgagctgatttacatctttatatagttggcttggaggaagtacttctatgggaaagtgaacagttctgtgacaggaaacatctctgtccatgccagcatagtagttgtatggacttctaaccagttgagttttttaaagcattgaggattttttcctcttaccaactcctcttcaggtttttaaagacccagcccttcccaatctcaaagagaaaaaggaaactgagttatcttgaataacataactttttaatcaaatgtttattttggcttgtggatcttggtgttatttaaaaaattgaggtgatggtcattgcaagctcatctattaagtactatatggtacacagtctatgagtcattagtcttcattttaatatgtaaaaaatcttgatgctgtattgatttgtttgcatttaagatgacagtgagaaaatgataagcataaagagaagtatcaggttatttgctttttccaaacttttcagatgaactattgtttagtacagagactgagcaaatactacaaaattcaacttaaccttcatttcattggtttaaatgcgttattaaccatcttaagtgcaaactaatcattgtaaattatattttagcatggtctgcctcaaatagtaatgtatttttctgcattcacttggatatatttagaatcacttttttcctcctgtatcaaggaagaggtatgtgctgatttgtttggatatttgacaaggcactctgatgtgacttccctgactactaccttcatatttcatttcaaattcaaacttctgaggttgcagcatatatgaattgcattttcaaaagaagatttgtaagaattaaactatatttatgagtaaacttttgaggtttctgctgtattgtttcaaatgtaataaactttacttctgtaaaaattgagcagttgtatcttctgaccaccaacagattttcagcttgccatgatagtctgacctcattaattactgctactgaagttcaatttttttctaggaattttaggaaccttttgtttaaatattttaatttctattagccatttttaggaaggaaagaatcaattctcttaacaggaaacatgctttatttttcaaaacctttctctgatatttttctttaatttgctgattattcaaccacagagccttatgctataaatgtcatttgtattttaaaaaataatattccactcataaaactttaaaaccatctttcaacgaactatatatgtattatagttgctgccatagagttgatggtttttaattatctggaaccagcaatcatttaaaataaaccatattaagtttagtatgctggtattgtttattcattttatatgaatattcattgaaaatatatacacaatatatgtaatacacagcacttgattacaaaatgtaatttaattatattattgctggcagcattcagttaagagggtactttaaaaaatagaagtcagctttcacatctgatttctgtatgggctgtacttggttaacttgattttagaaaaaggactaacagaattgctaaagaaatgcatccaataaatgaaaaacagtagaagatcaaatgtttttgtcaaatatattcacaacttgaccagattagctgtcctgtttgtaatgcaatattaatatgtcttttgggaaaaagcctacatatggaataaaataagtattgaagaatttttctttgtaacaatttagtagtcactgtttattgagaaaattgtttttattttg

SEQ ID NO: 186353 - DNA, 1336 bp, Homo Sapiens
  misc_feature (116)..(166): n is a, c, g, or t
ttggatttggagcacaaataatgaaggtgccataatatggcttgccaatgttacctccttgaatagtcatgtgtcattgtcttgaattggtaattggagaaccttgcatgaaatannnnnnnnnnnnnnnnnnnnnnnnnnnnnnnnnnnnnnnnnnnnnnnnnnnacatacctgtatttgcttggggcttgtgtgtggtatgttacaaagagtgaatttctggaaatagaaatcagttaaatgttgaaagttcaggttagcagaaatatttcatttaaatatgctttactttggaggacaattgattaacagaggaaatgataattttcaaaaatgtgatcaatttactgcatgatgaaatgtgaaaacagtgcctttttaggacatcaattataataaaattgttttaaaatattaacaaagatctcaaaaagttgtcatgaacattattcatttatttttaaactggatctaaataagagcttagatggccaaaattagaattaataatatacccatttaaattttgttcataaatttaaaatcttaatcagaattctttataaaatgtgggtcatagatatgacccagtgttactaaaatagaacagggattgtgaaaatccagctcaacatacttaagtatacttggcttagagccaagtatacttgaagaggtgaattattctgacttggacatgcatgctctttgatggataaaataaaaatattcaatttattcttacaaaagaaggtgggtgggtgagtgggttcgttttagtgttctcagattataaagacagctataaagacagcactttccgcacacaaagtgtattttacaaaccttttttatacaaattaatgagctctactttatttaagtgttcatggaatgatgtaaattttaggtccagttgaacaaatattgagtgcctatcatatgcaagactaactccttactaggaatgaaatcacacagtgtcttctgtttgcagtatgtgaactttatgtttgaaaagaaattattatatttaaatttttttgttgtcagagtttatcattgtatactgtaacccagtaaattttgcattcagttttaaaaaatgaagatgtaacttacctgagtctcatttttgaaaatgaaattctgcaaaaattatttaaaaattagtttcttggggaaattgattttcaagattcaagtgtataaaaacttatattgaacttttcagcctcgtttttaattagctgatgttaatgatagatacataatacatgtatcttgttgctgaaaatattttttgcatttcaacacattgagttaaaataaagt

SEQ ID NO: 186354 - DNA, 1339 bp, Homo Sapiens
  misc_feature (563)..(606): n is a, c, g, or t
  misc_feature (1041)..(1071): n is a, c, g, or t
  misc_feature (1201)..(1210): n is a, c, g, or t
ttttatttttatccatcaaagagcatgcatgtccaagtcagaataattcacctcttcaagtatacttggctctaagccaagtatacttaagtatgttgagctggattttcacaatccctgttctattttagtaacactgggtcatatctatgacccacattttataaagaattctgattaagattttaaatttatgaacaaaatttaaatgggtatattattaattctaattttggccatctaagctcttatttagatccagtttaaaaataaatgaataatgttcatgacaactttttgagatctttgttaatattttaaaacaattttattataattgatgtcctaaaaaggcactgttttcacatttcatcatgcagtaaattgatcacatttttgaaaattatcatttcctctgttaatcaattgtcctccaaagtaaagcatatttaaatgaaatatttctgctaacctgaactttcaacatttaactgatttctatttccagaaattcactctttgtaacataccacacacaagccccaagcaaatacaggtatgtnnnnnnnnnnnnnnnnnnnnnnnnnnnnnnnnnnnnnnnnnnnngatcacatatttcatgcaaggttctccaattaccaattcaagacaatgacacatgactattcaaggaggtaacattggcaagccatattatggcaccttcattatttgtgctccaaatatcaacacacattaaaattaaaaatgaaaaggcacaaatatagtatttctaagtgttggtctaaacaacagttacccaatgattattcttatagtacgcaacatttgaaaccattcactaccttctcagaaaaagccttgcttaggtgacaaagggaaacaggaacaggctaatagctcaaaaggcgggacagaatatctatacctattttgaaagtaatgtatgcagtttaaaaatgaggagaaggaggctattagagcactcatgtcagaatacattaagtgtttttatcattgcctcaagaacccacaataccnnnnnnnnnnnnnnnnnnnnnnnnnnnnnnncaactaccatatgattctgttagtataatggtaggcattatattatctgaaaagtggacatttctacaaacatggatattcttacagcacagtgtttgacatttttggtacaaaatgtgctaccaaactnnnnnnnnnntctttataataaaatccttaagatttgcaataaactctcgagtaagtaagaagaagctgaaatgttcattatacggtatttttactgaagtcacatggtggttagaaatccaacttttttgtacaaagt

SEQ ID NO: 186355 - DNA, 2061 bp, Homo Sapiens
ttggatcaaaactttatagaacagtcaacattttagattcggtaaccttttttttcttccaattataatctctgcttctagccacttccgccagcagttggtggaagacttactaggtgcagggcactttccaagttcatcacaacaacctgcttgttttcatgagacaataatccgaaaagttcgctttgatatattcctggagggccaagcccatctatttacaaaaggtgaacagcaaaatcaagcactgctttatgggcaggaacacaagagaaagcaaactgcccaagaagtcatcatgtcagaaactcaatctcaacaaaataatttccatcagggaacttcagggtttcttgggggcttatgagtctcaccggtcaacccaggaggcctcactacaagagccttgacaaggcactgttttttgtgggactgggagttcacactgatgaagcaaacctttgaatttttgcacagctcttgtcagaaagccctgagttccccctggataaagagttaattttaatccttccctataattatacttcaaaatatttgacatctgctattatgccttctttagatctttcttctgcggtgcagacatttctagtaagtgtttgactacttgtatggcattagctttcacagaaaattgtttcacttaaaactgtggattggcctaggctaaggacaaaaataaactaagtacctgtagtgtatttatgtgatatgtgtcaagttactcaaagttattgctgttggaactgaacaataatatttcccagatagctggccttagcatgtgatcacggttgttgtatttttaatttttgtcttttacagtatgagaggggtaggttaatttgtttatttcctataaatttgtatttatgtgtatataaaatgtacaatgaatgtaaatatgactttctggaaagtttagactacatttagaatctctattcaaaatcaaaatgctgctcaaatgaatttaaccaacatctaggtgcttaatttctcattttatcccacttatgagattgggaaaaagatcaatatgagaaataccatacagataccttaaatgtatgcatttgtgcaacaatttttgagaaggtgagtggcaatttataatttagttggcaatttataatagaacttatagcttttaaaagaccttttaaagacattaaatgtaaacttaaaaatgtttagatcttgtttcaaactttacaatagcattcttcaaaatattaagttatatattttataggcatttagttgcttattaaaagcactgattttcaaactttttgatttaagaacaattatttaagatcgtctcagaagatgggatcttcgtttcaagaaaagggaatcaagtttgcctttgagataatacgttacactaagaaaaggaaaatgtggatagtaaaacccacctctctcatcctattgtactctcttctgctttttagaagcctgcacttaagcttagatttgtgaagggagagtagaaggggagaagtagaaccacagtgttttatttatttttctaaaactcttactaaatccagattttttaaactgttttaaatgtgaattcttcccagaaatttcaatgcattgcatatttagccttcggcatatttttcatgaatagatcatgaagtcataggcttccaaggcataggaagagatcttgcaggtctagtattttaataatgcactattacccagggcagatattatgagaaactgtttcttctctaagggtttatggcagactttgcttttttaacatgtgagaaatgaattttttattttgtgatttatgtgatttcttttgctgagtgaaggaaaggagaaattgtttgctattgtcagcatcttaaaatatttcccagtcaaggcaaggctaagtgctttgtgatagtattaagcaagtcatgttttgaatggattacctgtagtgactcattggaatgatataattatacaagtaatgcccaaaaccaagttcaagcctaatttatcaaagccactcatttaaaa

SEQ ID NO: 186356 - DNA, 1756 bp, Homo Sapiens
ttggctcagatcagcaaggaggaggctcggggcccgctgcggggcaaaggtgaccagaagtcagcagcttcccagaagccccgaagccggggcatcctccactcactcttctgctgtgtctgccgggatgatggggaggccctgcctgctcacagcggggcgcccctgcttgtggaggagaatggcgccatccctaagaccccagtccaatacctgctccctgaggccaaggcccaggactcagacaagatctgcgtggtcatcgacctggacgagaccctggtgcacagctccttcaagccagtgaacaacgcggacttcatcatccctgtggagattgatggggtggtccaccaggtctacgtgttgaagcgtcctcatgtggatgagttcctgcagcgaatgggcgagctctttgaatgtgtgctgttcactgctagcctcgccaagtacgcagacccagtagctgacctgctggacaaatggggggccttccgggcccggctgtttcgagagtcctgcgtcttccaccgggggaactacgtgaaggacctgagccggttgggtcgagacctgcggcgggtgctcatcctggacaattcacctgcctcctatgtcttccatccagacaatgctgtaccggtggcctcgtggtttgacaacatgagtgacacagagctccacgacctcctccccttcttcgagcaactcagccgtgtggacgacgtgtactcagtgctcggcagccacggccagggagctagtgagggtgatggggccaggacctgcccctgaccaatgatacccacacctcctcccaggaagactgcccaggcctttgttaggaaaacccatgggccgccgccacactcagtgccatggggaagcgggcgtctcccccaccagccccaccaggcggtgtaggggcagcaggctgcactgaggaccgtgagctccaggccccgtgtcagtgccttcaaacctcctcccctattctcaggggacctggggggccctgcctgctgctccctttttctgtctctgtccatgctgccatgtttctctgctgccaaattgggccccttggccccttccggttctgcttcctgggggcagggttcctgccttggacccccagtctgggaacggtggacatcaagtgccttgcatagagccccctcttccccgcccagctttcccaggggcacagctctaggctgggaggggagaaccagcccctccccctgccccacctcctcccttgggactgagagggcccctaccaacctttgcctctgccttggagggaggggaggtctgttaccactggggaaggcagcaggagtctgtccttcaggccccacagtgcagcttctccagggccgacagctgagggctgctccctgcatcatccaagcaatgacctcagacttctgccttaaccagccccggggcttggctcccccagctctgagcgtgggggcataggcaggaccccccttgtggtgccatataaatatgtacatgtgtatatagatttttaggggaaaggagagagggacgggtcagggtagagacaccccctcccttgcccctttcctggggcccagaagttgggggggagggagggaaagggattttaacattttttaaactgctattttctgaatggaacaagctgggccaaggggcccaggccctgtcttctgtccctcacacccctttgctccgttcattcattccaaaaacacatttc

SEQ ID NO: 186357 - DNA, 1465 bp, Homo Sapiens
  misc_feature (34)..(42): n is a, c, g, or t
tttgtacaaaaaagttggaggcctttgttagccnnnnnnnnntgggccgccgccacactcagtgccatggggaagcgggcgtctcccccaccagccccaccaggcggtgtaggggcagcaggctgcactgaggaccgtgagctccaggccccgtgtcagtgccttcaaacctcctcccctattctcaggggacctggggggccctgcctgctgctccctttttctgtctctgtccatgctgccatgtttctctgctgccaaattgggccccttggccccttccggttctgcttcctgggggcagggttcctgccttggacccccagtctgggaacggtggacatcaagtgccttgcatagagccccctcttccccgcccagctttcccaggggcacagctctaggctgggaggggagaaccagcccctccccctgccccacctcctcccttgggactgagagggcccctaccaacctttgcctctgccttggagggaggggaggtctgttaccactggggaaggcagcaggattctgtccttcaggccccacagtgcagcttctccagggccgacagctgagggctgctccctgcatcatccaagcaatgacctcagacttctgccttaaccagccccggggcttggctcccccagctctgagcgtgggggcataggcaggaccccccttgtggtgccatataaatatgtacatgtgtatatagatttttaggggaaggagagagggaagggtcagggtagagacacccctcccttgcccctttcctgggcccagaagttggggggagggagggaaaggatttttacattttttaaactgctattttctgaatggaacaagctgggccaaggggcccaggccctgtcctctgtccctcacacccctttgctccgttcattcattcaaaaaaacatttcttgagcaccttctgtgcccagcatatgctaggcccaccagctaagtgtgtgtggggggtctctacgccagctcatcagtgcctccttgcccatccttcaccggtgcctttgggggatctgtaggaggtgggaccttctgtggggtttggggatctccaggaagcccgaccaagctgtccccttcccctgtgccaacccatctcctacagccccctgcctgatcccctgctggctgggggcagctcccaggatatcctgccttccaactgtttctgaagcccctcctcctaacatggcgattccggaggtcaaggccttgggctctccccagggtctaacggttaaggggacccacataccagtgccaagggggatgtcaagtggtgatgtcgttgtgctcccctcccccagagcgggtgggcggggggtgaatatggttggcctgcatcaggtggccttcccatttaagtgccttctctgtgactgagagccctagtgtgatgagaactaaagagaaagccagaccc

SEQ ID NO: 186358 - DNA, 1244 bp, Homo Sapiens
cagtaggcatccagcgctggggcagctgcttcaggacatcgccgaggacaagtctcctccccattctggttccaccatctgtagcctgtggctttcatcctcaagggctccatgcgaccgctgcacatccagggctggctgctggcgggatggacaccctggaggaggtgacttgggccaatgggagcacagcgctacccccacccctggcaccaaacatcagtgtgcctcatcgctgcctgctgctgctctacgaagacattggcacctccagggtccggtactgggacctcttgctgctcatccccaatgtgctcttcctcatcttcctgctctggaagcttccatctgctcgggcgaagatccgcatcacctccagccccatttttatcaccttctacatcctggtgtttgtggtggcgctggtgggcattgcccgggccgtggtatccatgacggtgagcacctcgaacgctgcaactgttgctgataagatcctgtgggagatcacccgcttcttcctgctggccatcgagctgagtgtgatcatcctgggcctggcctttggccacctggagagtaagtccagcatcaagcgggtgctggccatcaccacagtgctgtccctggcctactctgtcacccaggggaccctggagatcctgtaccctgatgcccatctctcagctgaggactttaatatctatggccatgggggccgccagttctggctggtcagctcctgcttcttcttcctggtctactctctggtggtcatccttcccaagaccccgctgaaggagcgcatctccctgccttctcggaggagcttctacgtgtatgcgggcatcctggcactgctcaacctactgcaggggctggggagtgtgctgctgtgcttcgacatcatcgaggggctctgctgtgtagatgccacaaccttcctgtacttcagcttcttcgctccgctcatctacgtggctttcctccggggcttcttcggctcggagcccaagatcctcttctcctacaaatgccaagtggacgagacagaggagccagatgtacacctaccccagccctacgctgtggcccggcgggagggcctggaggctgcaggggctgctggggcctcagctgccagctactcgagcacgcagttcgactctgccggcggggtggcctacctggatgacatcgcttccatgccctgccacactggcagcatcaacagcacagacagc

SEQ ID NO: 186359 - DNA, 1187 bp, Homo Sapiens
ttggcgcagcggcagagaacggcgacgcggccgggtctgccatcatggatgttctcgcagaagcaaatggcacctttgccttaaaccttttgaaaacgctgggtaaagacaactcgaagaatgtgtttttctcacccatgagcatgtcctgtgccctggccatggtctacatgggggcaaagggaaacaccgctgcacagatggcccagatactttctttcaataaaagtggcggtggtggagacatccaccagggcttccagtctcttctcaccgaagtgaacaagactggcacgcagtacttgcttagggtggccaacaggctctttggggaaaagtcttgtgatttcctctcatcttttagagattcctgccaaaaattctaccaagcagagatggaggagcttgactttatcagcgccgtagagaagtccagaaaacacataaacacctgggtagctgaaaagacagaaggtaaaattgcggagttgctctctccgggctcagtggatccattgacaaggctggttctggtgaatgctgtctatttcagaggaaactgggatgaacagtttgacaaggagaacaccgaggagagactgtttaaagtcagcaagaatgaggagaaacctgtgcaaatgatgtttaagcaatctacttttaagaagacctatataggagaaatatttacccaaatcttggtgcttccatatgttggcaaggaactgaatatgatcatcatgcttccggacgagaccactgacttgagaacggtggagaaagaactcacttacgagaagttcgtaaaatggacgaggctggacatgatggatgaagaggaggtggaagtgtccctcccgcggtttaaactaaaggaaagctacgacatggagagtgtcctgcgcaacctgggcatgactgatgccttctagctgggcaaggcagacttctctggaatgtcccagacagacctgtctctgtccaaggtcgtgcacaagtcttttgtggaggtcaatgaggaaggcacggaggctgcagccgccacagctgccatcatgatgatgcggtgtgccagattcgtcccccgcttctgcgccgaccacccctttcttttcttcatccagcacagcaagacccaacgggattctcttctgcgggcgcttttcctctccgtgatgacagggcag

SEQ ID NO: 186360 - DNA, 919 bp, Homo Sapiens
ttggatcttaattgagcataggcttctctactaggcaacatcagactaatagtatttacctcttcagagaacttgaggggaaaagaaacatcccagggatgctgtcgcatgtctgctctgcaggttcttcatacagctgcctctgccaattcagtttattttttggggggagtggtgtgggtgggagagttagaagtgggatattgggagcaagtaagtcacccaataattgaagtccttgatttgtaaaactgttatacagagaagtaaagataaaggttgtcagatttattttttaaagtacttaaccagagttcgtggattttgtggactttaattggactcaattcactctgtgagcatcctggattgcatcgatgaacactgaattactgtaagaacatagacaggctctcactatgacctggacagtttaagttgctacactggtaacattctagtatcaaggagaattccattcatcatgacattcacattttacttttctcaatggaatgcttgcttcaggcttaccaatcacacctagaactgaagtctgagtgagtggtattaataatttttctgaaaggaataaaattggaatgtttctaaatgtggagaaattcttcagtatcctaataatatacccaaatgctttttctgggagagagcattcttttacaaaagaactttccctataaaagcatcacagtataatgtgaattggcattaaaatctttggatgcttttgcattattaagttcatggagaaatatattctttttactatgtatgtattaataaaaagtgggcaaagtaaagtttgcaaaatttagtttctctaaatttttgcacagtgactgcagctggctatggggtcagctcttaatacacaaaccttgactgggaagtcactata

SEQ ID NO: 186361 - DNA, 1506 bp, Homo Sapiens
  misc_feature (351)..(426): n is a, c, g, or t
  misc_feature (567)..(591): n is a, c, g, or t
  misc_feature (890)..(946): n is a, c, g, or t
actttgtacaaaaaagttggggtaggactgcggacgtatttgttttcttcaagcatttggtcgagattaagaattaaaaatgtcatccaaacaagaaataatgagtgaccagcggtttagacgggttgcaaaggacccgagattttgggaaatgccagaaaaggatcgaaaagtcaaaattgacaagagatttcgagccatgtttcatgacaagaagttcaagttgaactatgccgtggataaaagagggcgccccattagccatagcactacagaggatttgaagcgtttttacgacctttcagattctgattccaatctctctggtgaagatagcaaagcattgagtcnnnnnnnnnnnnnnnnnnnnnnnnnnnnnnnnnnnnnnnnnnnnnnnnnnnnnnnnnnnnnnnnnnnnnnnnnnnnaaccaagaaggctaatcacaagggttctgaaaataaaactgatttagataattctataggaattaaaaaaatgaaaacctcatgtaaatttaagatagattcaaacataagtccgaagaaggatagcaaagaatttacacnnnnnnnnnnnnnnnnnnnnnnnnncattgttcaacatactacagactcttctctcgaagaaaaacaaaggacattagactcaggcacctctgaaattgtgaaatctcccagaatcgagtgttctaagacaagaagagaaatgcaatcagtggttcaactcataatgacaagagacagtgatggttatgaaaactcaacagatggtgaaatgtgtgacaaagatgctctggaggaagattcagaaagcgttagtgaaataggaagtgatgaggaatctgaaaatgaaattacaagtgttggtagagcttcaggtgatgacgatnnnnnnnnnnnnnnnnnnnnnnnnnnnnnnnnnnnnnnnnnnnnnnnnnnnnnnnnnagtgaggatgatgataaaagtgacagtggccctgatcttgcaaggggtaaaggaaatatagaaactagttctgaagatgaagatgatacggcagatttgtttccagaagaatctggttttgagcatgcttggagagaattagataaagatgctcctcgtgctgatgagattacacgtcgattagcagtttgtaacatggactgggatagattaaaggcaaaagatttgctggctctgttcaattcatttaaacccaaaggaggtgtaatattttccgtcaagatatatccttcagaatttggaaaggagaggatgaaggaagagcaagttcaaggaccagtagagctattaagtattcctgaagatgccccagaaaaagactggacgtctagagaaaaattgagagattatcaattcaaacgactgaagtactattatgcagtagtagactgtgattctccggaaacagctagtaaaatttatgagattgtgatggcctgcatttgaaagtagttgttctttcatagatctaagtttataccagatgatattacttttga

SEQ ID NO: 186362 - DNA, 1397 bp, Homo Sapiens
  misc_feature (1103)..(1124): n is a, c, g, or t
gccccaagtcctcacctttctaaatattctgtttatcagttaagccttattatgtactgaagagtgttgctggagaagtaagagctctgcatgacacatcaactgtctccaggcaggaggactggggcgaaccctgttcatcttagagaaggtcgtctcccccttaattcagagaccagctaatttgatttaacaaacagaattccacagaaactctgatcagctgaggcaaggtggttttgagttgccaaatccggccatgcctctgagtcagaggcagcccatccagcacgtgctaggtgttcccatacgcacaggagaggcaagctagccagccaaggcgggcaggcggggaggccctctagctgttctgcctcacctgtggggccccagcagggaggagtcaccagcctcagagggaggccaggtatacaccctcatacgagggcagactcaagtttatcagtaagcctttgccctgcatgaactgaatgaagacgccattacaagtgccactggatatcaccaagaaactggctaagaaccatattccctgagctcaaccagacacgtcgctggggccccatagtgtgcatcatgtccaacctgtaactctctccccctcttcttccatgaggtcctgagaccaggattcctaaaacaaacaggatgagggacctttagacacgcaaggagacatgcctctagcaggatcagggggactggggtcgggagggtggggcaggaaggaagccagaatcagaagtatcccagccctgataaggcacccacagaaacaacctagcctctgaaacagcagatcaagtccagggagaaagggagtcaaggttgtaagcaccctctgcccagccttactcactaaaaggccaatacattacaaaggaaaataagtctatttataaaaaaaagtctaaaatgcttagattctccttaaaccttcctatttcaacaccaaaggccaggttgcagcttcagatgtcttaagggtttgacctgaagcccgtttcagggattatataaattaccagcctgaaggaagctgaatgcttaaagcaccaaggaggctgttaactgaagtttcnnnnnnnnnnnnnnnnnnnnnngagacagagggcactaagtcgtaatatggcagctgatattcttcatggactcctgggagaaaagaaagtatctacctgagttatcaacagcaggaaaagattactcagaagccggtgacaaaacctacactgtgctctgtaaataccactaccccctaaggttccttagaaagttagttaattctaagtatggaacaagaaatacacaaaaggggccgggcatggtggtaatagcactgcatttttttaagtcctcatctttaagaactccaa

SEQ ID NO: 186363 - DNA, 1695 bp, Homo Sapiens
aattccttgttcttattgtagtggtctccatgtcttcagtatttccttccccttctccatctcacctgtatacattcactttggtaattagcatctttcttaatttattggcaggataacgtcattagcagaatctcaacttcagacccgtcaacaaattaagaaactggaggagttgcagcaaaaagtttcctacaaaggggaccccattgtacagcaccggccgatgctggaggagagaatcgtggagctgtttagaaacttaatgaaaagtgcctttgtggtggagcggcagccctgcatgcccatgcatcctgaccggcccctcgtcatcaagaccggcgtccagttcactactaaagtcaggttgctggtcaaattccctgagttgaattatcagcttaaaattaaagtgtgcattgacaaagactctggggacgttgcagctctcagaggatcccggaaatttaacattctgggcacaaacacaaaagtgatgaacatggaagaatccaacaacggcagcctctctgcagaattcaaacacttgaccctgagggagcagagatgtgggaatgggggccgagccaattgtgatgcttccctgattgtgactgaggagctgcacctgatcacctttgagaccgaggtgtatcaccaaggcctcaagattgacctagagacccactccttgccagttgtggtgatctccaacatctgtcagatgccaaatgcctgggcgtccatcctgtggtacaacatgctgaccaacaatcccaagaatgtaaacttttttaccaagcccccaattggaacctgggatcaagtggccgaggtcctgagctggcagttctcctccaccaccaagcgaggactgagcatcgagcagctgactacactggcagagaaactcttgggacctggtgtgaattattcagggtgtcagatcacatgggctaaattttgcaaagaaaacatggctggcaagggcttctccttctgggtctggctggacaatatcattgaccttgtgaaaaagtacatcctggccctttggaacgaagggtacatcatgggctttatcagtaaggagcgggagcgggccatcttgagcactaagcctccaggcaccttcctgctaagattcagtgaaagcagcaaagaaggaggcgtcactttcacttgggtggagaaggacatcagcggtaagacccagatccagtccgtggaaccatacacaaagcagcagctgaacaacatgtcatttgctgaaatcatcatgggctataagatcatggatgctaccaatatcctggtgtctccactggtctatctctatcctgacattcccaaggaggaggcattcggaaagtattgtcggccagagagccaggagcatcctgaagctgacctaggtagcgctgccccatacctgaagaccaagtttatctgtgtgacaccattcattgatgcagtttggaaataatggtgaaggtgctgaaccctcagcacgagggcagtttgagtccctcacctttgacatggagttgacctcggagtgcgctacctcccccatgtgaggagctgagaacggaagctgcagaaagatacgactgagcgcctacctgcattctgccacccctcacacagccaaaccccagatcatctgaaactactaaccttgtgggttccaga

SEQ ID NO: 186364 - DNA, 2051 bp, Homo Sapiens
tggcaagccctttatctctagacatcagggatgaaacacaaactccgcctccatgaaactgatgttctaaaggggagacagatcacaatcagatccataaggaaaagtgtgtctgtgtgtatcttcctctctagggaaaaatacagcagggtgaggggattgagtgggagtgcaatcagggaagacttcctgaaggcagtgactggtgactggaatgaagcatgagaatgagccatgcaggttgcccagagagagcatccaggcagagggagcagaaagttccatcctcacccagctctgccggcccaggtactttctcctctgccttctactcccagtctcactccagtgcaacacacttcagttttctgggaactcctgatggaaagtggctgtatttgttcatccctatagccttggggcacagccagcagcccctggaggaagccccgcaggtaggtaaagagacacagggctcccagccggccctgcctcacctctgcgccggtggcccatccatgatgatgttgatccataggatctgcatggcgttgagggggctgggcaggttgaacacggtggacagagtgatgagactcagggcggagatgctcgtgctcagctggaatcggacaaagtttttgatgttgtaaaaaatacccttgccttcctccactgcattcatgatggctgagaagtcatcatccaccaggatcatgttggcggcctctttgctgacgtccgtccctgtctgccccatggcgatcccaatgtctgcagacttcagggccactgcgtcgttcaccccatccccagtcatggccacgatcgcccctgactcctgcagagccttgatgattttgagcttgtgctttgggctggtcctgaagaacacggacaccttccccacgcggtcggccagctcgcccttctccacgctgtccacctcctccccggacatggcttgcagcttcccgttgcacaggccgatgtttcttcctatggccaaggccgtctcctgggcatcccccgttatcatcttcacagacacaccagactcggagagaacctggactgcttccttcacgccaactctcggggggtcaatgatgcccacaagacctagaaacgtcagccgccccagctcgggcccagaagccagggccagcacccgcaaaccgagcgaccccatcctcttctcttcctgcaggcagaatgacctctgctggggcgtcagcggcagggggatgcccccgttgttgtacatggtgcagtagcggatcacctcttccaaggcccctttcatgaagtaaatgtcttcctgatcctcagtcttcagactgcatttcaccgccatccacttctgctctgaactgaatggaatctctttttttcttatatatgaatttttaatatcacttaagtccatcttcatcgccagggccatcaatgcaccctcggtgggctgccccatcacggcgttctttctgatgaccgcattgttggcaacacagcccgcctccactaactttcccactgagacattggaaaattccttaatgacttccttggatggtagaagacacacagtcccttgaccgtcatacccaactccgctgacctcggcacgaagcccatctgacgttacaagctgggtcactgtcatttcattggcagtcagagtccccgtcttgtcagaacagagaacgctgcagcaacctaaagtctccacgatgggtaacttcttcacgatgacccgcttcttggccatccgcagcactcccaggaccagcgtcaccatgacgacgatgggcagaccctctggaatggccgccacagccaggctgaccccgatcgtgaacatactcaggagttgtttcccttgcgaccagccaatgagcatgatgagaccgattatgccaaaggagaagagtgtcagttgctttcctagcctgtccatgcttttctgcaaaggagttttaggtgtctcttcagcctgcatcatcttaaacacttctccgaactgaggagctttcccccaacttttttgt

SEQ ID NO: 186365 - DNA, 2686 bp, Homo Sapiens
ttgggtcattggcgcccgagctgtgaccgccgccactggggcagccagcacaatcgggcggaggtggcgctgccccttcagacctgaaagatgtctgaaaattccagtgacagtgattcatcttgtggttggactgtcatcagtcatgaggggtcagatatagaaatgttgaattctgtgacccccactgacagctgtgagcccgccccagaatgttcatctttagagcaagaggagcttcaagcattgcagatagagcaaggagaaagcagccaaaatggcacagtgcttatggaagaaactgcttatccagctttggaggaaaccagctcaacaattgaggcagaggaacaaaagatacccgaagacagtatctatattggaactgccagtgatgattctgatattgttacccttgagccacctaagttagaagaaattggaaatcaagaagttgtcattgttgaagaagcacagagttcagaagactttaacatgggctcttcctctagcagccagtatactttctgtcagccagaaactgtattttcatctcagcctagtgacgatgaatcaagtagtgatgaaaccagtaatcagcccagtcctgcctttagacgacgccgtgctaggaagaagaccgtttctgcttcagaatctgaagaccggctagttgctgaacaagaaactgaaccttctaaggagttgagtaaacgtcagttcagtagtggtctcaataagtgtgttatacttgctttggtgattgcaatcagcatgggatttggccatttctatggcacaattcagattcagaagcgtcaacagttagtcagaaagatacatgaagatgaattgaatgatatgaaggattatctttcccagtgtcaacaggaacaagaatcttttatagattataagtcattgaaagaaaatcttgcaaggtgttggacacttactgaagcagagaagatgtcctttgaaactcagaaaacgaaccttgctacagaaaatcagtatttaagagtatccctggagaaggaagaaaaagccttatcctcattacaggaagagttaaacaaactaagagaacagattagaatattggaagataaagggacaagtactgaattagttaaagaaaatcagaaacttaagcagcatttggaagaggaaaagcagaaaaaacacagctttcttagtcaaagggagactctgttgacagaagcaaagatgctaaagagagaactggagagagaacgactagtaactacggctttaaggggggaactccagcagttaagtggtagtcagttacatggcaagtcagattctcccaatgtatatactgaaaaaaaggaaatagcaatcttacgggaaagactcactgagctggaacggaagctaaccttcgaacagcagcgttctgatttgtgggaaagattgtatgttgaggcaaaagatcaaaatggaaaacaaggaacagatggaaaaaagaaagggggcagaggaagccacagggctaaaaataagtcaaaggaaacatttttgggttcagttaaggaaacatttgatgccatgaagaattctaccaaggagtttgtaaggcatcataaagagaaaattaagcaggctaaagaagctgtgaaggaaaatctgaaaaaattctcagattcagttaaatccactttcagacactttaaagataccaccaagaatatctttgatgaaaagggtaataaaagatttggtgctacaaaagaagcagctgaaaaaccaagaacagtttttagtgactatttacatccacagtataaggcacctacagaaaaccatcataatagaggccctactatgcaaaatgatggaaggaaagaaaagccagttcactttaaagaattcagaaaaaatacaaattcaaagaaatgcagtcctgggcatgattgtagagaaaattctcattctttcagaaaggcttgttctggtgtatttgattgtgctcaacaagagtccatgagcctttttaacacagtggtgaatcctataaggatggatgaatttagacagataattcaaaggtacatgttaaaagaactggatactttttgtcactggaacgaacttgatcagttcatcaataagtttttcctaaacggtgtctttatacatgatcagaagctcttcactgactttgttaatgatgttaaagattatcttagaaacatgaaggaatatgaagtagataatgatggagtatttgagaagttggatgaatatatatatagacacttctttggtcacactttttcccctccatatggacccagtcggtttacataaaaccgtgtcattacagtagtttgtaacatttgtagattggatagcatttttatgatttgatgagtttcttgtaaggttaccgtttctaagagttgtgctttatggccactgagagaattcagaataaaattgaaagatggagtctaaaaattattagctgttacaaatggaacattttcattataacgtgatcactttgacttgagcaaatggtttatttttatcttaaaatcagttaagatatataaatcctactttggccaagtttgtttcttttcattatagttatatgaaaagatcaccttaagtgaaattatttcctttaatcttttatgtattattcactttt

SEQ ID NO: 186366 - DNA, 958 bp, Homo Sapiens
ttggaatcgtggcagccgcctcggccgccgcaatgcagagagaggagaagcagcttgaggcatcattagatgcactgctgagtcaagtggctgatctgaagaactctctggggagtttcatttgcaagttggagaacgagtatggccggctgacctggccatctgtcctggacagctttgccttgctttctggacagctgaacactctgaacaaggtcttgaagcatgaaaaaacaccgctgttccgtaaccaggtcatcattcctctggtgttgtctccagaccgagatgaagatctcatgcggcagactgaaggacgggtgcctgttttcagccatgaggtagtccctgaccatctgagaaccaagcctgaccctgaagtggaagaacaggagaagcaactgacgacagatgctgcccgcattggtgcagatgcagcccagaagcagatccagagcttgaataaaatgtgttcaaaccttctggagaaaatcagcaaagaggagcgagaatcagagagtggaggtctccggccgaacaagcagacctttaaccctacagacactaatgccttggtggcagctgttgcctttgggaaaggactatctaattggagaccttcaggcagcagtggtcctggccaggcaggccagccaggagctgggacgatccttgcaggaacctcaggattacagcaggtgcagatggcaggagctccaagccagcagcagccaatgctcagtggggtacaaatggctcaggcaggtcaaccagggaaaatgccaagtggaataaaaaccaacatcaagtcggcttccatgcatccctaccagcggtgagtgtggctggcaacctcgactccctggtgctctttgcagagttgggcagtgaaattaccttttgctcaaggctcacctagatgggtacaataaaaagaacatgggctttcagcagcaga

SEQ ID NO: 186367 - DNA, 2246 bp, Homo Sapiens
ttggcgagcctttacgtcggcgcgtaacgagggggtgcgtgtgaggtcatcgcgcgggcgggcgggcggggtctggcggtttgaacgagacgaagacggaaccggagccggttgcgggcagtggacgcggttctgccgagagccgaagatggcagtgaacgtatactcaacgtcagtgaccagtgataacctaagtcgacatgacatgctggcctggatcaatgagtctctgcagttgaatctgacaaagatcgaacagttgtgctcaggggctgcgtattgtcagtttatggacatgctgttccctggctccattgccttgaagaaagtgaaattccaagctaagctagaacacgagtacatccagaacttcaaaatactacaagcaggttttaagagaatgggtgttgacaaaataattcctgtggacaaattagtaaaaggaaagtttcaggacaattttgaattcgttcagtggttcaagaagtttttcgatgcaaactatgatggaaaagactatgaccctgtggctgccagacaaggtcaagaaactgcagtggctccttcccttgttgctccagctctgaataaaccgaagaaacctctcacttctagcagtgcagctccccagaggcccatctcaacacagagaaccgctgcggctcctaaggctggccctggtgtggtgcgaaagaaccctggtgtgggcaacggagacgacgaggcagctgagttgatgcagcaggtcaacgtattgaaacttactgttgaagacttggagaaagagagggatttctacttcggaaagctacggaacattgaattgatttgccaggagaacgagggggaaaacgaccctgtattgcagaggattgtagacattctgtatgccacagatgaaggctttgtgatacctgatgaagggggcccacaggaggagcaagaagagtattaacagcctggaccagcagagcaacatcggaattcttcactccaaatcatgtgcttaactgtaaaatactcccttttgttatccttagaggactcactggtttcttttcataagcaaaaagtacctcttcttaaagtgcactttgcagacgtttcactccttttccaataagtttgagttaggagcttttaccttgtagcagagcagtattaacatctagttggttcacctggaaaacagagaggctgaccgtggggctcaccatgcggatgcgggtcacactgaatgctggagagatgttatgtaatatgctgaggtggcgacctcagtggagaaatgtaaagactgaattgaattttaagctaatgtgaaatcagagaatgttgtaataagtaaatgccttaagagtatttaaaatatgcttccacatttcaaaatataaaatgtaacatgacaagagattttgcgtttgacattgtgtctgggaaggaagggccagaccttggaacctttggaacctgctgtcaacaggtcttacagggctgcttgaaccctcataggcctaggctttggtctaaaaggaacatttaaaaagttgccctgtaaagttatttggtgtcattgaccaattgcatcccagctaaaaagcaagaggcatcgttgcctggataatagaggatgtgtttcagccctgagatgttacagttgaagagcttggttttcattgagcatttctctatttttccagttatccccgaaatttctatgtattatattttttggggaagtgaggtgtgcccagttttttaatctaacaactacttttggggacttgcccacatctctgggatttgaatggggattgtatcccattttactgtcttttaggtttacatttaccacgtttctcttctctgctccccttgcccactggggactcctctttggctccttgaagtttgctgcttatagttggaagtgcagcaggcaggtgatcatgctgcaagttctttctggacctctggcaaagggagtggtcagtgaaggccatcgttaccttgggatctgccaggctggggtgttttcggtatctgctgttcacagctctccactgtaatccgaatactttgccagtgcactaatctctttgggagataaatttcattagtgtgttactaaatgttaatttttcttttgcggaaatacagtaccgtgtctgaaattaattattaatatttaaaattacttcattccttaactctcccttcattttgctttgccccacagccctatt

SEQ ID NO: 186368 - DNA, 1148 bp, Homo Sapiens
ctttgtacaaaaaagttggctcatctgtccatccaaagagtgggacatttgcatggactgggggcttaaaggacttagaagagacctgtaagtaaatcctgaaaatgagccaatccccacttgaatggttactggagtaaacccacctttaccaccccaattacagcacccgaggccgataaaccaacttggctctggttcatttttcttttcttcatttgtgatgctcagattcaaaatgtgtgttctacactgttacaggcttctcttttgtttgattaaagattttagtcctacttttgtatggacacattagaatattcagagaccaaaatagaagaatttgctgttagatatttttcagaagtcagcagatttgtggcaaatcatttatttgcctttttaaaaattcatttaagcagttcagagagtagactactcagaaaattatttcacgtaattgtctaagaggtcaatattttttaatgcatattgaatcaaataaagtgctctaaagaaattattatacaaattcctttgggttgtttttcttttcttaacaaggggtgggggtaaacaggaatatgattcaggctttctggttgtgtatttaaagagtattgattttattattactattgatttactttattcctggcttccttttcacttttctttcaatttttaaaaaataatttaagccgttgaaaatataccaaactgttgaaacattttactcaaattttaaattcctaaaaatgttttttaataagagggcgaaaattatttaaaaatacttatgcctatgccaatttccctcttttttcacaaaatccatgatttcagtttgtaagtagacatatatctaagggcacatttttggaaagtgaggaatagcagcagtataacttcattttgtcaggcctttgagttctaatattttgtattgctcttcaaatggatccttttaaaaaaaattgtagataatgagtcataaatagattctgccaactgaggggagaaacattttaagtaaatatttttcagtatttggggccttaaaaaataattgtgtttccttaaaattacatgttagatagagttttaggtttttttggttttaagattggttaaagcaatttaaagcc

SEQ ID NO: 186369 - DNA, 1483 bp, Homo Sapiens
  misc_feature (1213)..(1252): n is a, c, g, or t
ctttgtacaaaaaagttggccccttaaaatctataaagatatagcgtgcctgaataattttggggttattgtcatttctttatggcactattgtgatctataaaataaatttgttacgtcagtatatctatatgcatattcacataactgttaaatacacatatggcatacaataaagattaaatgattcttcaagaatttgtcatcgttttgttttagttgagcagtcctgagagtagcttgacaccacctctctcaaccaacctgcatctagaaagtgaattggatgcattggcaagcctggaaaaccatgtgaaaactgaacctgcttatatgaatgaaagctgcaaacagtcagggctcagcagccttgttaatggaaagtccccaattcgaagcctcatgcacaggtcggcaaggattggaggagatggcaacaataaagatgatgacccaaatgaagactggtgtgctgtctgccaaaacggaggagatctcttgtgctgcgaaaaatgtccaaaggtctttcatctaacttgtcatgttccaacactacttagctttccaagtggggactggatatgcacattttgtagagatattggaaagccagaagttgaatatgattgtgataatttgcaacatagtaagaaggggaaaactgcgcaggggttaagccccgtggaccaaaggaaatgtgaacgtcttctgctttacctctattgccatgaattaagtattgaattccaggagcctgttcctgcttcgataccaaactactataaaattataaagaaaccaatggatttatccaccgtgaaaaagaagcttcagaaaaaacattcccaacactaccaaatcccggatgactttgtggccgatgtccgtttgatcttcaagaactgtgaaaggtttaatgaaatgatgaaagttgttcaagtttatgcagacacacaagagattaatttgaaggctgattcagaagtagctcaggcagggaaagcagttgcattgtactttgaagataaactcacagagatctactcagacaggaccttcgcacctttgccagagtttgagcaggaagaggatgatggtgaggtaactgaggactctgatgaagactttatacagccccgcagaaaacgcctaaagtcagatgagagaccagtacatataaagtaaaatgacatggatttaaatcaattgtttnnnnnnnnnnnnnnnnnnnnnnnnnnnnnnnnnnnnnnnncccagaaaacttttaagtgttgctggaatatcctgcctacagtgggcacctccttgaagaagctgatagcttttacacagtattagattgaaataatggacagaaacacattcttgtcaagaaagggggagagaagtctgtttgcaagtttcaaagcaaaaagcaaaagtgaaatgatttgaggatttctgttctaatggagatgattctctgattgttagaaatggcaaa

SEQ ID NO: 186370 - DNA, 2224 bp, Homo Sapiens
  misc_feature (165)..(213): n is a, c, g, or t
ttgggaccttcgcacctttgccagagtttgagcaggaagaggatgatggtgaggtaactgaggactctgatgaagactttatacagccccgcagaaaacgcctaaagtcagatgagagaccagtacatataaagtaaaatgacatggatttaaatcaattgtttnnnnnnnnnnnnnnnnnnnnnnnnnnnnnnnnnnnnnnnnnnnnnnnnncttttaagtgttgctggaatatcctgcctacagtgggcacctccttgaaaaagctgatagcttttacacagtattaaattgaaataatggacagaaacacattcttgtcaagaaagggggaaagaagtctgtttgcaagtttcaaagcaaaaagcaaaagtgaaatgatttgaggatttctgttctaatggagatgattctctgattgttaaaaatggcaaatattgatgattgtgtgctattgattggtgcaggatacttggtatacaagtaaatacttgaaactcgtgtcacttgataaattttctttttggactaggtcgcacagttattaaaacaacttttaaccctcccccttcacacacatacatatcaggttgttttctagttaaaaacccaagtagctcagattctactttaatgtcagtgcagatttgcattgaatcatgccattatgttttttctcatttttatgctgttgggtcttagtttttaaattgatataaagaactcagcaatggttttattttctactcatacttagggtttaggaaacactaccactagttatcatttaatcaacttcaatggtctactgaaacaaaaatggtaacttttcattagtggattatttagagttatagtagttgtttccagaaaacacttcctcacaattgtacttcccaatcaaatcatgtgatcatacagttattcccatgaaaggcagaatgtttgtttcaaaattaatctagttttctgtacatttaaatttgagaaggtgacaactggctcttttccagtcttccttcatgtcagttttctgatagaccactattggcaaacagtatctgtcaactaccaaatgtgtaaaattttctgtatttcactttgtcttatttgtaaatagtgaactaaaacttttggcagatcagcaacatttgctgagcctgttttttaagctaatgtgtattcttactaatgttcctatcaagaatggatttgtaatatatgctgtctatttctaatgttcacattcatattttgaggttctatcttattttaatagagaacagacttctcaaaaaatcttcagaagcagcttattattgaaatatcgaaatattgaaataaacccggtggggttagattactcatctgtccaccaagtgggacatttgcatggactgggggcttaaaggacttagaagagacctgtaagtaaatcctgaaaatgagccaatccccacttgaatggttactggagtaaacccacctttaccaccccaattacagcacccgaggccgataaaccaacttggctctggttcatttttcttttcttcatttgtgatgctcagattcaaaatgtgtgttctacactgttacaggcttctcttttgtttgattaaagattttagtcctacttttgtatggacacattagaatattcagagaccaaaatagaagaatttgctgttagatatttttcagaagtcagcagatttgtggcaaatcatttatttgcctttttaaaaattcatttaagcagttcagagagtagactactcagaaaattatttcacgtaattgtctaagaggtcaatattttttaatgcatattgaatcaaataaagtgctctaaagaaattattatacaaattcctttgggttgtttttcttttcttaacaaggggtgggggtaaacaggaatatgattcaggctttctggttgtgtatttaaagagtattgattttattattactattgatttactttattcctggcttccttttcacttttctttcaatttttaaaaaataatttaagccgttgaaaatataccaaactgttgaaacattttactcaaattttaaattcctaaaaatgttttttaataagagggcgaaaattatttaaaaatacttatgcctatgccaatttcccttttttttcacaaaatccatgatttcagtttgtaagtagacatatatctaaggcacatttttggaa

SEQ ID NO: 186371 - DNA, 1238 bp, Homo Sapiens
taaaagccaactttgtacaaaaaagttggctttgatttgcactagcactacgatagtgttagatggggaaatactgcaacatgtccagttggccagatcactttccaagggagcgatactaaggcagactcagctttttaaagatgggaggtcaggaggtggaagtgagaggagatcccatctcacacaacacacttccacgtaatgcagaccacacttttccattttgtcctgccctcttgagaggtcatttctcacgtcctaagaacctgatcagaaattttggaagggttctttgaaatagcagcagttgaaacagagacactttgccacagtgtggagcagattttctcactggtatcacatggtcttgcagttttgaactcttcgaccgatttgtgggagtttatgtaattgcatgcaatgaacctgaaattgtgtaaaggacaaaagaccagtttatagggttgggttttttttccaacttgtgaaaagcagtttagctgcatctgtctccccaccacccccaccccgggaggggcttatgttacaaggtgatcaagtgaaggaaaaacctgagcctatctggctgggatggtggaattaagcacaaggtcacattctctgtgatcacatgagagggaaggtgatgacttaaatggcagggggtggggattatcttggggagaggctgaaaagcacaaaagatagtcttccctgtacgtattggtgaagaacgtgcacaaggctggatggacttcaacttggagttgagttgaggcaagaggatttctggatattagtcacccatctgcaagaaaaatgctgaggcctcgggtcaagattttgatctgagacatgctgatgcttcaaggagaaatattttcacaatcctctcttccctcaccagaagagaacagtactctctcctagaaacctctaggtaaacacattttatcctaatatcggtagcatataatgccccccccaaaatatctgttttccatgcaaaaaagtctcaacaagaagtctgtggagttgagtggttacttcaaagtgtcaggagagtgaagaaattggccacagaagagcaagaagctctcttaagaaaagggaattctctttaaagaaaccaccaccaacaacaaaacaaccaaaaaccatgttttatgtcaaagctctgtagcacagagaatgtggtgtcacagatacatcgccgagagaggtttctttctttc

SEQ ID NO: 186372 - DNA, 1026 bp, Homo Sapiens
  misc_feature (114)..(448): n is a, c, g, or t
  misc_feature (523)..(818): n is a, c, g, or t
ctttgtacaaaaaagttggtcctaaaattcattatttcatttgaaacacaaattcagtaggacgtaatgcatgaaataatttaatttttgacatgtacatcgaatcataatttnnnnnnnnnnnnnnnnnnnnnnnnnnnnnnnnnnnnnnnnnnnnnnnnnnnnnnnnnnnnnnnnnnnnnnnnnnnnnnnnnnnnnnnnnnnnnnnnnnnnnnnnnnnnnnnnnnnnnnnnnnnnnnnnnnnnnnnnnnnnnnnnnnnnnnnnnnnnnnnnnnnnnnnnnnnnnnnnnnnnnnnnnnnnnnnnnnnnnnnnnnnnnnnnnnnnnnnnnnnnnnnnnnnnnnnnnnnnnnnnnnnnnnnnnnnnnnnnnnnnnnnnnnnnnnnnnnnnnnnnnnnnnnnnnnnnnnnnnnnnnnnnnnnnnnnnnnnnnnnnnnnnnnnnnnnnnnnccaggtcagtacctggagaatttgaatgatagagaatgatagagtaataccctaattattagttaaaacctacannnnnnnnnnnnnnnnnnnnnnnnnnnnnnnnnnnnnnnnnnnnnnnnnnnnnnnnnnnnnnnnnnnnnnnnnnnnnnnnnnnnnnnnnnnnnnnnnnnnnnnnnnnnnnnnnnnnnnnnnnnnnnnnnnnnnnnnnnnnnnnnnnnnnnnnnnnnnnnnnnnnnnnnnnnnnnnnnnnnnnnnnnnnnnnnnnnnnnnnnnnnnnnnnnnnnnnnnnnnnnnnnnnnnnnnnnnnnnnnnnnnnnnnnnnnnnnnnnnnnnnnnnnnnnnnnnnnnnnnnnnnnnnnnnnnnnnncctacagctgttcaaggaccagctgacaggtcaagtgtggccttttctggtctttgaacacatcatagaaagtgacaaatgctgcaaagccatgaagaacatgaactataaacgggtagactaactgcccagcttatacacttatctatgcacaaaaacagctgaatttgtcacatttatatattgcaatatgggaaagtattgagat

SEQ ID NO: 186373 - DNA, 1186 bp, Homo Sapiens
tccccgactttgcagatttctcttcccccaggcctccctcctccacctctccgccccctccgggcttggctctcccaggaggctacgactggagccactggtcccgcaggatccccgcgtcctcggtcgccgcgtccacgtccctctcgcgtccccgcccggcgccacgccgcctcctctgggttcggcctccgcgcggtgcagcgcagtctcaggccgcgggacaagcccgacttaaatctctgcaatggctaacgaagcttatccttgtccgtgtgacattggccacagacttgagtatggagggctaggccgtgaagttcaagtcgagcacatcaaggcttatgtcaccaaatcccccgttgatgcaggcaaagctgtgattgtcattcaagatatatttggctggcagttgcccaataccagatatatagctgacatgatctcaggaaatggatacacaaccattgttccagacttctttgtagggcaagagccttgggacccctctggcgactggtctatcttccctgagtggctgaaaacaagaaatgcccagaagatcgatagagagatcagtgctatcttgaagtatctgaaacaacagtgtcatgcccagaaaattggcatcgtgggattctgctggggtggaactgctgtccatcatttgatgatgaaatactcagaattcagggcaggggtgtccgtctatggcatcgtcaaggattctgaagacatttacaatttaaagaaccccactttgttcatttttgctgaaaatgatgttgtgattccactcaaggacgtatctttgctgactcagaagttgaaagaacactgcaaagttgaatatcaaattaaaacattttctgggcagactcatgggttcgtgcatcggaagagagaagattgctcacctgcagacaagccctacattgacgaggccagaaggaattcaattgagtggctgagcaagtacatgtagcaagaatcaagggcaagccttcctagaatagctttcatcccaaaatttgcttggaaatagttagatcatttgatttaattttcacttttataaaataagtgtaggaatcctaaaattgattatttcatttgaaacacaaattcagtaggacgtaatgcatgaaataatttaatttttgacatgtacatcgaatcataattt

SEQ ID NO: 186374 - DNA, 1759 bp, Homo Sapiens
  misc_feature (1583)..(1599): n is a, c, g, or t
  misc_feature (1678)..(1690): n is a, c, g, or t
ttggcagctagcgattctacagtaaccaaattggactttgatcttgagcctgaacctcctccagccccaccacgagcttcttctcttggagaaatagatgaatcttctgaattaagagttttggatataccaggacaggattcagagactgtttttgatattcagaatgacagaaatagtatacttccaaaatctcaatctgaatacaagcctgatactcctcagtcaggcctagaatatagtggtattcaagaacttgaggacagaagatctcagcaaaggtttcagtttaatctacaagatttcaggtgttgtgctgtcttgggaagaggacattttggaaaggtgcttttagctgaatataaaaacacaaatgagatgtttgctataaaagccttaaagaaaggagatattgtggctcgagatgaagtagacagcctgatgtgtgaaaaaagaatttttgaaactgtgaatagtgtaaggcatccctttttggtgaacctttttgcatgtttccaaaccaaagagcatgtttgctttgtaatggaatatgctgccggtggggacctaatgatgcacattcatactgatgtcttttctgaaccaagagctgtattttatgctgcttgtgtagttcttgggttgcagtatttacatgaacacaaaattgtttatagagatttgaaattggataacttattgctagatacagagggctttgtgaaaattgctgattttggtctttgcaaagaaggaatgggatatggagatagaacaagcacattttgtggcactcctgaatttcttgccccagaagtattaacagaaacttcttatacaagggctgtagattggtggggccttggcgtgcttatatatgaaatgcttgttggtgagtctccctttcctggtgatgatgaagaggaagtttttgacagtattgtaaatgatgaagtaaggtatccaaggttcttatctacagaagccatttctataatgagaaggctgttaagaagaaatcctgaacggcgccttggggctagcgagaaagatgcagaggatgtaaaaaagcacccatttttccggctaattgattggagcgctctgatggacaaaaaagtaaagccaccatttatacctaccataagaggacgagaagatgttagtaattttgatgatgaatttacctcagaagcacctattctgactccacctcgagaaccaaggatactttcggaagaggagcaggaaatgttcagagattttgactacattgctgattggtgttaagttgctagacactgcgaaaccaagctgactcacaagaagacctcttaaaaatagcaacccttcatttgctctctgtgccaccaatagcttctgagttttttgttgttgttgtttttattgaaacacgtgaagatttgtttaaaagtaccattctaatacttcttcaaaagtggctcctcattgtacttcagcgtaaatatgagcactggaaacagtttcatggagtttaagttgagtgaacatcggccatgaaaatccatcacgaatacttttggatcaatagtctatttttnnnnnnnnnnnnnnnnnccacttttttatagtccctagctttgccatatgcccgccttaagtggaaggaaagttaatcacttaactatgttttatnnnnnnnnnnnnngggcttggaatgctattactgttcacacaaagtatgattctgtttgaataagcaaatgctccttttttt

SEQ ID NO: 186375 - DNA, 932 bp, Homo Sapiens
ttggggattttattccctggattctctggatgctcattgcatgaaaagtggaaaagtttagatctatggaaacagaactgttgcctatatggaaaatcagtgccttgtggcaatacaggtaagaacagtgttgctcttgaaaaagtggacagtgggtggtctgaatgtgtcctggtccctggagtgggtttttagattgatgtggactcttcttagacttgtaagtaaaaaagttgtttcttcccctaaaagggaactgtgcgccttagacctggaattgctgggaaactgaaacattctgtagacttacttgtttccaactgtatcgcagcaagaagtctatgtgccccaggatcctggattacctgaggaagaagagatcaaggaaaaaaaacccaccagtcaaggaaagtcaagtagcaagaaggaaatgtctaaaagagatggcaaggagaaaaaagacagaggagtgacgaggtttcaggaaaatgccagtgaagggaaggcccctgcagaagacgtctttaagaagcccctgcctcctactgtgaagaaggaagagagtccccctccacctaaagtggtaaacccactgatcggcctcttgggtgaatatggaggagacagtgactatgaggaggaagaagaggaggaacagacccctcccccacagccccgcacagcacagccccagaagcgagaggagcaaaccaagaaggagaatgaagaagacaaactcactgactggaataaactggcttgtctgctttgcagaaagcagtttcccaataaagaagttctgatcaaacaccagcagctgtcagacctgcacaagcaaaacctggaaatccaccggaagataaaacagtctgagcaggagctagcctatctgggaaaggagaaacgagagggaagtttaaaggataggaaat

SEQ ID NO: 186376 - DNA, 2065 bp, Homo Sapiens
cacattgaaaaaaagtttatttaaaaaagttctagcagcaagaacagtaacaaaagaaaaggagagacaaacaaaacaagagggaggttgtatcccatggaacttgtctcctttcttaatcgagttctttatatcgagcaaacatgactcttcgaacagcatctcggtaagtctcgttggactgtcttttgctggttcttcctgaggctccaacactggggcccctcatccggccttcagcctcctctgatgaagccaatccaggatggccatatcccaggcctgtccctttcctccagccagtagcctgttggacacagcctcctttgctgctagtgtcgatatcttctttatcaacaagtttacgatcactgtcagtttccctggagtacttaatccgtttcctttctggagagtcaaaagactggagcttttccctgcgatcatttcctcttcctttaaactttccctctcgttctctcctttccagataggctagctcctgctcagactgttttatcttccggtggatttccaggttttgcttgtgcaggtctgacagctgctggtgtttgatcagaacttctttattgggaaactgccttctgcaaagcagacaagccagtttattccagtcagtgagtttgtcttcttcattctccttcttggtttgctcctctcgcttctggggctgtgctgtgcggggctgtgggggaggggtctgttcctcctcttcttcctcctcatagtcactgtctcctccatattcacccaagaggccgatcagtgggtttaccactttaggtggagggggactctcttccttcttcacagtaggaggcaggggcttcttaaagacgtcttctgcaggggccttcccttcactggcattttcctgaaacctcgtcactcctctgtcttttttctccttgccatctcttttagacatttccttcttgctacttgactttccttgactggtgggttttttttccttgatctcttcttcctcaggtaatccaggatcctggggcacatagacttcttgctgggtattggggtcataataagttcctgccaaggggtcataatagtagccagtagcagaatcatatatgtagcagtcagatgatgactgttgtccttgtcgatttgtatctgaagaccagtctgaatttctgccacctcccctcctatctcggaaatattttttaccctgatagtaatgcatgtggtcagaatggtccccagaatcatttcttcgttttccagtggccaggtttacagctaccatcttcccatcaatgctaaatggcggatcaaggttctgtaagatcttcaccacacgaagagcttccgcatgggagtcgaggtcaataaagccataggtatgccccatagggcctgttctgttcttgatgatacggacgttggcagtagtaaggcggacatagggctccagcacttccactatcacctcaggtggtgtggaacgatagatacgctttagcatgatagttttgctctctccatcctggcgtgtctctccagaccatgactccctctctcggtctcttcggaaagttggcccttcccttcgagaaggaggcagatacctttctgcttctctcttttgatgtcataagcgtgactcttggccttcttccctcttcctgggttcaggttccttatcagctggtcttaggggctggttgggctgtttttccaatggtgctggtatggatgttttctgaggctgagggtaggttattaattcttgcttggcctctgtcacttctcttgggttcttgcagaatgaacaggaagatcggtgcccaccaatgtttgccttacatcgtttgcagtaccaaaaatccaggcttgatacatactccagggtaacttctttgtcctggatcattagagttccctggttggcctccatgcatccgatggcatcttccaagagtgaaaactccacgcagacatagccatagtcgtaacctgtgttatactccttcaactgcaagttctttacaggcatgccaacttttttgtacaaagt

SEQ ID NO: 186377 - DNA, 1281 bp, Homo Sapiens
aactttgtacaaaaaagttggtgacaaatgagggatgttagctttgtggcagaattccctgcatgtgtgataactgatcttgttttattttttggcattgcaactgtggcatagttacaatttctgtttgttcatcacatttaaaattggaagagaacgcgcttgatggatagagcgccttcagtgtactgtttcttattaactttactttttttaaatcaacttgctatagactttatatacattttgttaaatatagttcctagtgacatagaaacgatgcgtagttttcatttactaattacaaatgttgaggcctaattctgaaagtcctcatatttaaaggctagacaacgtaatgaaatttttaactatttgtatgtcattttgaaagtgtactgctttatggtaaaagtgtttttcatttgttcattgttttcattatttgtgatcatgttgtctttcaatacaggcataaaccttccactcttgaacaaagcagctgctttttaaaagcggtaattgcttctttaccttttatttcttttgtaaatgaagcttttctttaagaatgtgactttaaagtgttgtctattgcataaaacagttgacactcacttattgtaaagtgaagattgttctactgcatgtgaagtggaccatgcagatttctgtatgttctcagtatgcatcactagataataaagtcttttgtgaacaaggcatttgtagccatttttaaaagtttttgtcttcagtgctggtaagtcaggtaaaccataaatagttaaaagcaaccttttgtttttttcctgaaagtttttaattgaaagtattattagttaaagatgtaaacctagccaaaattaccagtttattaataattaggatcctaattatttcaaaaaatcctacaaatattgtcagctttcagtgtagtgagattattcctgtaggttatggggtataattcaggatttaactaatgtttctgctattttctcacttttccttttgatggtgcggaaagagaaaaaggaaaacggggcacaggccattcgacgccttctccaaggggtctgatttgctgagacaccagcttcaccttcttaacaaggcacctaattacaacaagcatgcacattttggtgcattcaagaatggaaaatcagaatagcagcattgattcttctggtgcagctcagtggaagatgatgacaaccagaagacatgagctaaagtttctgtcctataaaagatttattaaaaaacaatccttca

SEQ ID NO: 186378 - DNA, 2072 bp, Homo Sapiens
ttggcacttttccttttgatggtgcggaaagagaaaaaggaaaacggggcacaggccattcgacgccttctccaaggggtctgatttgctgagacaccagcttcaccttcttaacaaggcacctaattacaacaagcatgcacattttggtgcattcaagaatggaaaatcagaatagcagcattgattcttctggtgggttttgctccatttaaagacatgaaatgaactacagccaggaaggtgatagatgatataataagccacctctgaacctacaccccgtctcttcacggtttagacttactaaaataaatacaaggtgattttcatcttcaggtagagtgaagccttttaattaaggcgtcacaggtgcagctattctaccttaatgaaatgggtagtgattttcccaccattatttatttcggtgataatatgctgcatattcaagtctcttgtagttattttcacccaaagtagttgacaatttgatgcttctggtgatgtttatggcttcattttatgtaattttttaagtaagttccactagaaacagttcatcttataccttcaaaactgttacctgttctttaaaaaacaaagttgcttgttacttgttctttgtgttttaggtgcagctcagtggaagatgatgacaaccagaagacatgagctaaggtttctgtcctataaaagatttattaaaaaacaatccttcatttattttttgtctaattttttagttttcagcattatgatttgggttttattggtgtttggtatttagaattagtgctgttgtggagtgcgtctgtaaagtgcttgttttatcatacttcctgcctctcccctcccccagtttctcctcccctaaaataaaaatagtggtcaactttagtaatataaaaggctgctggatgctgagattccacataacacatggttgtcaaaattggatgttaaggattcttagaaaaacagcaaccaccagaatagcatatatctaaaagtagtcttcagctttaggcagatgcaaaagaatacaaactggaatattaagaatactgttcaactcctttagtatctgttccccaacttaccctgtagaaacctcgttattaaccagtgttccagtcttaaagtagacaaaatattcagagccattttttttaagggaaatgaaaaagatactctgggttttttatactccccaatttagcatatctagactacctatttgaaaggaaccctatcaactgtcttatgtacgttacatgattttcctacactctgtaattttgctgaggtgcaatttggaactctgcaagacctactagattgaatttatttagtgaatgctcctgaataaatgtgcattcctcttttagagtagctgtatgcttttcaaatgctatctgccgtgaattttttgcttttattatactttatggcaaaagtgatatcaagtgattgtcagacttgagggctcatagaagtgttaggtacggctctcaaagatgttacagttttttctagggttgggagaatagttgagatctggaaagcatagacattttttacactctggatagactttattcttgaagatcatcagaaatgaggttggaatttcgaggttttgagcagggggagcatcttatattcacccttaaatcgttattaatacatcctgttttcttcattccctgatagctatctcatttcactctactgtctcaaaattttgttttaaaataatagaaatgttttgccattattaagtaccactttattcctaacaaaaataagtactcaggacttttttttcaaatgaaatatttatgtactgttttatggtatgtggtagagtaagtaaaatgtaatgttctcagttttgttccatatttgcattcctcttatgctttacctgtattttatcatttgtaagcagaactctagctatatggggtagaaataaaatctctgagatgaaacaaaggattcaacatgataaaatttaggcgaagtagttaagaatggccctttggaatgtgaagataggaaagaaa

SEQ ID NO: 186379 - DNA, 1584 bp, Homo Sapiens
ttggctaatgacagttgaacagaataatggttcatctcagaagaagttgttggcacctgatatgtttacagaatctgatgatatgtttgctgcgtattttgatagtgctcgtcttcgggccgctggcattggaaaagatttcaaagagaatcccaacctcagagataactggaccgatgcagaaggctattatcgtgtgaacataggtgaagtcctagataaacgttacaatgtgtatggctacactgggcaaggtgtattcagtaatgttgtacgagccagagataatgcaagagccaaccaagaagtggctgtaaagatcatcagaaacaatgagctcatgcaaaagactggtttaaaagaattagagttcttgaaaaaacttaatgatgctgatcctgatgacaaatttcattgtctgagactcttcaggcacttctatcacaagcagcatctttgtctggtattcgagcctctcagcatgaacttacgagaggtgttaaaaaaatatggtaaagatgttggtcttcatattaaagctgtaagatcctatagtcagcagttgttcctggcattgaaactccttaaaagatgcaatatcctacatgcagatatcaagccagacaatatcctggttaatgaatccaaaactattttaaagctttgcgattttgggtcggcttcacatgttgcggataatgacataacaccttatcttgtcagtagattttatcgtgctcctgaaatcattataggtaaaagctatgactatggtatagatatgtggtctgtaggttgcaccttatacgaactctatactggaaaaattttattccctggcaaaaccaataaccatatgctgaagcttgcaatggatctcaaaggaaagatgccaaataagatgattcgaaaaggtgtgttcaaagatcagcattttgatcaaaatctcaacttcatgtacatagaagttgataaagtaacagagagggagaaagttactgttatgagcaccattaatccaactaaggacctgttggctgacttgattgggtgccagagacttcctgaagaccaacgtaagaaagtacaccagctaaaggacttgttggaccagattctgatgttggacccagctaaacgaattagcatcaaccaggccctacagcacgccttcatccaggaaaaaatttaaacaagatgaagaaactccaagggtttgagtaaatacaaagactgaagaaatttcacagcagtttattaatgtatataaacttataaatatttctccagcaaatttgaggaagcatgatatatttgaattaacaccaagggtgatatttcttttagagatgttagttaatctgttttgtgtcttacgtgaaatttcactgtagactgttttaaattgccaagactgcacaaaattacagtgctaatgtatatggttgcagttcacataaagacaaaagcatctgttatgaaatgagtagtaatattgggtggttgatttgttcttagcagacttggcttcattttggtcttgagataaaatggccagcataaatgctgtttatattcacgttt

SEQ ID NO: 186380 - DNA, 1029 bp, Homo Sapiens
aactttgtacaaaaaagttggatttgaggaagcatgatatatttgaattaacaccaagggtgatatttcttttagagatgttagttaatctgttttgtgtcttacgtgaaatttcactgtagactgttttaaattgccaagactgcacaaaattacagtgctaatgtatatggttgcagttcacataaagacaaaagcatctgttatgaaatgagtagtaatattgggtggttgatttgttcttagcagacttggcttcattttggtcttgagataaaatggccagcataaatgctgtttatattcacgttttcctaggtgtgtgtgtgcaggccacagcagcatgcccttggtgtagtcagtgccgaaaggggtctgttccttcttgagcctgcctgcagggatggtctccttttaaagcaggttgtgtgcagcattcagtacactgaaggtaagctaaaccatcaacatctctggtgttttaagatgttattttattggaacaactgacaaatgagggatgttagctttgtggcagaattccctgcatgtgtgataactgatcttgttttattttttggcattgcaactgtggcatagttacaatttctgtttgttcatcacatttaaaattggaagagaacgcgcttgatggatagagcgccttcagtgtactgtttcttattaactttactttttttaaatcaacttgctatagactttatatacattttgttaaatatagttcctagtgacatagaaacgatgcgtagttttcatttactaattacaaatgttgaggcctaattctgaaagtcctcatatttaaaggctagacaacgtaatgaaatttttaactatttgtatgtcattttgaaagtgtactgctttatggtaaaagtgtttttcatttgttcaatgttttcattatttgtgatcatgttgtctttcaatacaaggcataaaaccttccactcttgaacaaaggcagcctgcttttttaaaagcggtaatggcttctttaccttt

SEQ ID NO: 186381 - DNA, 1258 bp, Homo Sapiens
gaccaaagatgatccttggcccatcttcctcccagaggcacaacagtaacatgttcctctgtcagcctgtgaaggcatgcagggttctgaagccacagactcagtctccccaagtcagcaatctctttctctctctctcctcaaacttcatcgcattcatagaagctgcttgcagggtcgccgggctaaccagggtgatcggcgaactttaccgtacagtacctcagtctagctgtcagatcaccccttttgctgtagcctctgttgaggtttttatatttgtgatcattggtaattcagtgtcctatgaagtgggcacagctccccacagagagcaagttgtcagcaggtctctgtgcactggtattggggcagggcagtgccctgggggtaagctaggtggctcagggagtggcagaagggccatttttccctctgccaaaaagacttccttggatttgtagatgttgacccagagtcctctgtcccctcctgaagaggattttcttactggtttctactgaaggggaggtaggggaggaggaaaaaaggaccatgtgtgatgctgttagacaagacactgacgctgattatggagggtctcctgcaggcccttgtgggctccttggcaaggccccaggctgggaaggagctccccccactgcccatcctgcccgctttgtggcgggtagagtcagtgacagggaggcagccctccttttgtgtatatagagtgagctgatttgggctcaggaaaacctagtcgcttgttgctctcgtctgtgacatttttgtacactggtttgctactcatggcaagaaacagacaaagccccatgaaaaataaaacaaaacaaaagtcatttcaaacaaagctgttgttttgaaaactcttgctttcttttggtgtccattttgtgttctattttaaagaatctttcatttatattggtgttattgtagtgaagagaatgtgataggctgatctgtaatggtttctgtcaggagcttagcaaatgcctctgcccctcttcccctacccctgtccttcctcagttcccagctgggattgctatgcactgggcagacccgtcactgtctcccctgaaacccccacacagtggctttcctttagaacagtctttgtactctccctaaacagccagcagcttaggatttttgtcaggctggttcttgcgtgctctgtgcccccacaagtttgcctcacctcttggggcattttgtaatgtgttttctc

SEQ ID NO: 186382 - DNA, 1280 bp, Homo Sapiens
ttggcaaggagagctgcaacctgtttgtgctgaaggacacactaaagaagatgcagaagttctttggactgccccagacaggtgatcttgaccagaataccatcgagaccatgcggaagccacgctgcggcaacccagatgtggccaactacaacttcttccctcgcaagcccaagtgggacaagaaccagatcacatacaggatcattggctacacacctgatctggacccagagacagtggatgatgcctttgctcgtgccttccaagtctggagcgatgtgaccccactgcggttttctcgaatccatgatggagaggcagacatcatgatcaactttggccgctgggagcatggcgatggatacccctttgacggtaaggacggactcctggctcatgccttcgccccaggcactggtgttgggggagactcccattttgatgacgatgagctatggaccttgggagaaggccaagtggtccgtgtgaagtatggcaacgccgatggggagtactgcaagttccccttcttgttcaatggcaaggagtacaacagctgcactgataccggccgcagcgatggcttcctctggtgctccaccacctacaactttgagaaggatggcaagtacggcttctgtccccatgaagccctgttcaccatgggcggcaacgctgaaggacagccctgcaagtttccattccgcttccagggcacatcctatgacagctgcaccactgagggccgcacggatggctaccgctggtgcggcaccactgaggactacgaccgcgacaagaagtatggcttctgccctgagaccgccatgtccactgttggtgggaactcagaaggtgccccctgtgtcttccccttcactttcctgggcaacaaatatgagagctgcaccagcgccggccgcagtgacggaaagatgtggtgtgcgaccacagccaactacgatgacgaccgcaagtggggcttctgccctgaccaagggtacagcctgttcctcgtggcagcccacgagtttggccacgccatggggctggagcactcccaagaccctggggccctgatggcacccatttacacctacaccaagaacttccgtctgtcccaggatgacatcaagggcattcagagctctatggggcctctcctgacattgaccttggcaccggccccacccccacactgggccctgtcactcctgagatctgcaaacaggacattgtatttgatggcatcgctcagatccgtggtgagatcttct

SEQ ID NO: 186383 - DNA, 1851 bp, Homo Sapiens
gagcaatgctttttcattaaaagccaactttgtacaaaaaagttggctgcaagttccccttcttgttcaatggcaaggagtacaacagctgcactgataccggccgcagcgatggcttcctctggtgctccaccacctacaactttgagaaggatggcaagtacggcttctgtccccatgaagccctgttcaccatgggcggcaacgctgaaggacagccctgcaagtttccattccgcttccagggcacatcctatgacagctgcaccactgagggccgcacggatggctaccgctggtgcggcaccactgaggactacgaccgcgacaagaagtatggcttctgccctgagaccgccatgtccactgttggtgggaactcagaaggtgccccctgtgtcttccccttcactttcctgggcaacaaatatgagagctgcaccagcgccggccgcagtgacggaaagatgtggtgtgcgaccacagccaactacgatgacgaccgcaagtggggcttctgccctgaccaagggtacagcctgttcctcgtggcagcccacgagtttggccacgccatggggctggagcactcccaagaccctggggccctgatggcacccatttacacctacaccaagaacttccgtctgtcccaggatgacatcaagggcattcaggagctctatggggcctctcctgacattgaccttggcaccggccccacccccacactgggccctgtcactcctgagatctgcaaacaggacattgtatttgatggcatcgctcagatccgtggtgagatcttcttcttcaaggaccggttcatttggcggactgtgacgccacgtgacaagcccatggggcccctgctggtggccacattctggcctgagctcccggaaaagattgatgcggtatacgaggccccacaggaggagaaggctgtgttctttgcagggaatgaatactggatctactcagccagcaccctggagcgagggtaccccaagccactgaccagcctgggactgccccctgatgtccagcgagtggatgccgcctttaactggagcaaaaacaagaagacatacatctttgctggagacaaattctggagatacaatgaggtgaagaagaaaatggatcctggctttcccaagctcatcgcagatgcctggaatgccatccccgataacctggatgccgtcgtggacctgcagggcggcggtcacagctacttcttcaagggtgcctattacctgaagctggagaaccaaagtctgaagagcgtgaagtttggaagcatcaaatccgactggctaggctgctgagctggccctggctcccacaggcccttcctctccactgccttcgatacaccgggcctggagaactagagaaggacccggaggggcctggcagccgtgccttcagctctacagctaatcagcattctcactcctacctggtaatttaagattccagagagtggctcctcccggtgcccaagaatagatgctgactgtactcctcccaggcgccccttccccctccaatcccaccaaccctcagagccacccctaaagagatactttgatattttcaacgcagccctgctttgggctgccctggtgctgccacacttcaggctcttctcctttcacaaccttctgtggctcacagaacccttggagccaatggagactgtctcaagagggcactggtggcccgacagcctggcacagggcagtgggacagggcatggccaggtggccactccagacccctggcttttcactgctggctgccttaaacctttcttacattagcagtttgctttgtatgcac

SEQ ID NO: 186384 - DNA, 927 bp, Homo Sapiens
  misc_feature (527)..(542): n is a, c, g, or t
ttgggttaaagttgtattaagtttcaatacaaaacattccaaaaagtgaaaagtgatctataatacccaagttctatgttcaactaccacttaaacaaggaaaacattttctaatatcattctgttttacaaccagtataaacccagaagaatcaagatctgattccttttccacacatctgctaggtcagtaaactatcaaacaggtatctggtcattttaacatactccttatattcctatttggtacaatctctatatcctatactatcttcaagatatctaaatatcttaaatatttagggtatctcaagagccagaaggtcctcacagaagcgttaacccaagtaatcgtaagagtatagaaagattgggctaagacaactatggagtgcaaaaaccacataaatttggtcattacccttgtggtctgtgattagtagtaggttgtcaaatgagagttaaaaatgttgtattatccctagttgcaaatgttccaaataagacagtgccataactacacgacnnnnnnnnnnnnnnnntcatataagttgggttagttcctctaatccaacaactcaagtctgtttcctttgagaacattatactattggctctagtctccaaaccaataaaaaactaaaacttgtttccaagactgggaggtaaagtaggcttataaaacaatacagcaaaagaaagccaagtggcctaattgtttccagtgtgcttgccatcttagcatggttactttccagatgtcactcataagttttattctacaactaaactgtttgtggataagccaccaccaaaaaatgtttcacttactgacagacactttcactagatacagctaccacttatattccatcatttttataattcaacttaagttctaaattgaagagttgtccccatgacttt

SEQ ID NO: 186385 - DNA, 1050 bp, Homo Sapiens
ttgggaaggcggtggtggcgggtggaggttcgagcgctgttctcgctccggagccgctgcacatttcggaatcttctgcggcttgtccatagtgtgaataaaaactaaatcacatctataattctactgaactggtcatacagacgctgccatatatgtcacagtacactgaaaaggagccagcagcaatggaccaagaatctggtaaggctgtctggcccaaaccagcaggagggtatcagacaattacaggcaggagatatggaagaagacatgcttatgtcagttttaaaccatgtatgaccagacatgaaagaagcttaggtcgggctggtgatgactatgaagtgttggaactagatgatgttccaaaggaaaattcctcaggttccagtcctttggatcaagttgattcttctttacccagtgaacctatatttgaaaaaagtgaaacagaaattcccacttgtggttcagcattgaatcaaaccactgagagcagtcaatcctttgttgcagtacatcacagtgaggaaggcagggataccttaggaagcagtacaaatcttcataatcactctgagggagagtatattccaggagcttgtagtgcttcaagtgtccaaaatggaattgcattggttcatacagactcttatgatccagatggcaaacatggagaagataatgaccatcttcaactttctgcagaagtcgtggaaggtagtagataccaggaatcattaggcaatacagtatttgagttggaaaacagagaggcagaggcatacactggtctttcaccaccagttccctcatttaactgtgaagtaagagatgagtttgaagagttagattctgtaccattagtgaaaagttctgctggtgatactgagtttgtccatcagaatagccaggaaattcagaggtcttctcaagatgaaatggttagtacgaaacaacaaaataatactagccaggaaagacagacagaacattcacctgaagatgcagcctgtggtccagggcatatttgtagtgaacgaaata

SEQ ID NO: 186386 - DNA, 3320 bp, Homo Sapiens
ctttctgcaaaccctctttcccctctgagtgccaagagacgggctctgtcccggtcagccctttttgtcccaccagcccgtggccaggcccgtctccgtggggctttccaggaggcgcctccctgccgcggtgccagagccagacttggaggaggagccagtgcctgacctgctgggcagcatcctgtcgggccagagcctcctgatgctgggcagcagtgatgtcatcatccaccgcgacggctccctcagcgccaagagggcggctccagtttcttttcagcgaaactcttttttgtctgtccagaggggaagaaggattcaagggctgcctgcagccccgagcactgccctccgggagcccggcccaaggcccgtcaggaaacaggccacagagcacagggctcagctgtcaaggcaggtcccgcacccccgcccgcaccgcgggggcgcctgtgaggctggacttgccagcagcccctggggcggttcaggctcggaacttgtcaaatgggagtgtgcctggcttcagacagagccacagcccctggttcaacggcaccaacaagcacaccttgccccttgcctctgccgcgtctaagatctcaagcagagattctaagcccccatgtcgcagtgtggtgccggggcctcccctgaagccagcgcccagaagaacagacatctctgagctacccaggataccaaagatcaggagagatgacggtggtggcagacgggatgcggccccggcccacgggcagagcattgagatccccagtgcctgcatcagccgactgactggcagggagggcaccgggcagccagggcgaggcacacgggcagagagcgaggccagcagcagggtgccccgggagcccggggtgcacacgggcagctcccggcccccagcccccagctcccatggcagtttggccccactgggaccatcaagagggaaaggggtcgggtcgacctttgagagcttccggatcaatattcctggaaacatggcacattccagccagctctccagccctggcttctgtaacacgttccggcctgtggacgataaggagcagaggaaggagaacccctcacccctcttctccatcaagaagacgaagcagctgcggagcgaggtctacgacccatccgaccccaccggctccgactccagcgcccctggcagcagccccgagaggtctggccccggcctcctgccctctgagatcacacgaaccatctccatcaacagcccgaaggcccagacggtgcaggctgtgcgctgcgtcacctcctacacggtggagagcatctttggtacagagcccgaaccccctctcggaccgtcctccgccatgtccaagctccggggtgcagtggctgccgagggggcctctgacacggagcgagaggagcccacagagagccagggcctggctgcccggctgcggaggccatcccccccagagccctgggatgaggaggatggggcgtcttgcagcaccttctttggctctgaggagcggacggtgacctgtgtgactgtcgtggagccggaagccccacccagcccggacgtgctgcaggctgccacccacagagtcgtggagctcaggcccccttcccggtcccgctccacatccagctcccgcagcaggaagaaggccaagaggaagagggtgtccagggagcacggacggacgcgctctgggacgcgctctgaatccagggacaggagctcgaggtcagcgtcaccatcagtgggtgaggagcgccccaggaggcagcggtccaaggccaagagccggcggtcctccagtgaccgctccagcagccgagagcgagctaagaggaagaaagccaaggacaagagcagggagcacaggcggggcccctggggccacagccggaggacgtcccggtcgcggtcggggagccctggcagctcttcctatgagcactatgagagtaggaagaagaagaaaaggagatcagcgtccagacctcggggaagggagtgctcccccaccagcagcctggagaggctctgcaggcacaagcatcagcgggaacgcagccacgagcggccagacaggaaggagagtgtggcgtggccccgagaccggaggaagcggaggtcccggtccccaagctcggagcacagggcacgggagcacaggcggcctcggtcccgtgagaagtggccgcagacccggtcccattccccagagaggaagggggctgtgagggaggcttccccagcgccccttgcacagggggagccagggcgggaagacctccccaccaggttgccagccttgggggaagcacatgtctcgccggaggtggctacggccgacaaggcccccctgcaggctccccctgtcctggagtggcagctgagtgtgagccggacgacctggacctggattatggcgactccgtggaggccggacacgtctttgatgatttctcaagcgacgccgttttcatccagctcgatgacatgagctcgccaccttctcccgaaagcacagactcttccccggagcgagacttcccactgaagcctgcgttgcccccagccagcctggccgtggccgccatccagagggaggtgtcattgatgcacgatgaagacccttcgcagcccccacccctgccagagggcacccaggagccacattggctcaggccggacgcggctgagaaggctgaggcacccagttccccggatgtggcgcctgcggggaaggaagacagcccctctgcgagtgggagggtacaggaggcagcccggcctgaggaggtggtttcgcagacccccctgctgcggtccagagccctggtgaagcgggtcacctggaacctgcaggagtcggagagcagcgcccccgccgaggacagagccccccgggcaccacttcacaggccacagaagccccgagaaggagcctgggacatggaggatgtggcccccacaggggtcaggcaggcgttctccgagctgccctttcccagtcacgtgcttccggaacccgggttcccagacacagacccctctcaggtttacagccccggcctgccgcctgccccggcccagccctcaagcatcccaccctgcgcactggtcagccagcccacggtccagttcatccttcaggggagcctgccgctagtgggctgtggggcagcacagaccctggccccagtgcccgctgccctgaccccagcctcaaagccagccagtcaagccactgcagccagcaactcggaggagaagaccccggcccccaggctaactgcggagaaaa

SEQ ID NO: 186387 - DNA, 2376 bp, Homo Sapiens
aaaataaattcccttgaagattaaaaaagggtttaatttcgattcggggtaggccccagggatatgtaatttaaaagcttcccccactgcttctgaagcagccagcccagcccctggccatggagccagtgtttgagaatctctggcctagaaacataaaaaaagggcgccattagttataaaaatgaatatcgaattctttaacaaaatgtgattttctaaataaaataaacctcaactttattcagctgatgtgcttccaaaacaatgggtgtaaatccaaatttgcaaatcaaacccattcaaattcatcagggcaaagggtgtacagaactccgcagtgaagtctaaaaaatcaagactcctctaacttacttggtcttggagtttggcttttcttacagtggtccccctgaagtaaatgtccatgtaataaagagatctcaagttcctcttgataacccacctgttttaaatcacaataggcacaccaaactcatgtacaaggtcacagaggctggctaccggagtttcttgcatcagctcgacctaagaattcacccccgcctccactagagggtgctccttccctggcctggacccttccctacactgaggcggtggagagagtcacactgttaggccaaggtctatttttcaccaggcactgaaagcagatgtgtgaagagaagtggtcatgtgacaacatgcagtctcaatgcccctgggtgtccagacacactggctgctgtccaccagccgcaggtggtaaagacccaaaaaccacctctgcaatttttattccaaactagaggactggctctgaaggtgcagcatgagggttcatcaaagccaaccactgtcaagtgtggaaagcactggtgcacaccacgaaaagatgtcctatcagtccacgcatgatgggtgcggggacttctgcctcccagagttcaagaacaaatggctcagctgctccctgcagaccttcctccaaagtgtgctgtctggcaggatccttgggtgcctgggggacaggacagccttgccgtcgcagtctcagaatccattttatggattaccaaaagccctgcgctaggtccctggcaccgcagcagtgctgtgtgtaatggaaatgtcaatgtgcctccccagagttagacagatctaggtctaaagatgctgcaaccccccagtccaccctccagtcactgctttaactctggcagggccccaacccattttaggagtcacagattgctccttccttggaaacctggggcccatttggcccggaggggtaggaacaatggagatctcctccaaccgaaagtgtgaaattagcatccaggaaactcagttaatctatgacaattaagaaaacttaccaaaggggagctatgccacagaggtgcctgaaaggaccaacatgactacagagcagcggggaggggaacaagagaggtgaagaggaacacagaaaggaagggaaataagacagaagacagttcaagcaacaagaaactaacagagcaggtagggcaggacaaccaaaggtagggttaatactgagccggtttccagatctgaaggattttgagtgtcattttatgtcttgccatgaagctgctgtgcccagggctggtaggcctgtggtaaatgagaacatacactaaccaggtctttctgagactttcagtgattcatcacattagatggacttcaggacagattggcctttatactaaattccacaatatacctggtattagtacagcctgaatccggggctggtcacagaaggaaaaaggttgtagtccctgaaaacagagtgttacaaggacatacacactacagatgtctccacggtgggatctgcccacactggctgggcaaaatgagggcctggctggcaggtgctaatatatttcagggaagagaagggaaccaaagaattagagatactaaaactagagctgagactgtaattggaaaatcacaaatctttgcctacagctactttctaaggggcaaaggcccacaaagcctgggcgcaggtgccaagccacagtctctgaaccttaaaagccaaccactctattaacaactagaaaaaatcagtgactagggtcaagactgaacactcccgggaaataacactggcctcactttagaaaagagaaacacccagctgtagtgtggaaaatcttacttgttatcggcaatagcactacatcttgtttcccctaggtagctgcttccagggaatggtgacaagtattggcagtcagtcatctacatgtcactgaggcacaggggagggtggccaggagcacgaggatgtgaatcgacctactatccaacttttttgtacaaagt

SEQ ID NO: 186388 - DNA, 1953 bp, Homo Sapiens
ttggcaacaaaacacaaatagcttgactacatctagtgggcaggttcattcttcagatcttcagggaaattatatccagtcgcctgtttctgaagagacacaggcacagaatattcaggtttctacagcacagcctgttgtacagcatctacaacttcaagagtctcagcagccaaccagtcaagcccaaattgtgcaaggtattacaccacagacaatccatggtgtgcaagccagtggtcaaaatatatcacaacaggctttgcaaaatcttcagttgcagctgaatcctggaacctttttaattcaggcacagacagtgaccccttctggacaggtaacttggcaaacgtttcaagtacaaggggtccagaacttgcagaatttgcaaatacagaatactgctgcccaacaaataactttgacgcctgttcaaaccctcacacttggtcaagttgcggcaggtggagccttcacttcaactccagttagtctaagcactggtcagttgccaaatctacaaacagttacagtgaactctatagattctgctggtatacagctacatccaggagagaatgctgacagtcctgcagatattaggatcaaggaagaagaacctgatcctgaagagtggcagctcagtggtgattctaccttgaataccaatgacctaacacacttaagagtacaggtggtagatgaagaaggggaccaacaacatcaagaaggaaaaagacttcggagggtagcttgcacctgtcccaactgtaaagaaggtggtggaagaggtaccaatcttgggaaaaagaagcaacacatttgtcatataccaggatgtggtaaagtctatgggaagacctcacatctgagagctcatctgcgttggcattctggagaacgcccttttgtttgtaactggatgtactgtggtaaaagatttactcgaagtgatgaattacagaggcacagaagaacacatacaggcccagtctgactctgtctgtaatacctgattgcattggagaactctagacacgcataaacatggacagtttttctaaatgtgagacttaagcctgtgatgtaaaataggaagttctacttggaataatataaaggaaccactagaatttacaattattttgaagttacagggattagattttgaatcttaaaatcctttaggtaatttttagaatttttaaattaagattaatgtgaagagaattaagtgagcagcaggtggttcacttgagcaaactgcccattaagtcagattaaaccatttgaatgatagtagagatgttttaagtaatactggatttttacagtaagtttatggtgtactttgaatcgataggtgtccatgcatattttatgaattcgtggagaatgaatgcaatgaagaaagtaagtagtcttgaaaattatttaaataaagttgtagatttttttagtgccccctaggaatatattagtgaactttggaacttttaccaaagttatgtaacctcagtgtagataattttaaatatttctatttttatattttaaaatgttgaatatactctggaaacaacatttgaagatttgctctgatgtcaactttttctggttataaaacctattagtattgtgtataattctcagggtaggtatactctaataggtgttttgtcaattgctttatttttgtaaaggctagagttagtgcatattgaatatatttatgtacaaaataattcctgttgtaacatttagtgggacgcgattatctgtatacctcaaattttaatttaagaaagtatcacttaaagagcatctcattttctatagattgaggcttaattactgaaaagtgactcaaccaaaaagcacataacctttttaaaggagctacacctacccgcagaaagtcagatgccctgtaaaaactttggtctttcaaaa

SEQ ID NO: 186389 - DNA, 1746 bp, Homo Sapiens
  misc_feature (1358)..(1381): n is a, c, g, or t
  misc_feature (1483)..(1534): n is a, c, g, or t
caatgcttttctaaaaaaggcaactttgtacaaaaaagttggaaatttgtttgtccagaatgttcaaaacgctttatgagaagtgaccaccttgccaaacatattaaaacacaccagaataaaaaaggtattcactctagcagtacagtgctggcatctgtggaagctgcgcgagatgatactttgattactgcaggaggaacaacgcttatccttgcaaatattcaacaaggttctgtttcagggataggaactgttaatacttccgccaccagcaatcaagatatccttaccaacactgaaatacctttacagcttgtcacagtttctggaaatgagacaatggagtaaatattacacaaatacttattcattgtggttatttttatacagtagtgagaagaatattgttcctaagttcttagatatctttttattgatgtgcaaaaatttttggattgacagtaacttggttatacatgacactgaaatgccttactttgtatgatattccatagtatattaaaaatggtaaaattgcatgggttttgtaggtacttttggaatctagaagaaatgaaattttaccaagttatataaagagaaaattgaatttaacaatgcgaatggtagtctaaccaaatgcatcaatcctgtgtggtttagtgtaaaaatgagaacatgttggtatttatctattgtaagataaaaaagctggtgggtgaaagaaatcatgttatgataaaaaattttgtaattttcttgatgactggaatttttattatgcataactgacaaatcaagtttccaagcaaatgttacatagtgtaggctttacttagcttatcaatttgtcattttgaagctaattattttaattaggttaactatgtacaatattttaagcattactcttgtaagattttgaaaactacattttaacatggaactctagggatagtcaccttttaaatcctgttgaaaagccatgtttaagatttaatttgccaaaataatgtcttgttaatattctttcaataacgaagttgggcaatataaccaatgtttaaaaaagtttaaaatgtataagttgaggcatttgggtggtaagagaatgttatagtgaattatcccttttcttgactattggaggaccaaaaaaataaggtgtattgcgtcttagcagtgatttttatccaatcttgtttccaaaaaccatgtctcccagggccttaaaagccatcatgtaaattaccagtaaagtgtaacatatgcaaacataacaaaatcacttccatagtgacgatactccaaccatatggatattagtcatagaagaactagaggttttatgatannnnnnnnnnnnnnnnnnnnnnnngtctaggtagtcagtctgcacttaaatatcaatcattttccttttttgcttcttcccttaaaatttatatgtatccagtacatttaattgagaagcgtatgnnnnnnnnnnnnnnnnnnnnnnnnnnnnnnnnnnnnnnnnnnnnnnnnnnnncaattcaaaaatgtacaaaataaagttacattgctggtcttgtaagagctatacagttttcctaaatgtatacctgtaactgcagcagttcacctatttcaaaaatttggaattctgttcatttgttattcttaagaccacctcaaatttaaaggctaccttattgtacgtttaaagtgtattataacagtgtggtagttaataaaacacta

SEQ ID NO: 186390 - DNA, 2373 bp, Homo Sapiens
acaaaaaagttggcgccatattgaataagcgacccggcctcctagggggtcgtcgtggtccagacagtttagcagaacagcctccgcggctccggggagaagcaatatgttaaggatacctgtaagaaaggccttagtaggcctttctaagtctcctaaaggatgtgttcgaacaactgccacagcagcaagcaacttgattgaagtatttgttgatggtcagtctgtcatggtggaaccgggaacgaccgtcctccaagcttgtgagaaggttggcatgcagatccctcgattctgttatcatgaaaggttgtctgttgctggaaactgcaggatgtgccttgttgaaattgagaaagcccctaaggttgtagctgcttgtgccatgccagtaatgaagggttggaatatcctaacaaactcagaaaaatccaaaaaagccagggaaggtgtgatggagttcttattagcaaatcacccattggactgtcctatttgtgaccagggaggtgaatgtgatctgcaggaccagtccatgatgtttggaaatgataggagccgatttttagaggggaagcgtgctgtggaagacaagaacattgggccattggtaaagaccatcatgacaagatgtatacagtgtactcgctgcatcaggtttgcaagtgagattgcaggagtagatgatttgggaacaacaggcagaggaaatgatatgcaagttggcacatacattgaaaagatgttcatgtctgaactgtctgggaatatcattgatatctgccctgtagtgccctaacctctaagccctatgcctttactgcccggccttgggaaacaagaaagacagaatccattgatgtaatggatgcggttggaagtaatattgtggttagcacaagaactggagaagtgatgaggattttgccacgtatgcatgaggacatcaatgaagagtggatctctgataaaaccagatttgcctatgatgggctaaaacgtcaaagacttaccgagccaatggtcagaaatgaaaaagggcttttaacctatacttcttgggaggatgctctctctcgcgtagctggaatgttgcagagttttcaaggcaaagatgtggcagcaattgcaggtggcttggtggatgctgaagccctggtagctctcaaagatttgcttaatagagtggactctgacaccttatgcactgaagaggtcttccccactgcaggagctggcacagatttgcgttccaattatcttcttaatactacaattgctggtgtggaagaggcagatgttgttcttctggttggtacaaacccacgttttgaggcaccactgtttaatgctagaattcgaaagagctggctgcataatgacttaaaagtggcccttataggcagtccagtggacctcacttacacatatgaccacctgggagactcccccaaaattcttcaagacattgcttcgggaagccatccatttagccaggtcctaaaggaagctaaaaaaccaatggtggttttaggcagttctgcactccaaagaaatgatggagcagcaattcttgcagctgtttctagcattgcacaaaagattcggatgactagtggtgttactggtgattggaaagttatgaatatccttcataggattgcaagtcaagtagctgctttggaccttggctataagcctggggtggaagcaattcggaagaaccctcccaaggtgctgtttctcctgggagcagatggaggttgtatcacacgacaggatttgccaaaggattgtttcattatttatcaaggacatcatggtgatgttggggctcccatagctgatgttattctcccaggagctgcttacacagagaagtctgctacatatgtcaacactgagggtagagctcagcagactaaggtagcagtgacacctcctggcttggcaagagaagactggaaaattataagagcactctctgagattgctggaatgactcttccatatgatactctggatcaagtaaggaacagattggaagaagtctctcctaatcttgttcgatatgatgatattgaaggggctaattacttccagcaagcaaatgagctctcaaagctagtgaaccagcagcttcttgctgacccacttgttccacctcagctaactataaaagacttctacatgacagattcaattagcagagcctcacagacaatggccaaatgtgtcaaagctgtcacagagggtgcccaggcagtagaggaaccatccatatgctgaagcttctactaggatcccagttttgccgcagataattaatggacaactgtaatgcagtgatcctttacaggtttatttctttgt

SEQ ID NO: 186391 - DNA, 1005 bp, Homo Sapiens
ttggagcaactactggagcgacctggtgacgtgaggagcgttccatttggccagtggtgggcggttgccacagctggtttagggccccgaccactggggccccttgtcaggaggagacagcctcccggcccggggaggacaagtcgctgccacctttggctgccgacgtgattccctgggacggtccgtttcctgccgtcagctgccggccgagttgggtctccgtggttcaggccggctcccccttcctggtctcccttctcccgctgggccggtttatcgggaggagattgtcttccagggctagcaattggacttttgatgatgtttgacccagcggcaggaatagcaggcaacgtgatttcaaagctgggctcagcctctgtttcttctctcgtgtaatcgcaaaacccattttggagcaggaattccaatcatgtctgtgatggtggtgagaaagaaggtgacacggaaatgggagaaactcccaggcaggaacaccttttgctgtgatggccgcgtcatgatggcccggcaaaagggcattttctacctgacccttttcctcatcctggggacatgtacactcttcttcgcctttgagtgccgctacctggctgttcagctgtctcctgccatccctgtatttgctgccatgctcttccttttctccatggctacactgttgaggaccagcttcagtgaccctggagtgattcctcgggcgctaccagatgaagcagctttcatagaaatggagatagaagctaccaatggtgcggtgccccagggccagcgaccaccgcctcgtatcaagaatttccagataaacaaccagattgtgaaactgaaatactgttacacatgcaagatcttccggcctccccgggcctcccattgcagcatctgtgacaactgtgtggagcgcttcgaccatcactgcccctggggtggggaattgtgttggaaagaggaactaccgctacttctacctcttcatccttt

SEQ ID NO: 186392 - DNA, 1565 bp, Homo Sapiens
  misc_feature (1000)..(1019): n is a, c, g, or t
ccacaacatcccctttttattgatattaatcacagttatgaggtcttgtccatcaaaaagcacaatttgcattatgtaaaactacatacaaagacataaaaataaaacatacatacaccaaccaccacaccagttaatctcaaccaatcaaacctctgaatgtgtcttcaattttgatcatcagtgcttcggaaaaacgtacataaacccagcccaaggttggcctttggggtctgatagcattcacagagcaggagattcacccttggaagcaattgaatgtgtaaactctgagagcagacactgacaatgcaatgcctgcatacctgactcctgggctgccttccttctcagcagagcccactgaaagtctcacgtgtgcctttaaccaatgaggatggcaggccttatctgtgtttgaagtggacaggtcattgctacccctgttggagaagctatgtaagaaggagtaggctggcttctggtctagttcgactcattctttatagggacatttcagaatgatgagttggctaaaatttactttaaaggggaaatgtaaaattacctcttcttttcctatccccttcttcctttcccatcctgagccctctggcaaggcctgttgcagctcaagagtttttgtcagattataagttaccaaatggtcaacagggaaggacccacagcagattccaaaactctttcattcacttgagttaactgaaatggctccttctttgagtaattgaagagtttgagttctagcagtttgctggtgtctccaagtctcttagaaacatgatggctataaacttatcaaaataaatgcctaagaaatttggaaagcgcgacaaatggccttgctcctggaatccattgacagcagaggcctccgaacaaacccacactctgtctgtctcttctttccacagggctcactgtgagttcacagttgtcctcatcccctttccttcaataatgtcaatctttgcctttnnnnnnnnnnnnnnnnnnnngccagactagccaatttccttccctttttctgtgtccccctcccatgtagtatctccttagggggaggtaaaggaagacatgctcctctctgggctggctcggccttggaaggtagcttgctatctttatgatgctccagttccaacattctagatggggagaggctcagcagtgatggagcaggaggggcggatgagaggtgtgctggccactctgccctgagtcactaggccaccaaaatgcttaggagacgtcttttggtagctcgcttctataggtgaccttgaggagttgggaggcagatagaaggtcccgaagtggagatttccctgatctgaagttccttgataatcccactgaagagagagtccattcagtggccaaaacaaagaatctgtatttccatgacaccttaaaattccccattaaatcaaaaatctccctcaaagcaaagtaaaaatggttctattaatcagagtcaatcaggataatgagatgaagaagagaggaaggaaaaaagttttaatgtgaagaaagaagcccaa

SEQ ID NO: 186393 - DNA, 2014 bp, Homo Sapiens
ttggtttcattttaaaaggtctaaggaaaagcagtgaatacagcaggaacagaaagaccatcatcccccgctgtgtgcccaacatggtgtgtctgcataagtacatcatctctgaggagtcagtatttcttgtgctgcagcatgcggaaggtggcaaactgtggtcatatatcagtaaatttctaaacagaagtcctgaagaaagctttgacatcaaggaagtgaaaaaacctacacttgcaaaagttcacctgcagcagccaacttctagtcctcaggacagcagtagctttgaatccagaggaagtgatggtggaagcatgcttaaagctctgcctttgaagagtagtcttactccaagttctcaagatgacagcaaccaggaagatgatggccaagatagctctccaaagtggccagattctggttcaagttcagaagaagaatgtactactagttatttaacattatgcaatgaatatgggcaagaaaagattgaaccagggtctttgaatgaggagcccttcatgaagactgaagggaatggtgttgatacaaaagctattaaaagcttcccagcacaccttgctgctgacagtgacagccccagcacacagctgagagctcacgagctgaagttcttccccaacgatgacccagaagcagttagttctccaagaacatcagattccctcagtagatcaaaaaatagccccatggaattctttaggatagacagtaaggatagcgcaagtgaactcctgggacttgactttggagaaaaattgtatagtctaaaatcagaacctttgaaaccattctttactcttccagatggagacagtgcttctaggagttttaatactagtgaaagcaaggtagagtttaaagctcaggacaccattagcaggggctcagatgactcagtgccagttatttcatttaaagatgctgcttttgatgatgtcagtggtactgatgaaggaagacctgatcttcttgtaaatttacctggtgaattggagtcaacaagagaagctgcagcaatgggacctactaagtttacacaaactaatatagggataatagaaaataaactcttggaagcccctgatgttttatgcctcaggcttagtactgaacaatgccaagcacatgaggagaaaggcatagaggaactgagtgatccctctgggcccaaatcctatagtataacagagaaacactatgcacaggaggatcccaggatgttatttgtagcagctgttgatcatagtagttcaggagatatgtctttgttacccagctcagatcctaagtttcaaggacttggagtggttgagtcagcagtaactgcaaacaacacagaagaaagcttattccgtatttgtagtccactctcaggtgctaatgaatatattgcaagcacagacactttaaaaacagaagaagtattgctgtttacagatcagactgatgatttggctaaagaggaaccaacttctttattccagagagactctgagactaagggtgaaagtggtttagtgctagaaggagacaaggaaatacatcagatttttgaggaccttgataaaaaattagcactagcctccaggttttacatcccagagggctgcattcaaagatgggcagctgaaatggtggtagcccttgatgctttacatagagagggaattgtgtgccgcgatttgaacccaaacaacatcttattgaatgatagaggtcaggaacttttgcaaatgcatttctttttattcgctgttgcttccaattaactgagtaggcgttttatcttgtaattagtatcttcatttcctgtctagagcttcattatcagtgcagcaaattcacccccagtaatagcttctagtacttaatgatgccattattcttaatgatactgtttttagctacaaaaggagtaattacagttcacttctgcagaaaatggaagagaaaaatgttttgatttctcctgtcgttttgtttt

SEQ ID NO: 186394 - DNA, 1499 bp, Homo Sapiens
  misc_feature (593)..(607): n is a, c, g, or t
  misc_feature (888)..(902): n is a, c, g, or t
ttgggtcaactaaagcaagtaaaggggggaaatcagaaaattctgccaagtctggatcagctgggaaaaaagcgaaacaaagtaattcttcacagccaaaggttttagaatatgaaatgactcagtttgatagaagaggacctatagccaaatccgggactgctgcaccacctaaacaaatgccagcagaatctcaatgcaaaattatgataccttcagctcagcaggaaattggtcgatctcaacagcagtttcttattcaccaacaaagtggggaacagaagaagagaaatggaataatgacaaatccaaattatcatcttcagagcaaccaggtttttcttggtagggtttcagtcccacgaacaatgcaagatagagggcatcaggaagtgttggagggatacccttcctcagagacagaattaagccttaaacaagctctgaagcttcagattgaaggttctgaccctagcttcaactataaaaaggaaacaccattataaaagtttcctattctgtgaaacagaagacattgtgatggagtggttcttcagctactggatggaaacatatgcctgttgatttgctgnnnnnnnnnnnnnnntgaagaatgtgatctctgcagtacagttaccttaattactgtaatgtgcctaaatagtaaggctgccttctcaatgtaaccctctgtgcttaaaaaatttcattttgtgtgctttgtattcactacacaggaataagcactttttaaaaatgcagatacatactgcagttccctgataaaagctgaaaagaaaatttgagtattttaagttaagatgtgataaaaaatgtgcatgtgccataatcaaatatatatgaaaaggcagtgttccttgtatttannnnnnnnnnnnnnngtggcaaaagaaacttaaacatactgtttcagtcacattgcattgtagtgtatggcctgtttcttgtatctttaaagacgttgctcaataaaacaaatcttgcaactgttctatgttcactacaccttcagcattggataaaaatcattttctatataaatatcacattgaaatgaaaaaatgatttcttggcagtttaaaaaaaatattttatagtagtttagggagctgctttaagtagtttaaatctggattttcccagtagaattcttctcatctctggctaaacatgtcagaacaaacaaccaaccagtctgtaggcagaacaaagtcctatttcatccgctgggatacaatttcatcttccattcactttgtcattccacctctaagaagacagactatcattcctgaggcatgaaaattctcagggacaaagccatgcctcagtcacatgtgtgtgcagagagaaatgcacctgtctatctaaggtagatttttgatccctgaataattcattgactaaactgacctcttcctcctggctaaataaattaattttgctggcttctctctcagcggtttctattttgtaaa

SEQ ID NO: 186395 - DNA, 937 bp, Homo Sapiens
gctttttcataatagccaactttgtacaaaaaagttggattgtttttacaaaattgcaccttgtgtccaaagggcgaagatatgacattgcataagggatttatgtttttcaaagagctaactgttttcatatccatactatatacacttgaagcaattggtaggaagagaacctattggaaaaatacgattttcaaaagtaagtattcctcgggatgtttttatataaattatgttttggaatagaacataaatgactttgagttaggataaggatgataggatgggtgctggagatgccctgccttgcttatttgtttctgtgggggatttaatactataaatgaaaatggcttctgctccattaaaaagtaaaaattgtcctccaaatataaaactccttaatagatatttttgaaattaaaatctttaaattttataaatcagctgttgccactacacaactatgatggcatgtgcttataacatttttataacattccgtctgtgtctattccctaaatatcatgagtttataataaggaaagtgataaaaatacagtaatgaaataaaaatctgaatgtttctaagaaaaggttttggaaggaaaaatgacctgaaatcagtgcgtactgcaaagtacagccaataatttttgttctttgttttcacccccaccctcactggaattctcaccaaaaatagtttgatacttaaaaaacagaagtaaatacttttctcaatattgttttggctatgcaaatatttgttttgcttaatgtcctccatttacacttctcagcaaatgtagttgcaaacaaatgctttctttttatttttcccttggtttgaggtatgtaaatagccaaaaatgtacattgaatttcacattgtaaaagttttattttatcccttgtatgatattactcaaaaatc

SEQ ID NO: 186396 - DNA, 2541 bp, Homo Sapiens
  misc_feature (281)..(295): n is a, c, g, or t
tgaagaatgtgatctctgcagtacagttaccttaattactgtaatgtgcctaaatagtaaggctgccttctcaatgtaaccctctgtgcttaaaaaatttcattttgtgtgctttgtattcactacacaggaataagcactttttaaaaatgcagatacatactgcagttccctgataaaagctgaaaagaaaatttgagtattttaagttaagatgtgataaaaaatgtgcatgtgccataatcaaatatatatgaaaaggcagtgttccttgtatttannnnnnnnnnnnnnngtggcaaaagaaacttaaacatactgtttcagtcacattgcattgtagtgtatggcctgtttcttgtatctttaaagacgttgctcaataaaacaaatcttgcaactgttctatgttcactacaccttcagcattggataaaaatcattttctatataaatatcacattgaaatgaaaaaatgatttcttggcagtttaaaaaaaatattttatagtagtttagggagctgctttaagtagtttaaatctggattttcccagtagaattcttctcatctctggctaaacatgtcagaacaaacaaccaaccagtctgtaggcagaacaaagtcctatttcatccgctgggatacaatttcatcttccattcactttgtcattccacctctaagaagacagactatcattcctgaggcatgaaaattctcagggacaaagccatgcctcagtcacatgtgtgtgcagagagaaatgcacctgtctatctaaggtagatttttgatccctgaataattcattgactaaactgacctcttcctcctggctaaataaattaattttgctggcttctctctcagcggtttctattttgtaaattgctgcatgaccaaaatagccccactcaaaatcaattggattaattttaatggtttggttggatgaatattctggatgaatataaaatgtgctgcccttcacagatgacaccactcccctgtcaatcatagcacatgtgtactttttattgttacttaatagtgatggatttgcacttttctatcctcatactctttcctgttttcttctttgtacaattgcatgcaggagggctggatgccagggttaagagagaaattcatgacaaggaaggtaaaattggttcaaatgagcatgtgtcccacagccttagtctccttactcttaaatcagtggagctgtagcttagatgggtcgtttatatgtctggaaaagttgtcataacagtttagaagccaaggttgtggatttgatcttagaatgggcctgttaatcttatagaacccagaaattctgttcttttcatgtactgttgatgaggaatgaggaaagagaatttggagattcagcacaaaaccattgctacttctagaacaaaatctttagaatatgtcctaataacaaaggtcagtaatgtcatcttcatatatgaaggacacatgtgatacattgttcgtggaaatagaaatgtataattatgataaatgtttcacttgaatcttattgtaaggcttttcttgcttttattttttaaagtcagcaaaactcattttgtctgtcatctataagtcatagtgaggactacgagataagttgataagttcaattgatattaaggtgacatggcaatattaataactcaaatgtgaatgtttcaagtattgaattcttgtccctatgggacatttattaaataaaattaatgggactcttgcaaagtagccttaaaagtgttaatgagtctattaataaatatgaacacatactattattagaaccaactttactcatatctcaaatacagtacatttacattactgtagaggatgaagctctaatttctattacatgtaattttctttagaaagagaaccctgaaagctgccagtttttctattaactttgaattattgaaattgtatttatttaattttattgtttttacaaaattgcaccttgtgtccaaagggcgaagatatgacattgcataagggatttatgtttttcaaagagctaactgttttcatatccatactatatacacttgaagcaattggtaggaagagaacctattggaaaaatacgattttcaaaagtaagtattcctcgggatgtttttatataaattatgttttggaatagaacataaatgactttgagttaggataaggatgataggatgggtgctggagatgccctgccttgcttatttgtttctgtgggggatttaatactataaatgaaaatggcttctgctccattaaaaagtaaaaattgtcctccaaatataaaactccttaatagatatttttgaaattaaaatcttttaaattttataaatcagctgttgccactacacaactatgatggcatgtgcttataacatttttataacattccgtctgtgtctattccctaaatatcatgagtttataatatggaaagtgataaaaatacagtaatgaaataaaaatctgaatgtttctaa

SEQ ID NO: 186397 - DNA, 1810 bp, Homo Sapiens
  misc_feature (163)..(176): n is a, c, g, or t
ggaaacagaaatacaagaaaatatgcttgggggaaaaaaacattgacaataaaacaactgcttctttaaaagtagtattaataaaggcttcaaaactccaaagtaattttctggtaagaatttcaagtactatatcagaaagtataaaactgtttcaaacagnnnnnnnnnnnnnntccttaagccccccaaaaatggaaactatgaaaatctgtgtccccaaaatatatgcaatagtgcaagactttccctcaaacatggaagacctcattcaaagggggaaaaagggacagattttactcatattgcccagtacatgaaaaacaaaatacatgcatcatttgctagtttactaaatagcaaacagttgcataattcagaaccaatttgctactatgtcaagtgcatatcttgtctgttttacaaagatagaatggagaagtcttccatgctaacgagcagctttaagtggtcacacttatttaccccactcctgcctgaaacatcagaaactggtatgtactgactgctccaagcataaaattggataagctttgccatacttgtggtttactggaacttgctataaagacagacaataatccagcagctacaaactttgctcacagaattgtttaaagattcatgtaaaaataaaagatgtcgtcccagacttaaattcaggagccactcgggtgctgacatcagttcaagaattgtgcaaaatgaatgacagttccctgccccccaaatagaaaatgcaaacacttaaagagctgctgttcttttctccgaaaattgcagtatcctcacttcaggcttacttgccatttatagaatctgactgcttttaaaatgtcactaaaaatgtacgtcaagttgactgacttttccaagccctgaagtgatatgtttcaacgtccacattcaggctaagagaaaagtcaactagaggcttactcaaataactgacttcctccttccctctccccacaaacacacaggactccctccctcccacagagaacacaaagttgttaactgaagaacaagataaataatatgctagtccattttactgattttaaagatactgcaatttttatacatttcgatgatttttcaacattttgcagctgtttggctttgcagcacagcaattcatacactatactgtacaaaattaccagcaagactggaatgatgtattaatagaaggcaccatcatgcttattacattaccagagaacaaaaatacagtaaagacaattttcactgtacacagcttaaagaaaggaaaaaaggggaggaggagtgtgttgagcagccagccatccctgtactgaagaggggcaggtagaaaaatcttagatatggagctactaaatctggtctaatagtcaagaccatcgcatttgaagttctaatttttattatttagttcataactaaaatgatttccttctggaatatacttgtagtcttgttaaggtttatgtgtacacacgctggtcacagcaagcagataaaatgccctcatcatttcacaaactattttctactggaaaagaagatgagattttttccctgttgcctcctgttgcagatgtcaatgttaatgagttcagagtacccattagtacattttgatgagtgcataacaagtttctgttggtttgtatttttggggggagccaagaaaaaaggcaagattctccaattgcacaaattgcactatttgtgttcccagcattaacaggcagaaacagtaacaattaaacaaaatgtgcaccaacttttttgtacaaag

SEQ ID NO: 186398 - DNA, 2328 bp, Homo Sapiens
  misc_feature (1632)..(1641): n is a, c, g, or t
  misc_feature (1874)..(1883): n is a, c, g, or t
ttgggtcgcacgtcgcagcgcctggcgcccgggaagaggtggttgtgaggcagacgaactcgcggctctccggcttccgaggcttccgagttgtcggaggaagggggcggcgagcaataagaacccgccgcacccggtcctcagcgactcttctgacctccgcgcgacgtacccgccgccgccgttggctggagcatttgacattgtgcagcaaagaaatggttatggagaagcccagtccgctgcttgtagggcgggagtttgtgaggcaatattatactttgctgaataaagctccggaatatttacacaggttttatggcaggaattcttcctatgttcatggtggagtagatgctagtggaaagccccaggaagctgtttatggccaaaatgatatacaccacaaagtattatctctgaacttcagtgaatgtcatactaaaattcgtcatgtggatgctcatgcaaccttgagtgatggagtagttgtccaggtcatgggtttgctgtctaacagtggacaaccagaaagaaagtttatgcaaacctttgttctggctcctgaaggatctgttccaaataaattttatgttcacaatgatatgtttcgttatgaagatgaagtgtttggtgattctgagcctgaacttgatgaagaatcagaagatgaagtagaagaggaacaagaagaaagacaaccatctcctgaacctgtgcaagaaaatgctaacagtggttactatgaagctcaccctgtgactaatggcatagaggagcctttggaagaatcctctcatgaacctgaacctgagccagaatctgaaacaaagactgaagagctgaaaccacaagtggaggagaagaacttagaagaactagaggagaaatctactactcctcctccggcagaacctgtttctctgccacaagaaccaccaaagccaagagtcgaagctaaaccagaagttcaatctcagccacctcgtgtgcgtgaacaacgacctagagaacgacctggttttcctcctagaggaccaagaccaggcagaggagatatggaacagaatgactctgacaaccgtagaataattcgctatccagatagtcatcaactttttgttggtaacttgccacatgatattgatgaaaatgagctaaaggaattcttcatgagttttggaaacgttgtggaacttcgcatcaataccaagggtgttgggggaaagcttccaaattttggttttgtggtttttgatgactctgaaccagttcagagaatcttaattgcaaaaccgattatgtttcgaggggaagtacgtttaaatgtggaagagaaaaaaacaagagctgcaagagagcgagaaaccagaggtggtggtgatgatcgcagggatattacgcgcaatgatcgaggtcccggtggtccacgtggaattgtgggtggtggaatgatgcgtgatcgtgatggaagaggacctcctccaaggggtggcatggcacagaaacttggctctggaagaggaaccgggcaaatggagggccgcttcacaggacagcgtcgctgaagctccactgttggcaaagtcttggcagtggtacattattcatcgtgtttgcattcttgttaannnnnnnnnnggctttggaatgtgacacagcctttttgatcatttctttgatgtgaaaagcatctttggttatcagttaaattgaggtggacattatttccccaatttcacaacaggattcacattgttaatttataaatctagacttggagaattaaggactgagaaatgaccatatcttaaactatctacgacaaagtgaacttaaaaggacatgcccactgaattcaggtcctttgagtnnnnnnnnnntcttctgctgcacattttgtttaagtgttactgtttctgcctgttaatgctgggaacacaaatagtgcaatttgtgcaattggagaatcttgccttttttcttggctccccccaaaaatacaaaccaacagaaacttgttatgcactcatcaaaatgtactaatgggtactctgaactcattaacattgacatctgcaacaggaggcaacagggaaaaaatctcatcttcttttccagtagaaaatagtttgtgaaatgatgagggcattttatctgcttgctgtgaccagcgtgtgtacacataaaccttaacaagactacaagtatattccagaaggaaatcattttagttatgaactaaataataaaaattagaacttcaatgcgatggtcttgactattagaccagatttagtagctccatatctaagatttttctacctg

SEQ ID NO: 186399 - DNA, 2655 bp, Homo Sapiens
  misc_feature (2260)..(2322): n is a, c, g, or t
actttgtacaaaaaagttggattccctttggctcaagcgccaagtccccgctcccatcatatccgggagccaacccccagcccgcatttggggccgctgaggggcagccaccgggggccgccaagccggcccttacccccagctttggcagctctttcacttttggaaactctgcagccccggccccggctactgcacccacacctgcacctgcgtccacgatcaagatcgtgcctgcgcacgtgcctacgcccatccagcctacctttggcggtgccacgcactcggcgtttggattgaaagccacggcttccgccttcggcgctcccgccagctcacagcccgcctttggcggctccactgctgtcttctccttcggtgcagccaccagctccggctttggagccaccacccagaccgccagcagcgggagcagcagctcggtgtttggcagcacaacaccatcacccttcacgtttgggggttcggcagcccccgctggcagtgggagctttgggatcaacgtggccaccccaggctccagcgccaccaccggagctttcagctttggagcaggacagagtgggagcacagccacctccacccccttcacagggggcttaggtcagaacgccctgggcaccaccggccagagcacaccgtttgccttcaacgtgggcagcacaactgagagcaaacctgtgtttggaggcaccgccacccccacctttggtcagaacacccctgcgcctggagtgggcacatcgggcagcagcctctcctttggggcatcttcagcacccgcccaaggctttgttggtgttggaccgttcggatcggcggccccttcattttccattggtgcgggatccaagaccccaggggctcgacagcgactgcaggcccgaaggcagcacacccgcaaaaagtagcctttgtcccctgtccctgttccccccaccccttccctaaatctggaccttggcacgtgctagaaagagccttggacccttccagctgcgtaaagcaaacctaccccggatctctggcttcagccgccagggggcagtggcagccctggggccctttcccttctggaggaagcacaagcctcagggaaggggaagcaggatgcggagggccaaagcccgggacctctacttgaacagttccactggggaggctggagaactaaggacctgtacatagtgtccgctgccctgactcccgcttagcgcacccttaggcaggcgccccttccacctttccccgagagccgtcgtcgctggagggggcagggtccagcccgcctggatcggtggtgtgcacctgatgggatttgggaaatgggttatccctaaagctttatcttgcttggcttagctgtgagaagtggttctcttcctctggtcccttctggggactctgtttccccatttcttgctgctgtgtccctcaccggttccttgcaggattccctcctttttaaatgcccttgaatctagctttgccttggagaccccagtgggtgctgctcctgccgttttcttcctgccaagcctgaatcaatgtttcatctccaaccctctgccagtttggcccctcagagcttggtggctcaagactgttagcctggcagagccaggggtgaagggagaagctcttggagcaggcaggatgcccaccgctgcttcagctgcctcctcgcccagctaccctttggccccattgggccctcgtctgcctctccaggattgtatgtttcaagccttgtcctgtgttcctttgtctgacgctctgtgtattgctctttgaatcgagtttggaggaagagttgagttgtatgagtggcggcatgttggtagtgccggacttcctgtttcaagttttctggggcctcgctaattgaatgtggaaagtagcaccacttgacggctacaagtgccgactcctgaattttcccatggtgttctgacttcaagggctggcagccagggagaatgggcccaggggaagcaaagacctcttccctctgccgtttctgtcccacttaactgacctcactggaggctacatcacccaaagtagatgttagaaaacctaaattaatgaaccatatttttaaaatcctatttttcccaaacagggccctctgcagcccatcctttccttccgtccttctgaaaccacataccccaggcccaagcgccttgctgccacgcccaacctctttgggagaagtatgaatgcgtgtgtctannnnnnnnnnnnnnnnnnnnnnnnnnnnnnnnnnnnnnnnnnnnnnnnnnnnnnnnnnnnnnnttgccttttaaattccttcaagcttggttcattgaggtggttaagtataaatgctattaactaggaattagctgtatagttaagttatgcctgtgcaaagaagaggctcaaatgctgtccccggcagctttcctgggggactagagctccttctggccatgttatatgaaatgtaattcttattttataaataatgtgatgtaaatgtaactggtgccccctccccgatgtgactgaaggtgagtgagtggtggcggggctgctccttcccacccctcataacagctctgatcctcgttatacctggctgcgtgtgcagctgaggagggagtg

SEQ ID NO: 186400 - DNA, 1519 bp, Homo Sapiens
ttggcaagtttaagacctctgttggatgtgtattacttgccccttaccaatatgcggatagccagaacgttctgctttaccaacaatggacaagcattataccttgtttcacctacagaaatccagagacttacttatagtcaagagacctgtgaaaatcttcaggaaatgttgggtgaactcttcactcctgtagaaacacctgaagcaccaaacaggggattctttaaaggcttatttggaggtggtgcacaatctcttgacagagaagaactatttggagaatcgtcctcaggaaaggcttcaaggagccttgcacagcatattcctggccctggtggcattgaaggcgtaaaaggggcagcatctggagttgttggtgaattagcacgagccaggctggcactagatgaaagagggcagaaacttggcgatctggaagaaagaactgcggccatgttatcaagtgcagagtcattttctaaacatgctcatgagattatgttgaaatacaaagataagaagtggtaccagttctgacaaccagaatccaataagtccaacttcagccagaaggaaaaaagttttccatttttattacattctttaggaaagttaacgttaaagggatgttcgtcactgaatactgttctttcctagcacagtcatgcactgttttacctcagtcatgtggctttaactgaggagtgttcacacgcactcgaaatggagtatatggtgtgtgccagttatgagttgaccatttgggaattaaacaggtcacacgtgacagatgaagaaaccaagggggctgctgaggagacctggtgcagggactaatcctggatcattcctgtattaaactttcatatgccaaaagggtttgtgccgttttatctgccatcagtgtttgacctgtttagggcagaggcaataagtcagaagtcttgaagttgaaatagttatatgtgtgtcattggactggattataaacagctgtcttggactttccctctcttaacactgactggtcatcagtatcattagtgaaaaagaaacaaattgtttgttaacatctctttagacagataagctgaatggtgggctttaaataataaaaacatacacatagttgacttgtgtatgagctactcttggattcttgttattatagacttgtatttagttcatattttgtcaaaagcaaaacaagaagatacatcacttttcattgaaaagaaaagtgtagagcatgactgaattgctcatcattctgggagtttccatgtagtggctatgcagtgtggaaagtgagaaaaaacctccattgtggtgaggagaatacttcaatgtcccttgtccttgttctcattaattcagctaaaggtggatttgacccaaataatgctggttaaatttgtagaaatgttgaaattggctgtgtttttaaattttgcttgaaatttttataaaatgtttaacaaaatgtacctttggcatcttaaattaaaattgcctt

SEQ ID NO: 186401 - DNA, 1235 bp, Homo Sapiens
ctttgtacaaaaaagttgggaacatttgggggatagcagactccaaagagatgtatctttggattctaagtacagagaaacttgtaaacgagacagcaaggcagaaaagcagcaggcacattccactggagagagacgccacaggtgcaatgaatgtgggaaaagcttcactaagagttcagtactcattgagcaccagagaatccacactggggagaagccatatgaatgtgaagaatgtgggaaggccttcagccggaggtcaagcctgaatgaacatcggcggagccacactggagagaaaccctatcaatgtaaggagtgtgggaaagccttcagtgccagcaatggcctcactcgacacagaagaatccacacaggggaaaaaccatatgaatgcaaagtgtgtgggaaggctttcctcctcagctcatgccttgttcagcatcagaggatacacactggagagaagcgctatcagtgtcgtgagtgtggcaaagccttcattcagaatgcagggcttttccagcatctccgagtccacactggtgagaaaccctatcagtgcagtcagtgcagtaaactctttagtaagcggacacttcttaagaaacatcagaaaatccacactggagagagaccataagggtgatgagtttgggaaagccttcagtcatcattgcaaccttattaggcattttagaatccatactgttccagcagaactggactaattctgtggaccctcagacccctaaatggggccgtcttggaaagtaagattttcaagtggcttattctgttcttataaaatttattttgtattgcattgaaccacttgtctacaaaccaggtgttggtgtctcctgtgtggatgactgtgattgtagggggttgctgggtggccttcttattccctagcctttggtccatttcttatgatttcctttaaaggcaccaaatcttatctggaaataaattgttatggaggggctgtttttgagcaatactgcatattgaacaattctaaaagaccagtatctatgtatacttttaaaaaaaagatttgctaagatcaaaggatattcagaggtgcatctttttctgtaagagtgacattttaaacaaatgtaaggttttggggaataagaatcgtccacattcccacaggaaatcattggctatggtctcccctaggaatgtgatagatagcttctataattatgcagcattat

SEQ ID NO: 186402 - DNA, 1473 bp, Homo Sapiens
ccatttgcttctctggtgcctgtttgtgagccaaatagaggaagagtatgctagagagagcgctgacccaggaagatcacatcaaaccaacggtgatagaagttgaactgcagttctccaaggacttcagtgattatggtgcggtattctaaaggcatactcattcggatcagcagcacagaggagacaaagtacatgcccattatctgtgctaatagcaggacaatgacattggaggacttactgctagagatggcataaaagaacttggtaagagtgatcagcaatcctctgatggatgtgacgatgattattccaacaagaatgaaggaaatgtgttgggaccaaaacttcacatcaaattggattcccagataattcacagtgatctcaatgcctcttgtgacaggatccgttttcccaactcgatcaaaaacaatattgatggtagccatgaaaattttccaaacacagtaaatagagaaaaagtaaccaagaaaattaaaatatttccccttgaaggttttggagtattctattctctccttggtagcatatagatcagctgtttccagaaaaagctgcctgcttaattcttccaaagcatccacttcctgttgaataagagtaagattttcacttcctgatgctgaagtggtaacactttttatcattccccagaaacctgatggtttgttatgcacttcccccttctggaacattgttctccgtgccattgccatccttttctttttgcttatgatcatatccatggtttgcagcagtcgccgttccagggctagaatatccgtgtcagtcacattcctgaggaagtaagacatgtaagtgtatgggcagttgacagcaccaaatccagaaagaagagccatgagagtcactccaatcacccaacccggctgatgagctgttctatggataagatcccatgttttgggctgagaatgggaaagggatctcctagtttccagaagaaatacataaaggtcagccataagagacaggaaaaaagcagtcgttgtttatgcagtagtcggatattgctcacaataaaatagccaatgtaaaaaggcaccatgaaaaccaggatcagcagaattacacacaggttcattttccagtgaaaataacgggagctgctattcaatactcctaagatttcaaagatgatgagctcaaacatggtgcaagaaaatgcaaacgtcacggagaagatcacctgtacaacatactgacgtatctcatagtctttaaacaattggcgcatgaagaaaagccacccaaatccaaaaaatagtatctgggaggtaatcatgatgctggagtcgatgaggaaactcatggcgaagtgtaaggaaggctcctgcctccacttcccactccccgaggccacagcacgctggggccacaggccccctcacacggtctgccttctcccaggtgctgcagccccaa

SEQ ID NO: 186403 - DNA, 1446 bp, Homo Sapiens
  misc_feature (444)..(504): n is a, c, g, or t
ttggagagccttcgcgggtgaggcttaacgcgcaggaggtctcacgagagtggaagcaactctcgcgaattttaaaatttatctttttgcctagcgactgacaacaggctggttgcttggcgtggaatcctaaagtggcctggctttgagactggagtgagaccccagccctaggctggggttctttccattatagaggagacggattcagaagggctacagaccaaggttgttgaaaaccagacatatgatgagcgtctagagattaacgactccgaagaggttgcaagtatttatactccaaccccaagacaccaaggacttcctcgttctgcccatcttcctaacaaggctatggctgataacagcagtgatgagtgtgaagaggaaaataacaaggagaagaagaagacctcacagttgacacctcaacggggctttagnnnnnnnnnnnnnnnnnnnnnnnnnnnnnnnnnnnnnnnnnnnnnnnnnnnnnnnnnnnnngatgatgatgaagagcatggagcccctctggaaggggcctatgaccctgcagactatgagcatttgccagtttctgctgaaattaaggaactcttccagtacatcagtaggtacacacctcagttgattgacctggaccacaaactgaagcctttcattcctgattttatcccagctgtcggggatattgatgcattcttaaaggtcccacgtcctgatggaaagcctgacaaccttggcctattggtattggatgaaccttctacaaagcagtcagaccctacggtgctctcactctggttaacagagaattctaagcagcacaacatcacacaacatatgaaagtaaaaagcctagaagatgcagaaaagaatcccaaagccattgacacgtggattgagagcatctctgaattacaccgttctaagccccctgcgactgtgcactacaccaggcccatgcccgacattgacacgctgatgcaggaatggtccccggagtttgaagagcttttgggcaaggtaagcctgcccacggcagagattgattgcagcctggcagagtacattgacatgatctgtgccattctagacatccctgtctacaagagtcggatccagtccctccatctgctcttttccctctactcagaattcaagaactcacagcattttaaagctctcgctgaaggcaagaaagcattcactccttcatccaattccacctcccaagctggagacatggagacattaaccttcagctgagacacttcccaagctgctgtttcaaggctgagctggccctctgccccagctgagatggacagatcgttgtcagctacttgatgtccttgcccatgccacagcttgggctcaggggcagtgcatgtcctgctgctctctctgccagagggcacagaacatgtttgtttaatgaaaaaa

SEQ ID NO: 186404 - DNA, 1068 bp, Homo Sapiens
ttggtggctttatcatcatgaaacaagtcatcagagtctttgaatcttgcgtaggaattggaagtcggggtataccaggataggttttcagcaccaggtgtggcactcaccctccggtatgcttggcagagtttgtgaagcggctccggtactgcgaatacctagggaagtatttctgtgactgctgccactcatatgcagagtcgtgcatccctgcccgaatcctgatgatgtgggacttcaagaagtactacgtcagcaatttctccaaacagctgctcgacagcatatggcaccagcccattttcaatttgctgagcatcggccaaagcctgtatgcgaaagccaaggagctggacagagtgaaggaaattcaggagcagctcttccatatcaagaagctgttgaagacctgtaggtttgctaacagtgcattaaaggagttcgagcaggtgccgggacacttgactgatgagctccacctgttctcccttgaggacctggtcaggatcaagaaagggctgctggcacccttactcaaggacattctgaaagcttcccttgcacatgtggctggctgtgagctgtgtcaaggaaagggctttatttgtgaattttgccagaatacgactgtcatcttcccatttcagacagcaacatgtagaagatgttcagcgtgcagggcttgctttcacaaacagtgcttccagtcctccgagtgcccccggtgtgcgaggatcacagcgaggagaaaacttctggaaagtgtggcctctgcagcaacatgatgcccctgagtactgtgaaaaagactgttcaacatgccttatgataacaccgatttgtgtctattattggtgacattgttttacatattgggtattgtatattaaggaaaaagatggtctatattctctttattgcatatacttaatgtctcaaaagaatgcaaattctgtgtttaagcacagggctgatagttgtggttttgtttacaaatgttctgttttggctgctattggttttttaaagaggttttttatacctttgtatttaaatagttatgtt

SEQ ID NO: 186405 - DNA, 1539 bp, Homo Sapiens
atgtgagttttaaatgaactttatcattgtagattcccacttagcttgttttggttagtttataatactacgttaggtatttctatataggtggaatagactaaaagtaaagtaaatgttttaaatttgtattacgtctaaagatttgtacgtggatgtcattaatttaaatgtccatactctatttataaatcttacttacaaattttgtaacatggaacaccatttgatttataatacttgcagaagttcctgtatgctgttaaataaattaatttgtaaaataattttgcattttatatttagttcagcatttaattgttaaatgagtttatagacttgatatgtgggtgaatgaaaaatatttacataaaaatcatccaagcattttccatttatttttgtagtatgcatattttagaaaatgacttatgaatgtttccatcatcacagaaacagtagctgctatgttttcattactgcttcagtcattaaatttataaggcaataatatttaagaagaatgaaatcagaatgtctcagtttaatcatcaggtaaattggaacatttcaccaccacaaaggcagctactgtttcagttaattcttattttgtgttagaatacataacagtgaagtagatgcacgacttgtgtatgtatagttaagccagcgtttttctgtgtattttggggaatagcaaaatctacatcacaaattttgacacattacagctgaaggaagaggatcaccttccaagacaaaacagtcttcatgggggaaaaatgacgcttgtccagcagtttgcttcttgtgattgaactgaacctgtaaggattcatggataaaatgaacaggaatagatctgaataaagcaaatctgcataaatggtaaccagtagctctacttttattttttatgttgcttaactgttttatttgaaggaaacctgtgtgatttaaaaagttatagcttttgcaactttattactggttatatacatttggccattatgatgtgcaagcaattggaaaaaaagtcaagtaaatgcttgtttttgtagtagtttgttcttgttaaaaatgtttatatgataatgtctgtaaacagcatcactttgattacaatagatgtagtgttgtaataaactgtttaatggggctgatgtgtaaagctgttcaagttatttgatgtttacacctcagggaaagtcttgtgttcagcaatatctaaagataatgttactatgacaacatttttactgtcctttaaagcattgcaatagcgtttttggatatgcctcaatctaatcttgcgttcagtgaattaaacatagtaattaagtgtcttttgcccttgattttgatattagaataggtgattacatggatatttaatatttctatattctgcttttctagctgtttttacctagttagcttgtgactttgctgaatggtatgtaaacttgtaaaatagagatttgacagacatagcaatctagtcatgtgtaaggggtcaaaaaaacagaggtttta

SEQ ID NO: 186406 - DNA, 1720 bp, Homo Sapiens
  misc_feature (460)..(543): n is a, c, g, or t
ttgggtcaatttgaaatgcagtccaggaaaactacacaatcaggacaaatgtctggggaaggtaaagctggtcctccaggaggcagttcccgtgcagcatttccacaaggtggtagaggacggggccgttttccaggggctgttcctggtggggacagatttcctgggccagcaggaccaggagggccacccccaccttttccagctggacagactccaccacgtccacccttaggtcctccaggcccacctggtccaccaggtcctccacctcctggtcaggttctgcctcctcctctagctgggcctcctaatcgaggagatcgccctccaccaccagttctttttcctggacaaccttttgggcagcctccattgggtccacttcctcctggccctccacctccagttccaggctacggcccccctcctggcccaccacctccacaacagggaccannnnnnnnnnnnnnnnnnnnnnnnnnnnnnnnnnnnnnnnnnnnnnnnnnnnnnnnnnnnnnnnnnnnnnnnnnnnnnnnnnnnggaccacctccaggtgccccaccgccagctccgcatgtgaacccagctttctttcctccaccaactaacagtggcatgcctacatcagatagccgaggtccaccaccaacagatccatatgggcgacctccaccatatgataggggtgactatggcccccctggaagggaaatggatactgcaagaacgccattgagtgaagctgaatttgaagaaatcatgaatagaaatagggcaatctcaagcagtgctatttcgagagctgtgtctgatgccagtgctggtgattatgggagtgctattgagacactggtaactgcaatttctttaattaaacaatccaaagtatctgctgatgatcgttgcaaagttcttattagttctttgcaagattgccttcatggaattgagtccaagtcttatggttctggatcaagacgtgaacgatcaagagagagggaccatagtagatcacgagaaaagagtcgacgtcataaatcccgtagtagagaccgtcatgacgattattacagagagagaagcagagaacgagagaggcaccgggatcgtgaccgagaccgtgaccgagagcgtgaccgagagcgcgaatatcgtcatcgttagaagctgaaggaagaggatcaccttccaagacaaaacagtcttcatgggggaaaaatgacgcttgtccagcagtttgcttcttgtgattgaactgaacctgtaaggattcatggataaaatgaacaggaatagatctgaataaagcaaatctgcataaatggtaaccagtagctctacttttattttttatgttgcttaactgttttatttgaaggaaacctgtgtgatttaaaaagttatagcttttgcaactttattactggttatatacatttggccattatgatgtgcaagcaattggaaaaaaagtcaagtaaatgcttgtttttgtagtagtttgttcttgttaaaaatgtttatatgataatgtctgtaaacagcatcactttgattacaatagatgtagtgttgtaataaactgtttaatggggctgatgtgtaaagctgttcaagttatttgatgtttacacctcaggaaagtcttgtgttcagcaatatctaaagataatgttactatgacaacatttttactgtcctttaaagcattgcaata

SEQ ID NO: 186407 - DNA, 1157 bp, Homo Sapiens
tttttcaggttgtaccaaggcaccgccactgcctagttatattatgcacccatttcaagagtaaaaaaactacacctccctcaacatcagttctgtactgtttctggtttatgatacacttccaaaacagcaaaaaattgcaaatatgtgcaaacactgtggtccattcagagtactgcttagtcatcatcttcttcttcctcctcttcttcctcaaagctatcttcaaagccctcactgtcctcctggtcttcatccccctctattgctgtatcccactgtgggtgattttctggcacaggcttagcctcatgaacttccaacttcaatggtttaatctgatccaaacccatataggagtctgatctcagaaacacagtatactgataatttccaggcttgcctggtgcaggaaacttcagctctacctcctctgtatctttcagcgtacacacatgatatggcatggatattaatgtctgctccttcctatctgcaatgtaaagccaccaccattcttgtttttcctcaggaaagtaaaggctatacacaggatgtgttatttttgatttggtttccaatagagctctctcttttcgctgtatgctttgttgtaattcttgccactctgcttcatcatctttgttttgtttttcatcttgctctctatcagagtctctgtcactaccatcatctttctcactttgggaatctctattggtttcttcttcttcagaatcactgcccttatctgaaacttcttcttcatcttcctttactgcagcttcctaaaagggaaaggcaaacacaaagattctgcatatctcaatgagaacatatcaatctgaatccctgaagttaacttattgtcaatttaactaaactgactcgatgacaatttcactattcatatacaattttttaaaattataaacattcctacttataaagatgtgggagtcagactaaagagtttaatatctggctagtctgtctattgttagttattttattcattcttcataatttgtcaaataaaagtatttctatttgcaaagcccaataacacaaaggctaagatggttctgctttcaaaaacatcaatcatattttatttaaggaaacaggtagtttatagaaaagtataattttgccaa

SEQ ID NO: 186408 - DNA, 2194 bp, Homo Sapiens
  misc_feature (1678)..(1705): n is a, c, g, or t
ttggccaagctacgccactcgggctggggcgttgggagcgggagtgcagagcgtggtcgtggcggcggcggtgagaagagcgaggcggaggagggggtgccatggccgggcagcagttccagtacgatgacagtgggaacaccttcttctacttcctcacctccttcgtggggctcatcgtgatcccggcgacatactacctctggccccgagatcagaatgccgagcaaattcgattaaagaatatcagaaaagtatatggaaggtgtatgtggtatcgtttacggttattaaaaccccagccaaatattattcctacagtaaagaaaatagttctgcttgcaggatgggcattgttcttattccttgcatataaagtttccaaaacagaccgagaataccaagaatacaatccttatgaagtattaaatttggatcctggagccacagtagcagaaattaaaaaacaatatcgtttgctgtcacttaaatatcatccagataaaggaggtgatgaggttatgttcatgaggatagcaaaagcttatgctgctttaacggatgaagagtcccggaaaaattgggaagaatttggaaatccagatgggcctcaagccacaagctttggaattgccctgccagcttggatagttgaccagaaaaattcaattctggttttacttgtatatggattggcatttatggttatccttccagttgttgtgggctcttggtggtatcgctcaatacgctatagtggagaccagattctaatacgcacaacacagatttatacatactttgtttataaaacccgaaatatggatatgaaacgtcttatcatggttttggctggagcttctgaatttgatcctcagtataataaagatgccacaagcagaccaacggataatattctaataccacagctaatcagagaaattggcagcattaatttaaagaagaatgagcctccacttacctgcccatatagcctgaaggccagagttcttttactgtctcatcttgctagaatgaaaattcctgagacccttgaagaagatcagcaattcatgctaaaaaagtgtcctgccctacttcaagaaatggttaatgtaatctgccaactaatagtaatggcccggaaccgtgaagaaagggagtttcgtgctccaactttggcatccctagaaaactgcatgaagctttctcagatggccgttcagggacttcagcaatttaagtctccccttctgcagctccctcatattgaagaggacaatcttagacgggtttctaatcataagaagtataaaattaaactatccaggatttggtgagtttaaaagaatcagatcgtcacactctactgcacttccttgaagatgaaaaatatgaagaggttatggctgtccttgggagttttccatatgtgaccatggatataaaatcacaggtgttagatgatgaagatagcaacaacatcacagtaggatccttagttacagtgttggttaagttgacaaggcaaacaatggctgaagtatttgaaaaggagcagtccatctgtgctgcagaggaacagccagcagaagatgggcagggtgaaactaacaagaacaggacaaaaggaggatggcaacagaagagtaaaggacccaagaaaactgctaaatcnnnnnnnnnnnnnnnnnnnnnnnnnnnncctacacctgtgctattaccacagtcaaagcaacagaaacaaaagcaggcaaatggagtcgttgggaatgaagctgcagtaaaggaagatgaagaagaagtttcagataagggcagtgattctgaagaagaagaaaccaatagagattcccaaagtgagaaagatgatggtagtgacagagactctgatagagagcaagatgaaaaacaaaacaaagatgatgaagcagagtggcaagaattacaacaaagcatacagcgaaaagagagagctctattggaaaccaaatcaaaaataacacatcctgtgtatagcctttactttcctgaggaaaaacaagaatggtgagtggctttacattgcagataggaaggagcagacattaatatccatgccatatcatgtgtgtacgctgaaagatacagagggaggtagagctgaagtttcctgcaccaggcaagcctgggaaattatcatatactgtgtttc

SEQ ID NO: 186409 - DNA, 1683 bp, Homo Sapiens
ttggcagagtcctctgacggccccagtcagggaatttcaatttgaaacctagcggagggaggaggcaggcgcggctgccggcggctgggactgaagagggacgggtcccgcggcgagcgagctcctgagcataagctgtggccatgactactgaagtaggctctgtgtctgaagtgaagaaggactctagccagttaggaacagatgcaaccaaggaaaaacctaaagaagtagcagaaaatcagcagaatcagtcttccgatccagaggaggaaaaaggttcccagccacctcctgcagctgaaagccaaagtagtctacgccgccagaagagagagaaggaaacatcggagagcaggggtatttctcggttcataccgccatggcttaagaagcaaaagtcatataccttagtagtggccaaagatggaggagataaaaaagagcctacccaagctgttgttgaagaacaggtcttagataaagaggaaccccttccagaagaacagagacaggctaagggtgatgctgaagaaatggctcagaagaaacaagagattaaagttgaagtcaaggaagaaaaaccctcagtgagcaaggaagaaaaaccctcagtgagcaaagtggagatgcagcctactgaattagtaagtaaggagagagaagagaaggtaaaagaaacacaggaagacaaattagaaggaggagcagcaaaaagggagaccaaggaagtgcagaccaatgagctgaaagcagagaaggcatctcaaaaagtcaccaagaagaccaaaactgtccagtgtaaagtgaccctcttagatggcaccgaatacagctgtgacctggagaaacatgccaagggacaagtgttatttgacaaagtgtgtgaacacctcaatctcttggagaaagactactttggacttttgtttcaggaaagccctgagcagaaaaactggttagatcctgctaaagaaataaagagacaactgagaaaccttccatggctattcacttttaatgtgaagttttatcctcctgatccttctcaattgactgaagatatcaccagatacttcttgtgccttcagctccggcaggacattgcctctggccgcctgccctgctcttttgtgactcatgctctcctgggatcctacaccctgcaggctgaacttggtgactatgacccagaagaacatggcagcatcgacctcagtgaattccagtttgcccctactcagactaaggagctggaagagaaggtggcagagctgcacaaacccacaggggcttatcgccagcacaagctgattcccagttcttagaaaatgcaaagaggctttccatgtatggtgttgacctacatcatgccaaggactcagaaggtgtggacatcaagctgggcgtgtgtgctaatggacttctcatttacaaagacagactgcgaatcaatcgttttgcttggccgaaaatcttaaaaatttcctataaacgcagtaacttctacattaaagtcagaccggcagagctggaacagtttgagagtaccattggattcaaactgccaaaccaccgggcagcgaaaagactatggaaagtgtgcgtggagcatcatactttctacaggcttgtttctccagagcagccaccaaaagccaagttcctgaccttggggtccaa

SEQ ID NO: 186410 - DNA, 2801 bp, Homo Sapiens
  misc_feature (2483)..(2530): n is a, c, g, or t
ttgggaagccatcggtgttcgctgatgtccagtctatggagtcagttggtaccggtggcggcgcggaggcagaaggcggtgtccgagtaggggcctctgccccaccaggatgttaccgggcttggccgccgccgcggcccacagatgtagctggtcctccctgtgccggctccgtctgcgatgcagggcggcggcctgtaatcccagcgaccgccaggagtggcagaatttagtgacatttggaagcttttcaaacgtggttccctgtagtcatccatatattggtaccctgagtcaagtaaagttgtactccacaaatgttcagaaagaaggacagggatcacaaacactcagagtggaaaaagtaccatcatttgaaacagcagaaggtataggcgcagaactcaaagctccacttaagcaagaacctctccaagtaagagttaaagcagtccttaagaaaagggagtatggatcaaagtacactcagaataatttcatcactggagtcagagcgataaatgagttctgcctcaaatccagtgatctagaacaacttcgaaaaatcagacgacgaagtccccatgaagatactgagtcttttactgtatacttgagatcagatgtggaagcaaaatctttggaagtttggggaagccctgaagctcttgccagagagaaaaaattgcgtaaggaagcagaaatagaatacagagaaaggctatttagaaaccaaaaaatattaagagaatacagagatttcttgggaaataccaagccacgctccagaacagcatcagtgttttttaagggaccaggaaaagtggtgatggttgcaatttgcatcaatggattaaactgcttctttaaatttcttgcctggatttataccggttcagcaagtatgttctcagaagctatacactcattatctgatacttgtaatcagggtttactagcattgggcatcagtaagtctgttcaaacaccagatccttctcatccgtacggattttcaaatatgcgctatatttcttcgctaattagtggtgttggtattttcatgatgggtgcaggactatcttggtaccatggagtcatgggattgcttcatcctcaaccaatagaatcccttctatgggcatattgtattttagcaggatcattagtatctgaaggagcaacacttcttgttgctgtaaatgaacttcgtaggaatgctcgggctaaaggaatgtcattttacaagtatgtaatggaaagtcgtgatcctagtacaaatgtgatattattggaggatactgctgcagtcttgggagttataatagcagccacttgcatgggccttacttctataacaggcaatccactgtatgacagcctaggttctttgggtgtgggcaccttattaggcatggtctcagcattcctcatctacactaacacagaagcactcttagggcggtccatccagccagaacaagtacaacggctcactgaactcctggagaatgacccatcagtaagggcaattcatgatgttaaagccacagatctgggattaggtaaagtaagatttaaggcagaagtagattttgatgggcgagttgttacaagatcatatttggaaaaacaagattttgaccaaatgttacaagaaattcaagaagtgaaaactcctgaagaactagagacctttatgcttaaacatggagaaaatattattgatactttaggagctgaagtagatagacttgagaaggaactgaaaaaacgaaatcctgaagttcgacatgtagatttggagatactgtgagtttgatggaatgaatcacctgggtggggaccttggaaacaagtttgtccgtccactctacaaagtttcctcctctcctacactgaaagactcagtgccatgcagaagccttttttttaagatgaaggaaatattttatgtaaagagcaactcagcaggacacagaactaaaactactacttacatctaacagacacactacaagttgaatcaatttgaaaatcatgtttttatgcttccatagggaacattttggttatttaaattgttcataatgtcccatatttcacctgttcagtgtatactgtactttgcaatcatctttccttttttcacattggtaaaaataagtggcatccataggatcatgatttttaatttgttgcctctgaagatttcactccatcaagatctgccaatcttcaatattctggctaaatcttggtatgtggtttttaaacagtcactccgtttcaaagtctgtctttccttatagaatgtggaaattatttctccataccttgtgattttgacctgagtgctaagagaatcactctccttacctagttatctacaaatgttcattccagaaatgtttagttactgaattgaatgaagacatctcagtacactcttttaggtcatagtagttgccattttgtaaaannnnnnnnnnnnnnnnnnnnnnnnnnnnnnnnnnnnnnnnnnnnnnnntaatgttaggagatatagtcctagatatttccatgggccagtgtgatgacttttttttaaatgaggttcagtaccataatgtttatttactggaagataatgcatttataagcattttaaaattctgtaaagtgggttagaaatatttataattttacaggcatgacagcatttgacttttatttaaaagcggcactacttatgttattctgagctgtgggatattccttgctttaagagagagacagaatctctcactgaaactccatgg

SEQ ID NO: 186411 - DNA, 1628 bp, Homo Sapiens
  misc_feature (199)..(212): n is a, c, g, or t
ttggatcagtagtgcaacccctactgcaggttttggccagccctccagcacaacagcaggatggtctggaagctcatcaggtcagactctcagcacacaactgtggaaatgaaaactgcaatacaagtttcatccagaactaccacctgacattccttgctgaaacgcatctagttcccctgtttattcatatgcatannnnnnnnnnnnnnacccatttgttcatattaagaatgatctgattgaccgtgttggtctgtactgattcaatttgatgtggtgaaaagcaggttgataaatcattttatgtcaagggcagctttgctcatatttcccatgatttcatgtactgcattatttgagaagctgctcaacttgcaaaatcagttttcctctcagtaaaattatagctctaatgtttgcatataagggaagtagttatcatgttagtaatacctctaatagtataaaccccaccccaaaattagccagtaatcctgtaggaaggtactgtatgatcaaatgtttaatcatataaatagaatgtaaatgtctcactgagcactgttttctagtgtatcaaaatgctcttatttcatcattcacttcactgtgctgttgttatgatgtgcttaacagggaacgtgattagtgaaaggaagataaacgtggatgttactccaaaacttcgtttaatgaatgcttaaagaattcaaattttatctgcctctcttgtaatttggatctcttcttaatgtacatagtgctaacatgaagacctttttctgcactatatgcaaacagggtaactaactaaaacaaagccactttcaatcttcaatccttgaaggtatatctaggtttatgacagtaattgtgtttacattttatggtgcctagtattgacaaaatgttatttccctacattaaacatgactccatagaccttttcatatgtgggtttttatttcctatgatgtatactgccactaaccttccaaaaattacttagtattgcaaagtcaggaatcatcaggaacgtttagctgacaaaatacttgtctgttttaaaaacctgttcaagtctaccaacctgttcaagtctaccaattataagggcaaattggagaaaaagaaaaaatatatactcaagagtggtatcttgcagtatcggcactgtacaaaaaaatcttccaatttagttgttgtagagaaaacatgcagaacaaatgaagacaaaacatacattttgtaccaaccatccaattagcttatgttaactgacaagctccatttaaacagatgtccatcagatgacaagaaaggctgctgtactgaagtaaaacaaacaatacctgaatgctctgtagcctaaactccaaacatcctcttccatatggatccactggctggacaaactgcaccagttgctgcttcaatttatacctcaattttcactgtgtccaggtggtactttggctcgttggctagattaaccttctctgtccgagtgtgccacacgagaacctgaaagggaaagaaatagcttgggtagcgcactcttcatggtgacactcgaagtcgggcagcacaagtgtaatgaataccttaatgcagttatttgcttt

SEQ ID NO: 186412 - DNA, 1283 bp, Homo Sapiens
  misc_feature (292)..(319): n is a, c, g, or t
  misc_feature (823)..(850): n is a, c, g, or t
  misc_feature (876)..(936): n is a, c, g, or t
  misc_feature (1159)..(1189): n is a, c, g, or t
tccagaaatcgggaacgcaggatcatcaccgcctcgcacgtgctctgcttgagctgcatctggatggagctgaacttgcggtggatgatgctgaccatccgctcaatctcctttggggagatgggcctggtccggctttgctctcgcaggagattcatcacgtgggtggtgaactcgttgcaggcctgctcgtatttctccagctccgtatggtagatttgtctgatctgtgagagtttggctctgtaatctgaatgctccactgagttgtctgaacctgcccctccagaannnnnnnnnnnnnnnnnnnnnnnnnnnnaccctccgcccttctcaggccccgccacgccttccgctaacagcatgttgtccagccgcatcagctgggggtctgtgggttcctcctcctgggctcctcggatactcaaaactgttttttctttgatttcacacaacacattaaacaaggcaggcttcattctgtggcagtttaaagcatgttttctggcctgcgcctcatccaaactctggtctgtgatggtcataatttgctgtaaaatgtctccaatgtcctgcttcctcccgccctccccctcggtccctccggccccatcctgcaagtgctgggacaggccggggtgtccggccatcccgaccccagcatgggaatgcatcagcctgggctgctcgtccatctccaaaggctacggcagcccccggctcttcctcttctgctcctcggctcggctcctgggaagcaccaaggctttttatccttcaagcttgtcttcaaatccttttcaggataaacagggaagggggnnnnnnnnnnnnnnnnnnnnnnnnnnnntccctttgcctctttagaggatggtnnnnnnnnnnnnnnnnnnnnnnnnnnnnnnnnnnnnnnnnnnnnnnnnnnnnnnnnnnnnnaagggctggtggggaagggtgttgactccaaaaagcaagaaaaataaaccaccttcccacttggcgaaaagaaatcagagctggctttaggtttttcagtccggtctcctttgcaaggcagaaatgggctcccggcgcttaaatctgtggcttaatccttttgcaaatatgcattgatcgggagaaaggagaggaaggcagggggattgcaatgcaaactttnnnnnnnnnnnnnnnnnnnnnnnnnnnnnnnactccgggccagagtgatctcaaagggggtgggctgttgcaaaagccagatctcccccagccgcggcggcaggcaaagcacaggctctctccaa

SEQ ID NO: 186413 - DNA, 1477 bp, Homo Sapiens
  misc_feature (915)..(926): n is a, c, g, or t
  misc_feature (1369)..(1377): n is a, c, g, or t
ttggggcttttaaagtggaaagaactgcctttatacaatttacaaatcatttctcttccctccgaagacacagatgacaggaaaatcacttactccattaaagttccttttcagaattaatctgggctggagccacaaagaattttgttttggtcctcttaaagccaaaggtcatagtaataacagaatggaatgttttgcattaatgacatgtttgagaaaagtaatttaagcttttgctttttagatgtcatacttgtaacaccacagatcgaaatgccatatgtgtgaactgcattaagaagtgccatcagggacatgatgtagagtttattagacatgataggtttttctgtgactgtggtgctggaacactgtctaatccttgtacattagctggtgagcctacacatgatacagatacactatatgactctgctccacctatagaatctaatacattgcagcacaactgaattccttccctaaagaaaaagtcctgccattgtaacatcataacttaaaacacttttttggaagaagatttaaaatatttgcccatgctacaggaagagactgtattaaaaatggatacacaaggtcagttgacactatgaagctcaagctaccaaaaagaaagtggcaatatattgactcaggatctcaaagctgggtgttttagcattactgtgtaaagacttgaagggacagaagtgaagaaaataagctgcaattttgtacagataccaacttctgaaaagctggtgtttttacaactagcattgaatgcagtccaatttgcagtagtaatcttcaatagacaagcagctttgttgctgcctttatggacatgggtaccaattgcttttgtaatatggtaaaaatgtgagctagcacttctgcgttccttttgannnnnnnnnnnnaacatgtattcagattgagaaatatgattttaatgctttaatctcatgtagtttgtttttaatttcaagcaaaatcttactgtacttgaatgtgccctgttttgttagcacacctagacttgctgtaactgtactcatgtcccagtatgtacgttctttctatgaaagagaaaacactaatcttaaattatatccagcaatgtttctggtatcctttaagaaaagttaagactattatttccttcccttccctgtgcagcattcaaaatcacccctagaaaaagtgagtgttttaatgagacttcctaggaagggatgcactgtaaaacaaaagtattcttgtaactcagttttgtgaaaggtaaaaaactactatgttttaagtacactttagaaagtctcttcaaaacaaacagtccctgtatttgaactctgttcatagnnnnnnnnngaacagtttagacaaaactgctggaaattaaaccaatttcctgcattaagctgagacagtatatatacagccctatacagtttcatagctttcctccccc

SEQ ID NO: 186414 - DNA, 1086 bp, Homo Sapiens
  misc_feature (374)..(384): n is a, c, g, or t
  misc_feature (826)..(834): n is a, c, g, or t
aattgatgagcaatgctttttacataatagccgacattgtacaaaaaagttggcacaaggtcagttgaccctatgaagctcaagctaccaaaaagaaagtggcaatatattgactcaggatctcaaagctgggtgttttagcattactgtgtaaagacttgaagggacagaagtgaagaaaataagctgcaattttgtacagataccaacttctgaaaagctggtgtttttacaactagcattgaatgcagtccaatttgcagtagtaatcttcaatagacaagcagctttgttgctgcctttatggacatgggtaccaattgcttttgtaatatggtaaaaatgtgagctagcacttctgcgttccttttgannnnnnnnnnnaacatgtattcagattgagaaatatgattttaatgctttaatctcatgtagtttgtttttaatttcaagcaaaatcttactgtacttgaatgtgccctgttttgttagcacacctagacttgctgtaactgtactcatgtcccagtatgtacgttctttctatgaaagagaaaacactaatcttaaattatatccagcaatgtttctggtatcctttaagaaaagttaagactattatttccttcccttccctgtgcagcattcaaaatcacccctagaaaaagtgagtgttttaatgagacttcctaggaagggatgcactgtaaaacaaaagtattcttgtaactcagttttgtgaaaggtaaaaaactactatgttttaagtacactttagaaagtctcttcaaaacaaacagtcctgtatttgaactctgttcatagnnnnnnnnngaacagtttagacaaaactgctggaaattaaaccaatttcctgcattaagctgagacaagtatatatacagccctatacagtttcatagcttttcctcccccatttatgtgtattggtgacagtgggtataaaacagcctgaaagtgtatgcatgtaccataacatctagacttaatatattgtggagtattcataacccattatgtagaacgtagatagaattaaaatggtttaatttcctagaaagaaaa

SEQ ID NO: 186415 - DNA, 936 bp, Homo Sapiens
ttgggctgcttctgctttgaaggcggaggctccatgttgtcccctcagcgagtggcagcagctgcctcaagaggagcagatgatgccatggagagcagcaagcctggtccagtgcaggttgttttggttcagaaagatcaacattcctttgagctagatgagaaagccttggccagcatcctcttgcaggaccacatccgagatcttgatgtggtggtggtttcagtggctggtgccttccgaaagggcaagtccttcattctggattttatgctacgatacttatattctcagaaggaaagtggccattcaaattggttgggtgacccagaagaaccgttaacaggattttcctggagagggggatctgatccagaaaccactgggattcaaatctggagtgaagttttcactgtggagaagccaggtgggaagaaggttgcagttgttctgatggatacccagggggcatttgacagccagtcaactgtgaaagactgtgctaccatctttgctctaagcactatgactagttctgttcagatttataatttatctcagaacattcaagaagatgatcttcaacagctgcagctcttcacagaatacggtcgtctggcaatggatgaaattttccaaaagcctttccagacactgatgtttttggttagagattggagtttcccttatgaatatagctatggactccaaggaggaatggcatttttggataagcgtttacaggtgaaggaacatcaacatgaagaaattcagaatgttcgaaatcacattcactcatgtttctccgatgtcacctgctttctcttaccacatccaggactccaggtggccacaagccctgactttgatgggaaattaaaagatattgctggtgaattcaagagcagttacaggcactgataccgtatgtattaa

SEQ ID NO: 186416 - DNA, 1409 bp, Homo Sapiens
ttgggttctgcagaagtagtagtctgatttctataaatgtttaaaaaatataaagtgctagattaagttgcatctgaggcgtggtacattccttactgtctcccccttctttttatttaactaattgagttttgagtgttctattagttctttcaactatggcctgtccttgggaattataaggaattcctgttgtatgtgaaattttccactgacttaagaatttttggaaagctttactacagtatcctgccccattgtcagttttaattttttctggaactctcattacagcaaaacaaggtaataaatgttttttaacatgggaagtactttctcctgtctggcaggttgcccatatgaaatgtgaataagtatcaactgttacatgaacatataataatcttccaaatgaaggtacatgcgtgacatccatttgccataatgcattaggacacagacccctgggattaactcctgcctcttgagtgggcaggtgtaggacttgacactgggtgcaatgtcgtacaatatcttttgcctgtttccatgtgacatcaaatttgttttttaatcctgctgcatttacatgagtcaaagcatgaaatttttgtgcttttatgaatgcagatgataccagtaagtcagctggttcatttgctttagtcaaaggccctggtaaattagtgtgtgctcgaatatgagtaatataaaatgggaaatttctttttcttacagtttgttgtaataaattgaatagctggtttaactgatcatccatgctatatttaattagagctgtctcaacatcccttgtagcctgtactacatatgcagaatctgatataatattgataggttggtcaaaatcttgtaacactgtaatgactgcaaccaactctgctctttgagccgattgatatggagttttgattactcgttctttcggtcctgtgtaagctgcttttccattgctggaaccatcagtaaatactgttagagcattttctaaaggttcacgtctggtaattttaggtagaatccaagtagtcagttttaagaactggaagatctttgtttttgggtaatgattatcaataattcccacaaaattagcaagaccaatctgccatgcaccagaattgataaaggcttgtctaacttgttccttggttaaagggacaactattttgtctgggtcatttccatataattttattattcgtaatcttgtctgaccaattaatgtagctatttgatccaagtacagtgtaaaagtcttaactgtactgtgaggaaggaatgaccactccacaagatcagtattttgaataatgatacctgttggagaatgtgcagtggcaaaaatcaaaagttggagtggggctaagggatctattctattccaa

SEQ ID NO: 186417 - DNA, 1982 bp, Homo Sapiens
tgtacaaagaagcagaaggaatggaaagcctgcagaaagaggatgaaatgacggatgaagcagttggagactctgctgagaagcctcctacttttgcttcacctgagactgctccagaagtggagaccagcagaactccaccaggagagagcatcaaagctgctggaaaaggccggaacaatcatcgagctcgcaacaagcggggaagtcgggctcgggccagcaaggacacctccaagctgctgttgctgtatgatgaggacattctcgagcgagatccactcagggagcagaaggacttggcctttgcccaagcttatctgaccagggtgcgagaagccctacaacatatccctggcaagtatgaagacttccttcaagtcatctatgaatttgagtcaagtacccagagacggacggctgtagatctctacaaaagcctgcaaattctgctccaagactggcctcagctgttgaaagactttgctgctttcctgttacctgagcaagctctggcctgtggattatttgaggagcagcaggcttttgagaagagccgcaagttccttcggcagctggagatttgctttgcagagaacccctcacaccaccagaagattatcaaggtcctccaaggctgtgcagactgccttccccaggagatcaccgagctcaagacacagatgtggcagctcctcaagggccacgaccacctgcaggatgagttttctatcttctttgaccacttgcgcccagcagctagccggatgggtgactttgaagagatcaattggactgaggaaaaggagtatgagtttgatggctttgaagaagtggccctgcctgatgtggaagaagaggaggagcctcccaagatacccacagcctcaaagaacaagaggaaaaaagagatcggggtccaaaatcatgataaggagactgaatggccagatggggccaaggactgtgcctgctcctgccatgaaggaggtccagattccaagctgaagaagagcaaaaggcggagctgtagccactgtagcagcaaggtctgtgacagcaaatcctacaagagcaaggagccccatgagttggtgggcagcagcccccaccgagaggctagtcctatgcctggtgctaaggaagctgggcagggcaaggatatgatggaagaggaagccccagaggagcgggagagcactgaggccacccagagcaggactgtcaggaccaccagaaagggagagatgcctgtttcaggattggcagtggggagcactttgccatcccctcgagaagtgactgttacagaacggctcctcctggatggcccaccacctcattcaccagagactcctcaatttccccccacaactggagctgtactgtacactgttaagagaaaccaggttgggcctgaggttcgctcctgccccaaggcatcccccagacttcagaaagagagggagggccaaaaggcagtgagtgagtcagaggctttgatgctggtctgggatgcatcagaaactgagaaattgcctggtaccgtggaaccccctgcttccttcctgagtcctgtttcctcaaagaccagagatgcagggagaagacatgtgtccgggaaaccagacactcaagagagatggctgccctcaagcagagctcgggtgaagacaagagacaggacgtgccctgtccatgaatctccatcaggaattgacacctcagagacttctcccaaagcccctagagggggtttggctaaagacagtggaacacaggccaagggtccagagggggagcagcagccaaaggccgcagaagctacggtgtgtgccaacaacagcaaggtcagctccactggggaaaaggttgtcctgtggacaaggaagctgaccgtgtgatcctcaccatgtgccaggagcaaggggcacagcacagaccttcaacatcatctcccagcagctgggaaataagacccc

SEQ ID NO: 186418 - DNA, 2181 bp, Homo Sapiens
  misc_feature (1669)..(1679): n is a, c, g, or t
ttggatcgctgctggagcagctgccttcaggccctgcgccgcctccggagtccatggccggcacgcgctgggtactcggggcgctgctccggggctgcggctgtaactgcagcagctgccggcgcaccggcgccgcctgcctgcccttctactccgccgctggctctatcccggcggccgccgtcccgacgcgcagctacagccaggagtccaaaactacttacctggaagaccttccaccaccccctgagtatgaattggccccgtccaagttagaagaggaagtggatgatgtctttctcattcgagctcaaggactgccctggtcatgcactatggaagatgtgcttaactttttttcagactgcagaatccgcaacggtgagaatggaatacattttctcctaaacagagatgggaaacgaaggggtgatgccttaattgaaatggagtcagagcaggatgtgcagaaagccttagagaagcaccgcatgtacatgggccagcggtatgtggaagtatatgagataaacaatgaagatgtggatgccttaatgaagagcttgcaggtcaaatcttcgcctgtggtaaatgatggtgtggttcgtttgagaggacttccttatagttgcaatgagaaagacattgtagacttctttgcaggactgaatatagttgacattacttttgtgatggactatagagggaggcgaaaaacaggggaagcctatgtgcaatttgaagaaccagaaatggccaaccaagccctgttgaaacacagggaagaaattggtaatcgatacatcgagatatttccaagcagaaggaatgaagttcgaacacatgtcggttcttataagggaaagaaaatcgcatcttttcctactgctaagtatataactgagccagaaatggtctttgaagaacatgaagtaaatgaggatattcaacccatgacagcttttgaaagtgagaaggaaatagaattgcctaaggaggtgccagaaaagcttccagaggctgctgattttggaactacgtcttctctgcattttgtccacatgagaggattacctttccaagccaatgcccaagacattataaacttttttgctccactcaagcctgttagaatcaccatggaatacagctccagtgggaaggccactggagaagctgatgtgcactttgagacccatgaggatgctgttgcagcgatgctcaaggatcggtcccacgttcatcataggtatattgaactgttcctgaattcatgtccaaaaggaaaataagactctaggggctccagataataagggtgaagcaagaagcatttcatttgcacatctttcttggacttgggatatacagttccagtttattagcagcaactgctagggaaatgattttggtgttttgggttaattgcttctaagaaaagtttcatagtggactgtttagaagaagaaatgaaagatccagtttgggattatgaaataaaccacaaattaaaatttttgtttaaactgtccaggatctgatttaaaaatatggtctttgttttatatgattaaatggtttgttttcatagatgatatgttactcattgtaaagaccacatatttttattcagcagtgttctttaaacgctttcatttaaaaagtaacnnnnnnnnnnngcctgtgaattgagtgctctgatgtaaaacttctcatggagtgaaacagtgatttattttaaccaaacattcaccaaagcaaagaacggtttcagacctttgaactggtatggtttggcagaatagttttaaattttgctgtatttgattacttagagataggaatttttaaaaatcaaaacaaaaaataccacagcttagtgtaaatgacaatttggcggttttatgtctttagaaatgttttgcctttctaagccttgtgctaaaggcgtataacggtggtgcctatctacttaagggggcattctagtcttaacttaaaagttgtctaaactgtccctctctggctttttttggtttggggtagacctaagggtgtttgttagtctcaaaactgtgaagtgacatgtcagaacagtccagactggtaagaaaattaatggcttcacttgaatttaaaccagctctagataggaaaaaatcagtctcctcatttgctttt

SEQ ID NO: 186419 - DNA, 2297 bp, Homo Sapiens
  misc_feature (1312)..(1320): n is a, c, g, or t
ttgggtccattttgcctttgttgcctaaaacagacaaaatagacttagatttattaatagaaactatactctctgccaattttacctcagtgtatttaatggtcctttaatctgatataagatgccaagggtatttgataaaaattcttcttccatgccatgtcaggagttaatacaaatgaagaaattccgtgggttcccctgggataagtgagggtagtgtcttggacaacactattgtttgaaggtttatctcttctaatcatgctctaccgcattgtagagagcctaaagagagttgtttctgagctgatctcagggaaatacaaataacttgggagatgagggaaataagatgaattctgtgctgtcaaggcagtaagtctgaagaaaggaccatgcttcttatattatcttccaccttgcttaaaacagcccatagctttgagttgacattttcattcttggcggatagcctactttatgaaggtaaggaatgaactcctacccttcttgggtcattctctgtactgatgcgttagtcttataatactttgcaccaacctgaggaatcttctaggcttctctagcatcccctaagactgtggctatttcacgtctctctccctgcctgccttccttttcccttcctttcccctcctcatgttttctggttgtgcccatctgtaccagctcctttccatccaccttcgtatgcacccagatttttctgttcccatctgtcctatttgttattcatcccgctgctcaacttctccagtatgttgcttcccttaagttgccattcattctcttcatgacttttactaactcacttcggtctctgtctgtcaactaaacttttctaaaggttaccagttatccaatcaccaaatccatggctttttctcaaagcttagtcttgtccttggcagaactggacactattgaccatccaaatggaaattcccctttcttggtgtctctgacaaatggtcctttgccttatcttgtgctggtggtgaagaggccctcaaagccaggcctctctattcctttgactgtctcctcagccattaacccattcttcatcctcggagtgagtgattcccaagtctttgtcttggcttaatccctaaagaacccagttctgctggtatcaaatagttcagcttggttgtcattgaaaggaatttctctcttctgtccatcagcctgtccctcccaactgtctaggacagtcttcggtcacctaaattcctaactgcagacttttgccctttttctctctcatcaccaaagtcccatccannnnnnnnnaataaaagatcctcagctacagtctttccattttccttgcttctcttattgcacacccccagcccattttgcttctctcttggattttgttttttcagatccacatttattgggtttcctgtccagcttcttggaaaggagctcactcttggaaagactgatctttccaaaatattttccctggtctgaagctttggtgtgaacttctcaaggcttagagaatccagttacagaccttttggggttcaggatgctatagattgacaccctcctgcctgtttttctctgcatcccaacctggccaaggcccctcctgtggggtgcccatctgtgcctttattccggctgtgccctcgactttccagcttcccatgtttctttggttaggtttctctcccttccttctttctccttccccaatccgcctgtttcgtcagggcccagtttgtttcctcatacaccttcctcactaccccaccccacatggttgactctttccctcagctccaccagctcttcatcatgccactcatttcagaacttgagcaaaacagggcagtcaggatctgatgtctttctggtctccctaagaaaactaagctcttgagggacagcccttggcaatgctttcctatctgctgatcatggtgaccttccttaagacttccagagttcagttccttctggcagagaggttttctttctccatgccatatggatgtgactcaaatgaggggtcccacagcttttcctggctaccacttgctgtgaccttatacatgttggggtttgctcttaaagaggagagcaggaagaaaggttggtttcagaaaccaagagggtcggcagtggacgcgtacattttgtcacggagtccacagagctgagcttttgagcagactctgagaagtatcattgcttgtgttgaaagaatacaacaggatttaagtttctctttaaaaattgcactgaagaaa

SEQ ID NO: 186420 - DNA, 1620 bp, Homo Sapiens
ttggccctaattctacagaagagatcaaggcctactgtgacatggaagctggaggaggtgggtggacaattattcagcgacgtgaggatggcagcgttgattttcagaggacttggaaagaatataaagtgggatttggtaacccttcaggagaatattggctgggaaatgagtttgtttcgcaactgactaatcagcaacgctatgtgcttaaaatacaccttaaagactgggaagggaatgaggcttactcattgtatgaacatttctatctctcaagtgaagaactcaattataggattcaccttaaaggacttacagggacagccggcaaaataagcagcatcagccaaccaggaaatgattttagcacaaaggatggagacaacgacaaatgtatttgcaaatgttcacaaatgctaacaggaggctggtggtttgatgcatgtggtccttccaacttgaacggaatgtactatccacagaggcagaacacaaataagttcaacggcattaaatggtactactggaaaggctcaggctattcgctcaaggccacaaccatgatgatccgaccagcagatttctaaacatcccagtccacctgaggaactgtctcgaactattttcaaagacttaagcccagtgcactgaaagtcacggctgcgcactgtgtcctcttccaccacagagggcgtgtgctcggtgctgacgggacccacatgctccagattagagcctgtaaactttatcacttaaacttgcatcacttaacggaccaaagcaagaccctaaacatccataattgtgattagacagaacacctatgcaaagatgaacccgaggctgagaatcagactgacagtttacagacgctgctgtcacaaccaagaatgttatgtgcaagtttatcagtaaataactggaaaacagaacacttatgttatacaatacagatcatcttggaactgcattcttctgagcactgtttatacactgtgtaaatacccatatgtcctgaattcaccatcactatcacaattaaaaggaagaaaaaaactctctaagccataaaaagacatattcagggatattctgagaaggggttactagaagtttaatatttggaaaaacagttagtgcatttttactccatctcttaggtgctttaaatttttatttcaaaaacagcgtatttacatttatgttgacagcttagttataagttaatgctcaaatacgtatttcaaatttatatggtagaaacttccagaatctctgaaattatcaacagaaacgtgccattttagtttatatgcagaccgtactatttttttctgcctgattgttaaatatgaaggtatttttagtaattaaatataacttattaggggatatgcctatgtttaacttttatgataatatttacaattttataatttgtttccaaaagacctaattgtgccttgtgataaggaaacttcttacttttaatgatgaggaaaattatacatttcattctatgacaaagaaactttactatcttctcactattctaaaacagagtctgttttctttcctagtagatatatttttatagaactagactacaatttaatt

SEQ ID NO: 186421 - DNA, 1961 bp, Homo Sapiens
ttggctcttcacccagtccggcagttgaagctcggcgctcgggttacccctgcagcgacgccccctggtcccacagataccactgctgctcccgccctttcgctcctcggccgcgcaatgggcacccgcgacgacgagtacgactacctctttaaagttgtccttattggagattctggtgttggaaagagtaatctcctgtctcgatttactcgaaatgagtttaatctggaaagcaagagcaccattggagtagagtttgcaacaagaagcatccaggttgatggaaaaacaataaaggcacagatatgggacacagcagggcaagagcgatatcgagctataacatcagcatattatcgtggagctgtaggtgccttattggtttatgacattgctaaacatctcacatatgaaaatgtagagcgatggctgaaagaactgagagatcatgctgatagtaacattgttatcatgcttgtgggcaataagagtgatctacgtcatctcagggcagttcctacagatgaagcaagagcttttgcagaaaagaatggtttgtcattcattgaaacttcggccctagactctacaaatgtagaagctgcttttcagacaattttaacagagatttaccgcattgtttctcagaagcaaatgtcagacagacgcgaaaatgacatgtctccaagcaacaatgtggttcctattcatgttccaccaaccactgaaaacaagccaaaggtgcagtgctgtcagaacatctaaggcatttctcttctcccctagaaggctgtgtatagtccatttcccaggtctgagatttaaatatatttgtaattcttgtgtcacttttgtgttttattacttcatacttatgaatttttccatgtcctaagtcttttgattttagctttataaaatcatccacttgtcccgaatgactgcagctttttttcatgctatggcttcactagccttagtttaataaactgaatgtttggattcctcagttattgtttacttttcatcatggaagcctgtcactgtatgtaggacataatagaacttgatcacttgaagctcagacctattggtcttgatcaaatcaaactaagaagaccttagaaataagctaccattttgccacagagcagcttataggtaatacactcttctctcagtgcagtgtacatttccacaaatctaagaattgccctataaacatagcaggattttgagagcttgaaaattttccattattctggacatgaatttctaaaatgccttaataggtttatgtagttgagtaaattttgttttttaatttttgtaagcatcaaagttgattagagaggggggcactttttctggagaattctcttagtaaacacaaaagattgttacggtttcattagtagtatggttgtggggccataagttaaacagtgctgcctggtaggctgggaactgaagagacttgtggtattccatctcgggtgcctctgttggcaatgatcaggcagcccaaaagatttaaatgatctataataatttccaagcggtagattatgtggcattttattgctcaggcaataattggtttaatgctggtagtgtcaaattttgaagtgttaattttgtcttagaaccttccagtaagtgaaatacaacctagttttatcaccatatccaccagcaggcatggataattattttaacaatgctaatatttgagttttgcagtatattatagaatatagtccagttaaatctttggtttcagtatgtctgaagagtacagtgagaggttaatttctgctcaagtggtaccacttaaaggcatgtattcttttagtatgtaaaatgaaatagtaccttgagtttaaatagaatgcatttaggcattgtagagatctgaaatagttttcttccactacattgttgaaatcaatgaagca

SEQ ID NO: 186422 - DNA, 947 bp, Homo Sapiens
ttggggctccgcgggcggcccacggcgagatttcatgtgttctttgtatacaagcgacgtcccagattataattctctgctgagatttgagttggatttgaggatttggagaatccctgcagctttgtaacttcagaggtctaattagctgaaaacatcatcgttttgaagagttctgcgttttgccagtcacctctcaactgtgtgccaaagaaggactccatgaaagatgacagaagaagttattgtgatagccaagtgggactacaccgcccagcaggaccaggagctggacatcaagaagaacgagcggctgtggttgctggacgactccaagacgtggtggcgggtgaggaacgcggccaacaggacgggctatgtaccgtccaactacgtggagcggaagaacagcctgaagaagggctccctcgtgaagaacctgaaggacacactaggcctcggcaagacgcgcaggaagaccagcgcgcgggatgcgtcccccacgcccagcacggacgccgagtaccccgccaatggcagcggcgccgaccgcatctacgacctcaacatcccggccttcgtcaagttcgcctatgtggccgagcgggaggatgagttgtccctggtgaaggggtcgcgcgtcaccgtcatggagaagtgcagcgacggttggtggcggggcagctacaacgggcagatcggctggttcccctccaactacgtcttggaggaggtggacgaggcggctgcggagtccccaagcttcctgagcctgcgcaagggcgcctcgctgagcaatggccagggctcccgcgtgctgcatgtggtccagacgctgtaccccttcagctcagtcaccgaggaggagctcaacttcgagaagggggagaccatggaggtgattgagaagccggagaacgaccccgagtggtggaaatgcaaaaatg

SEQ ID NO: 186423 - DNA, 1597 bp, Homo Sapiens
ggggatcgtcaggccggagccgcgcggccgagcgggcggcgggcggaggggagggcttggcggccgggaggctcgcggcgcccgggccggcagggtccgcccgggccggcagcgtccgcccggcggcgggaggagggagcggcgcagacaaatagcggcgcctgggcgggcgcagcgcggccaccgccccgggacccgcgccgctgccctccggctccgcgggcggcccacggcgagatttcatgtgttctttgtatacaagcgacgtcccagattataattctctgctgagatttgagttggatttgaggatttggagaatccctgcagctttgtaacttcagaggtgtaattagctgaaaacatcatcgttttgaagagttctgcgttttgccagtcacctctcaactgtgtgccaaagaaggactccatgaaagatgacagaagaagttattgtgatagccaagtgggactacaccgcccagcaggaccaggagctggacatcaagaagaacgagcggctgtggttgctggacgactccaagacgtggtggcgggtgaggaacgcggccaacaggacgggctatgtaccgtccaactacgtggagcggaagaacagcctgaagaagggctccctcgtgaagaacctgaaggacacactagcccagcgacttctccgtgtcccttaaagcgtcagggaagaacaaacacttcaaggtgcagctcgtggacaatgtctactgcattgggcagcggcgcttccacaccatggacgagctggtggaacactacaaaaaggcgcccatcttcaccagcgagcacggggagaagctctacctcgtcagggccctgcagtgacggcgccccggccccacactcgcctcccgggccccacggtggagctgcccgcccggccttgtggcagaggctcctcccgcggggacggccccgacggcttctctgcgagtctctctttatgttcaggtcgcttggtcggttcgtctcccatttgccatccaggcctcacacccacactcgagcccacccggccggcgagctttagaggacgggaggagcagggagagttcacattattctgtttgcaatcggaagtggcgctcgtgcagtcaggagagtgcccgtgcttggaactgtgcttgcaaaaagattcctggaaagcagtcagcaaaagagggagccaatgcctcccaaagacagatgttttgtaatttacacccaatgtgctgtccacatagtgctatggcctctgtcctacggcttgcttgaatgtcacagttatgtacttggctctcaaagtaagtatggatccgtatacgtttgctgacaccaatacatggaagaaaccaggtgctttggggagaggagactgcccacttcatttggggctgtgcttgcaataaagaaagaatttcctggaaaggcagtctgcaaaagagggaactcggtgactcagaaagacagatgttttggtaatttaccccaaatgtgccatccacatagtgctttttcctcttgcccttcggcttgtttgaatctcacaattatgtatttaattctcaagaaatatgtatctgta

SEQ ID NO: 186424 - DNA, 1389 bp, Homo Sapiens
ttgggtttccttttccttcagcaccagcattggatgttgattggcagagcaacaacacctttgcttcttgtagtacagatatgtgcattcatgtctgtaaattaggacaagacagacctattaaaacattccaaggacatacgaatgaagtaaatgctatcaaatgggacccaactggcaatctcttggcctcctgttctgacgacatgactttaaagatatggagtatgaaacaagacaattgtgtccatgatttgcaagcacataataaagaaatttatactatcaaatggagtccaacaggaccagggactaataatccaaatgccaaccttatgttagcaagtgcatcctttgattctactgttaggttatgggatgtagaccgagggatatgcatccataccttgacaaaacaccaagagcctgtgtacagtgtagctttcagtcctgatggcaggtatctggcaagtggttcttttgacaaatgtgtacacatctggaacacgcagacaggtgctctagttcacagctataggggaacaggtggaatatttgaagtttgctggaatgcagcaggagacaaagttggagccagtgcatcagatggttcagtttgtgtattagaccttcggaaatagcgctactagttggaagccatggaccgactatgaatgtgtacatagccaaaatgactgtccctgacccatgtactgctatagtcccacttgaaccatggccagtccactacagccaaatctaaaagaaatatatacatacagtgtatataaacaaaattgcaccctgaagatgacagagttttgtcacagcttgtgaattctgttcaccaagtgctggaatctaatctgctgtgcccctaaaatagcatttagaagttttggatatgaaaaacagaagagagaaaaatatacattataaaagcagaacatacatgtaccagtttttggatactaaatgacagccttgtttctcccctttgaatcagcagacaccatggattatattctttttttcccttcagtagtgagcagtttgtatgtacagagaaaatggacttacaaaaacttgcagcagtagtttgttcttgctttaaaatttcgtttttggtttagattatggatgcatgaagtaagggagtgaatcagtttcttgtttatatttttttcaccttttaaacaaaaaattctttaaaatattttaatgcattcttttgaagaggtagatgtttggtacattttatggctcccagagcatatattcagttggtgcatgttgtgaagggggaattggaaattaaatgaaaacctatgactttggtcatgtcaatctgtaagacacatcagtaaagggtatatgctctgtggattt

SEQ ID NO: 186425 - DNA, 923 bp, Homo Sapiens
ttgggtgggttctcggcctgaggtgcgagagaagcggtgaccgcggccctggctgctcggacccgggaacatgatggtcgctggagcagaaggcgctgagaagggaccacggcggcgctgggtcgtgcgagccagtagcgggctgaaacgtagaggccagaaccaggtctcagggggcactaaaggcggtcggaggtaatccccacaccgcttcctcctggaagtcaggctggccgggagctcccgtatccaggacggttggtcgcctctggcctggcagggatcctagtgtctcgggacctcccggtgacgcgcctgcctcccctgctgcaccataggcccgggagtacggcgtccccacagcttggaccggcaggggctcgtgaaatgtttgtcaagtggataaatgaccatggccgtggtctccgcgggaggtgaggaaactgaaagccaccgaggaaaaggggggcgctccttaagaagtgccgcggtcacgtgtacgtttcaaaagaatggcgtgactgagtagggaggggaccgcggagaccctcagaccctggactgtaaggagatgaggggccgtgaaggggaacccaggaaactgagtcctgaaagcaaggaggaacttccagaatgaagggcgccgacactccttcctgcctttgctcaagcggttccttcaccccgatcaagttccttcccatttctccatctgggggatcctgaacgtgcacatcctcagagaagccctcctggggtctccaattctagtttattgccccctcctatcgatcccccagcgcgctcatcgggcctgtggacaagacaggtttgaagagaggattccctggatcgcggaaaggctgcagaattggcacagccccctccgaggatgccaaagaagcccgggcaaaagaaagtgg

SEQ ID NO: 186426 - DNA, 1768 bp, Homo Sapiens
  misc_feature (1299)..(1345): n is a, c, g, or t
  misc_feature (1595)..(1605): n is a, c, g, or t
ttggcaaagacttctggtactctgtggtcaacggggtcatctttaactgcttggccgtgcttgccctgtcatcccacctgagaaccatgctcaccgaccctggggcagtacccaaaggaaacgctacgaaagaatacatggagagcttgcagctgaagcccggggaagtcatctacaagtgccccaagtgctgctgtattaaacccgagcgcgcccaccactgcagtatttgcaaaagatgtattcggaaaatggatcatcactgcccgtgggtgaacaattgtgtaggagaaaagaatcaaagattttttgtgctcttcactatgtatatagctctgtcttcagtccatgctctgatcctttgtggatttcagttcatctcctgtgtccgagggcagtggactgaatgcagtgatttttcacctccgataactgtaatcctgttgatcttcctgtgccttgagggtcttctgtttttcactttcactgcagttatgtttggcacccaaatccactccatatgcaacgacgagacggagatcgagcgattgaaaagtgagaagcccacatgggagcggaggctgcgatgggaagggatgaagtccgtctttggggggcccccctcactcctctggatgaatccctttgtgggcttccgatttaggcgactgcccacgagacccagaaaaggtggcccggagttctcagtgtgaggcgtggctcatcagactgaaacttgctcacagacttccagttatttatttggggtctgaaggatatcaacagctcatctgtgaccaacagggcaactggaacctacacaaaccaattgcttgcagcaagcagagttttatatatttatagtcacagatggcagaggaagaggctctcagtccccacctgtacaacaacggaaaggtgtgtggccacacgaagaagccaaacgccgtggcctcctgcagagctggggcttctgtggagaatacttcgggttattacatgggttattcaaatcctgggtcctgagctgctgtttccaatcatgaagaaaaacagtgaatccagtgaacagggattctccaagcagtcatttcagggggctcctgctgaccccgccactcagcagtgcactccccggatcacagcagggcgtttacatagaaagacgttttggtctcgattagctccgatgctttgcactgaagttgcaaaagatctgtgcactgaacagtgaaggtggcttccggcacactccccgctgccccggaagagacatcctttgaccctctcagcaagtcnnnnnnnnnnnnnnnnnnnnnnnnnnnnnnnnnnnnnnnnnnnnnnncaaaattgccagtgttgtttaggcaatgtaacatttaccggctgtgtacagcaaacaagctattttttagaaaccgacgtttcagggaagaggggagagagccgcggggtcctgcccgtggttactatgaatgtattgctgttggaggacatctcgatccaaagaacagccgttcctgtgcggcccttcgttgccctcctgctttcattttttaaagaaatcttgagtgcttgagggccttggaactgannnnnnnnnnngttccagccaaattagcagtgtataaatggcacctacgtaagagcagagctgcggctcggtgacttgatacttggggcagcccgatgctgtgtgtggggcaggggaggcatccttactggagaggcacgcccagccattgggcacctctgggaaggggaggga

SEQ ID NO: 186427 - DNA, 1598 bp, Homo Sapiens
  misc_feature (1140)..(1187): n is a, c, g, or t
  misc_feature (1437)..(1447): n is a, c, g, or t
ttgggtcagcagagccaggcagattcccagctcccagtgcagtcagtaaatttcagggaactgactgcctttagggcctggctctgcaggcctggagtggcgctcagtaaatgtctgtacacagtaactaacgagcgacaaatgttggtgcctggctgggagggccattgtggtagtctgggctggccacgtggctgcagccgggctgggctcacagaggccacggggtctggatcggggcagagctgggaaggagagttcactcacctaccctccatcgagcccacactgtgcttgagcacggtgtgattctgaggcttggtggggtctgccgagcttcctggagccgctgccacttgcttttctttctgcttccaggagatcgagcgattgaaaagtgagaagcccacatgggagcggaggctgcgatgggaagggatgaagtccgtctttggggggcccccctcactcctctggatgaatccctttgtgggcttccgatttaggcgactgcccacgagacccagaaaaggtggcccggagttctcagtgtgaggcgtggctcatcagactgaaacttgctcacagacttccagttatttatttggggtctgaaggatatcaacagctcatctgtgaccaacagggcaactggaacctacacaaaccaattgcttgcagcaagcagagttttatatatttatagtcacagatggcagaggaagaggctctcagtccccacctgtacaacaacggaaaggtgtgtggccacacgaagaagccaaacgccgtggcctcctgcagagctggggcttctgtggagaatacttcgggttattacatgggttattcaaatcctgggtcctgagctgctgtttccaatcatgaagaaaaacagtgaatccagtgaacagggattctccaagcagtcatttcagggggctcctgctgaccccgccactcagcagtgcactccccggatcacagcagggcgtttacatagaaagacgttttggtctcgattagctccgatgctttgcgctgaagttgcaaaagatctgtgcactgaacagtgaaggtggcttccggcacactccccgctgccccggaagagacatcctttgaccctctcagcaagtnnnnnnnnnnnnnnnnnnnnnnnnnnnnnnnnnnnnnnnnnnnnnnnncaaaattgccagtgttgtttaggcaatgtaacatttaccggctgtgtacagcaaacaagctattttttagaaaccgacgtttcagggaagaggggagagagccgcggggtcctgcccgtggttactatgaatgtattgctgttggaggacatctcgatccaaagaacagccgttcctgtgcggcccttcgttgccctcctgctttcattttttaaagaaatcttgagtgcttgagggccttggaactgannnnnnnnnnngttccagccaaattagcagtgtataaatggcacctatgtaagagcagagctgcggctcggtgacttgatacttggggcagcccgatgctgtgtgtggggcacgggaggcatccttactggagaggcaggcccagccattggcacctctggg

SEQ ID NO: 186428 - DNA, 1108 bp, Homo Sapiens
ttggcaattttacccgaaacaaactgacgagtttgtctaggaaacatttccgtcaccttgacttgtctgaactgatcctggtgggcaatccatttacatgctcctgtgacattatgtggatcaagactctccaagaggctaaatccagtccagacactcaggatttgtactgcctgaatgaaagcagcaagaatattcccctggcaaacctgcagatacccaattgtggtttgccatctgcaaatctggccgcacctaacctcactgtggaggaaggaaagtctatcacattatcctgtagtgtggcaggtgatccggttcctaatatgtattgggatgttggtaacctggtttccaaacatatgaatgaaacaagccacacacagggctccttaaggataactaacatttcatccgatgacagtgggaagcagatctcttgtgtggcggaaaatcttgtaggagaagatcaagattctgtcaacctcactgtgcattttgcaccaactatcacatttctcgaatctccaacctcagaccaccactggtgcattccattcactgtgaaaggcaaccccaaaccagcgcttcagtggttctataacggggcaatattgaatgagtccaaatacatctgtactaaaatacatgttaccaatcacacggagtaccacggctgcctccagctggataatcccactcacatgaacaatggggactacactctaatagccaagaatgagtatgggaaggatgagaaacagattcctgctcacttcatgggctggcctggaattgacgatggtgcaaacccaaattatcctgatgtaatttatgaagattatggaactgcagcgaatgacatcggggacaccacgaacagaagtaatgaaatcccttccacagacgtcactgataaaaccggtcgggaacatctctcggtctatgctgtggtggtgatggcgtctgtggtgggattttgccttttggtaatgctgtttctgcttaagttggcaagacactccaagtttggcatgaaaggttttgttttgtttcataagatccactggatgggtagctgaaataaaggaaaagacagagaaagggg

SEQ ID NO: 186429 - DNA, 1328 bp, Homo Sapiens
  misc_feature (99)..(133): n is a, c, g, or t
  misc_feature (336)..(376): n is a, c, g, or t
ttggcttgaaatggtggtgtgtctaccctgttgtagtctgatttcttctttcttttaaaggtgttagtgctaggtatttttgactagtaattatgaggnnnnnnnnnnnnnnnnnnnnnnnnnnnnnnnnnnnctcctgtgaacgttatttatgttcaaaacactggtctgcttttttcttgtaaagttgataaaaattgttgaatttttcttttcactataggttttcctccttggaagtttagcctgttaactttcaggaagttttgtactcagattcccacagtcagtattctgccagtggtggtgtttcattttgttcaaagatatataaannnnnnnnnnnnnnnnnnnnnnnnnnnnnnnnnnnnnnnnnctcttaaagccattgctgctgaaattgttctaaagggacaaagagaggtaagccatggttgaatctcagatgggtcacttttaaaaagtttttctgtctcttttgttgacttctcaatttaaaagaattaaagcacagaagttaacatttcatgcacactaagaaccaagtggggaaacaaaagtagttaacattttaagagtaccaaatattcggaaactccaaaactcagcataaccattttgtctcagatgttattgtgaattaccattctttaaacagatggaattatgaaggtgtttttcattatattttctgatggaattgtgtgtatatctatcttacaggtccaccgtttatatcagagagccttacagaagttacctctttgtgcatcactgtggaaagatgtaatgctttttatcttttattttatctcgatgttttcctgtaaattttctgcatgtgccatatccattgatgtggtaatgctcaaactctagctaagtcttacttctatgcttccctgtcttttacagcaactcttgtttgaagcatcagaaggaggtaaaactgataacctgagaaaactagtttccaagtgccaagagattggagtcagcctaaatgagctcttaaatttaaacagtaacaaaacagaaagcaagaatcactgaacactgggtgcagtcagttctaagtccttataataattgccaaaattatttgaatgattcttcaagattaggctgatccctggctaaggtctgtgtaaggcagacaagcgttattgatcatatcaagttccctacaatatcctgtcctcaaaaccggaagcaatgaacatgatcctcttcggttggataaatgaacttcctgtttggcctgcttctaggccctgccagattctcataacatcatatacgtaagtatagttcctcaagtgactgac

SEQ ID NO: 186430 - DNA, 744 bp, Homo Sapiens
  misc_feature (48)..(63): n is a, c, g, or t
  misc_feature (588)..(622): n is a, c, g, or t
ttggcaaagatatatccaatttaatacttttcctttttctatatttcnnnnnnnnnnnnnnnnctcttaaagccattgctgctgagattgttctaaagggacaaagagaggtccaccgtttatatcaaagagccttacagaagttacctctttgtgcatcactgtggaaagatcaactcttgtttgaagcatcaaaaggaggtaaaactgataacctgagaaaactagtttccaagtgccaagagattggagtcagcctaaatgagctcttaaatttaaacagtaacaaaacagaaagcaagaatcactgaacactgggtgcagtcagttctaagtccttataataattgccaaaattatttgaatgattcttcaagattaggctgatccctggctaaggtctgtgtaaggcaaacaagcgttattgatcatatcaagttccctacaatatcctgtcctcaaaaccggaagcaatgaacatgatcctcttcggttggataaatgaacttcctgtttggcctgcttctaggccctgccagattctcataacatcatatacgtaagtatagttcctcaaagtgactgacnnnnnnnnnnnnnnnnnnnnnnnnnnnnnnnnnnnctcccccattcctttattttgtgttattcctgactcacttgacactctctgatgcctgagagattcctgtttgggatttaatatccagggctgtgtttacagtaaaaaaagcaggcagtccc

SEQ ID NO: 186431 - DNA, 1558 bp, Homo Sapiens
ttgggtcagatgccagcggcttcagcccaggttactcccctgcctggtctcccacaccgggctccccggggtccccaggtccctcaagcccctacatcccttcaccaggtggtgccatgtctcccagctactcgccaacgtcacctgcctacgagccccgctctcctgggggctacacaccccagagtccctcttattcccccacttcaccctcctactcccctacctctccatcctattctccaaccagtcccaactatagtcccacatcacccagctattcgccaacgtcacccagctactcaccgacctctcccagctactcacccacctctcccagctactcgcccacctctcccagctactcacccacctctcccagctactcacccacttcccctagctactcgcccacttcccctagctactcgccaacgtctcccagctactcgccgacatctcccagctactcgccaacttcacccagctattctcccacttctcccagctactcacctacctctccaagctattcacccacctcccccagctactcacccacttccccaagttactcacccaccagcccgaactattctccaaccagtcccaattacaccccaacatcacccagctacagcccgacatcacccagctattcacctactagtcccaactacacacctaccagccctaactacagcccaacctctccaagctactctccaacatcacccagctattccccgacctcaccaagttactccccttccagcccacgatacacaccacagtctccaacctataccccaagctcacccagctacagccccagctcgcccagctacagcccaacctcacccaagtacaccccaaccagtccttcttacagtcccagctccccagagtataccccaacctctcccaagtactcacctaccagtcccaaatattcacccacctctcccaagtactcgcctaccagtcccacctaatcacccaccaccccaaaatactccccaacatctcctacttattccccaacctctccagtctacaccccaacctctcccaagtactcacctactagccccacttactcgcccacttcccccaagtactcgcccaccagccccacctactcgcccacctcccccaaaggctcaacctactctcccacttcccctggttactcgcccaccagccccacctacagtttcacaagcccggctatcagcccggatgacagtgacgaggagaactgagggcacgtggggtgcggcagcgggctagggcccagggcagcttgcccgtgctgccgtgcagttcttgcctccctcacggggcgtcacccccagcccagctccgttgtacataaatgccttgtggcagagctcccggtgaacttctggatcccgtttctgatgcagattcttgtcttgttctccacttgtgctgttagaactcagtggcccagtggtgttctcactcctaccccacccaccggctgcctgtccccaaattgaagatccgtccttgcctgtggcttgatgcgggg

SEQ ID NO: 186432 - DNA, 2333 bp, Homo Sapiens
ttggcgctttcggattgggagggcttcctccatggaacgcgagcctcgagacgtctgacgttaggcaccgttcgcagcgcctcgggctcgcacggcaggatcgaaagcgtgattggctggcggcgtctgtggtctcgggcaccgcccagtcgcgggacgctgcctctgcggaactgggggtggggcgtgttgacccccttaaaggcgccagagcccgcggtcacggctcaggttcccggtgcttcgcgcgtctgccgttgtcacaggccagggaggtggcaccaccaggcgaagcttggcgagattgtgtcgtcaagcgcgtacgggcgccaattggccgggcgatgtggcgtggactggcgctggcgcgagcgattggctgcgcggcccgggggcggggccagtgggcggtgcgcgccgcagactgtgctcaaagcgggcgccatccgggaccggcggttgtctgtggccggaggctgatcagtgttctagaacagatcagacattttgtaatgatgcctgaaataaacactaaccacctcgacaagcaacaggttcaactcctggcagagatgtgtatccttattgatgaaaatgacaataaaattggagctgagaccaagaagaattgtcacctgaacgagaacattgagaaaggattattgcatcgagcttttagtgtcttcttattcaacaccgaaaataagcttctgctacagcaaagatcagatgctaagattacctttccaggttgttttacgaatacgtgttgtagtcatccattaagcaatccagccgagcttgaggaaagtgacgcccttggagtgaggcgagcagcacagagacggctgaaagctgagctaggaattcccttggaagaggttcctccagaagaaattaattatttaacacgaattcactacaaagctcagtctgatggtatctggggtgaacatgaaattgattacattttgttggtgaggaagaatgtaactttgaatccagatcccaatgagattaaaagctattgttatgtgtcaaaggaagaactaaaagaacttctgaaaaaagcagccagtggtgaaattaagataacgccatggtttaaaattattgcagcgacttttctctttaaatggtgggataacttaaatcatttgaatcagtttgttgaccatgagaaaatatacagaatgtgaatatgtaggtaaatgattacagaaaaatttatctgcttaacaaacttagaatgactttttccttttaaatttagttctatcattaatttatcattaaatttagttctatcatttggtactatcattaatgtattatatacactgatactttaaaacttgtgtggaaaaaactaacttataattttgtatcacacaccctggatatgtgttctgtttctaagcgacatttgtgagagattattgtaaaatgagagcgagcaaataaaacttaatttaatctttgcagatacatacttatgggaaatttgaacaaatgagtgaaactctgtgtttttagtaggctgtgataaacatttccggagcacttgcagaggacttgctatttgccaggtgctttatgtatcattaaatttttctcatagttcagaaaaatgtgcaaaggaaactattgtctcgctccttcaaaacagtcttaattaactttcatattagcagattaaactagcagagcaggttcaagggaaattaaatgatatggaccctaatttgtatcattctgagttgattgtgtggtttattcattctggaaacatgttgatacttacagtcagccactgcttttgataagtgatattgattaggttgaatcttcttgtaaatagtatttaccagttagcaaagtctgtgttttcagaattacagtgagcacagaggtgttcataaaatgggaattgagtcccactcggtaagagttgcttaaacttgacactgttgacatttgggctggataaaacccctgtggtggggtctgtgctgtgcattgcaggatggtgagcagcgtccctctcatgtgacacccacagttatgccggatgttgccagatgcccctaggggacagagtcaacccccaactgaggaccactgtcctacagagtcaggaaatattgtagggagaaaaaaataacaacaacaaaggcctgtgttaatgttaaatagatgagattatggaatgtgtatattaatgttaaaaattgtaccttgatcaatgtactttttataaacttgccatagatatctcagatttgaaacctcaagacagatttattattcttaaatgctgtatgataatgaag

SEQ ID NO: 186433 - DNA, 2067 bp, Homo Sapiens
tttgtacaaaaaagttggggaccgcggagttctggacgcaggcagaccatgtggaccctggtgagctgggtggccttaacagcagggctggtggctggaacgcggtgcccagatggtcagttctgccctgtggcctgctgcctggaccccggaggagccagctacagctgctgccgtccccttctggacaaatggcccacaacactgagcaggcatctgggtggcccctgccaggttgatgcccactgctctgccggccactcctgcatctttaccgtctcagggacttggccagttgctgccccttcccagaggccgtggcatgcggggatggccatcactgctgcccacggggcttccactgcagtgcagacgggcgatcctgcttccaaagatcaggtaacaactccgtgggtgccatccagtgccctgatagtcagttcgaatgcccggacttctccacgtgctgtgttatggtcgatggctcctgggggtgctgccccatgccccaggcttcctgctgtgaagacagggtgcactgctgtccgcacggtgccttctgcgacctggttcacacccgctgcatcacacccacgggcacccaccccctggcaaagaagctccctgcccagaggactaacagggcagtggccttgtccagctcggtcatgtgtccggacgcacggtcccggtgccctgatggttctacctgctgtgagctgcccagtgggaagtatggctgctgcccaatgcccaacgccacctgctgctccgatcacctgcactgctgcccccaagacactgtgtgtgacctgatccagagtaagtgcctctccaaggagaacgctaccacggacctcctcactaagctgcctgcgcacacagtgggggatgtgaaatgtgacatggaggtgagctgcccagatggctatacctgctgccgtctacagtcgggggcctggggctgctgcccttttacccaggctgtgtgctgtgaggaccacatacactgctgtcccgcggggtttacgtgtgacacgcagaagggtacctgtgaacaggggccccaccaggtgccctggatggagaaggccccagctcacctcagcctgccagacccacaagccttgaagagagatgtcccctgtgataatgtcagcagctgtccctcctccgatacctgctgccaactcacgtctggggagtggggctgctgtccaatcccagaggtatatgggaggggacagcatcttggcctgggcaggtgggtggccaagctcctattgctttctgccctccgcatagcccataggtgatacccagctctgacagattcgtccccagctggaggtgctgtaagcaggagaggcgggctggagtaggtaggggctcggcactgcgccccacatagtgccaactcacaacgcgagtggggtcctgtccaatccccgaggctgtctgctgctcggaccaccagcactgctgcccccagggctacacgtgtgtagctgaggggcagtgtcagcgaggaagcgagatcgtggctggactggagaagatgcctgcccgccgggcttccttatcccaccccagagacatcggctgtgaccagcacaccagctgcccggtggggcagacctgctgcccgagcctgggtgggagctgggcctgctgccagttgccccatgctgtgtgctgcgaggatcgccagcactgctgcccggctggctacacctgcaacgtgaaggctcgatcctgcgagaaggaagtggtctctgcccagcctgccaccttcctggcccgtagccctcacgtgggtgtgaaggacgtggagtgtggggaaggacacttctgccatgataaccagacctgctgccgagacaaccgacagggctgggcctgctgtccctaccgccagggcgtctgttgtgctgatcggcgccactgctgtcctgctggcttccgctgcgcagccaggggtaccaagtgtttgcagcagggaggccccgcgctgggacgcccctttgagggactcagcccttgagacagctgctgtgaggggacagt

SEQ ID NO: 186434 - DNA, 938 bp, Homo Sapiens
ttggcacaaacaaaaatgctgatttggaggaagaatttgaaaacttaacaatttaacttaggatgtaatcatcaagagttttatagctgttctgtatttagtaaagtggcatttctggccaatattaatacattttaatgtaagttagccaaaatttattagcaatacagtttttaaaagtttaacttttaagagttgcaagcttttttctaatcatgcttatctcttcaattagggttgaaaggaggagcaggaggtactgatggacaaggaggtaccttccggtacacctttcatggcgatcctcatgctacatttgctgcatttttcggagggtccaacccctttgaaattttctttggaagacgaatgggtggtggtagagattctgaagaaatggaaatagatggtgatccttttagtgcctttggtttcagcatgaatggatatccaagagacaggaattctgtggggccatcccgcctcaaacaagatcctccagttattcatgaacttagagtatcacttgaagagatatatagtggttgtaccaaacggatgaagatttctcgaaaaaggctaaacgctgatggaaggagttacagatctgaggacaaaattcttaccattgagattaaaaaagggtggaaagaaggcaccaaaattacttttccaagagaaggagatgaaacaccaaatagtattccagcagacattgtttttatcattaaagacaaagatcatccaaaatttaaaagggatggatcaaatataatttatactgctaaaattagtttacgagaggcattgtgtggctgctcaattaatgtaccaacactggatggaagaaacatacctatgtcagtaaatgatattgtgaaacccggaatgaggagaagaattattggatatgggctgccatttccaaaaaatcctga

SEQ ID NO: 186435 - DNA, 1490 bp, Homo Sapiens
ttggagctacagtaacattccaacaaaacaagaactttcatcaaacctttgctacatgggttaagcaaggccagtcaaattcaggcgttgttcaagtacagcagaaagtcctgggtatcattccatcaagtacaggtaccagtcagcaaacctttacttcattccagcccaggacagcaacagtcacaattaggcccaatacctcaggctctggaggaaccacaagcaattcacaagtaatcacagggcctcagattcgccctggtatgaccgtgattagaacaccactccaacagtcaacactaggaaaggcaattattcgaacacctgtgatggtacagccaggtgctcctcagcaagtgatgactcaaatcatcagggggcagcctgtctccactgcagtctccgcccctaacacggtttcctcaacacctgggcagaaaagcttaacttcagcaacgtccacttcaaatatacagtcttcagcctcacaaccccctcgcccccaacaaggacaagtgaagctcaccatggctcaacttactcagttaacacagggccacggtggcaatcaaggtttgacagtagtaattcaaggacaaggtcaaactactggacagttgcagttgatacctcaaggggtgactgtactcccaggcccaggccagcagctaatgcaagctgcaatgccaaatggtactgttcagcgattcctctttaccccattggcaacaacagccaccacagccagcaccaccaccaccactgtttccacgacagcagcaggtacaggtgaacaaaggcagagtaaactgtcaccccagatgcaggtacatcaagacaaaaccctgccaccagctcagtcatcaagtgtgggtccagcagaagcccagccacagactgctcagccttcagctcagccccagccccaaacccagccccagtccccagctcagcctgaagttcagactcagcctgaagttcagacccaaacaactgtttcatcccatgtcccttctgaagcacaacccacccacgcacagtcatccaagccccaagttgcagcacagtctcagcctcaaagtaatgtccaaggacagtctcctgttcgtgtccaaagtccatcacagactcgaatacgtccatcaactccatcccaactgtctcctggacaacaatcccaggttcagactacaacctcacaaccgattccaattcaaccacatacatctcttcagataccttcccaaggccagccacagtcacaaccccaggtacagtcttcaactcaaactctttcatcaggacaaactttaaatcaagttactgtttcatccccatcccgtcctcagctacaaatacagcagccacagccccaagtcattgctgtgcctcagctgcaacaacaagtccaggttctctctcagatccagtcacaggttgtggctcagatacaggctcagcaaagtggtgtgccccagcaaatcaaa

SEQ ID NO: 186436 - DNA, 2289 bp, Homo Sapiens
ttgggtgcacttaccgagatcctctttatgaaatagttaggaagcacatttacagggaacattttcagcatgtggcagcaccttacatagcaaaggcaggagaaaaatcactcaatggggcagtccccttaggctcgaatgcccgagaagagagtagtattcactgcaagcgatgccttttcatgccaaagtcctatgaagctttggtacagcatgtcatcgaagaccatgaacgtataggctatcaggtcactgccatgattgggcacacaaatgtagtggttccccgatccaaacccttgatgctaattgctcccaaacctcaagacaagaagagcatgggactcccaccaaggatcggttcccttgcttctggaaatgtccggtctttaccatcacagcagatggtgaatcgactctcaataccaaagcctaacttaaattctacaggagtcaacatgatgtccagtgttcatctgcagcagaacaactatggagtcaaatctgtaggccagggttacagtgttggtcagtcaatgagactgggtctaggtggcaacgcaccagtttccattcctcaacaatctcagtctgtaaagcagttacttccaagtggaaacggaaggtcttatgggcttgggtcagagcagaggtcccaggcaccagcaagatactccctgcagtctgctaatgcctcttctctctcatcgggccagttaaagtctccttccctctctcagtcacaggcatccagagtgttaggtcagtccagttccaaacctgctgcagctgccacaggccctcccccaggtaacacttcctcaactcaaaagtggaaaatatgtacaatctgtaatgagctttttcctgaaaatgtctatagtgtgcacttcgaaaaagaacataaagctgagaaagtcccagcagtagccaactacattatgaaaatacacaattttactagcaaatgcctctactgtaatcgctatttacccacagatactctgctcaaccatatgttaattcatggtctgtcttgtccatattgccgttcaactttcaatgatgtggaaaagatggccgcacacatgcggatggttcacattgatgaagagatgggacctaaaacagattctactttgagttttgatttgacattgcagcagggtagtcacactaacatccatctcctggtaactacatacaatctgagggatgccccagctgaatctgttgcttaccatgcccaaaataatcctccagttcctccaaagccacagccaaaggttcaggaaaaggcagatatccctgtaaaaagttcacctcaagctgcagtgccctataaaaaagatgttgggaaaaccctttgtcctctttgcttttcaatcctaaaaggacccatatctgatgcacttgcacatcacttacgagagaggcaccaagttattcagacggttcatccagttgagaaaaagctcacctacaaatgtatccattgccttggtgtgtataccagcaacatgaccgcctcaactatcactctgcatctagttcactgcaggggcgttggaaagacccaaaatggccaggataagacaaatgcaccctctcggcttaatcagtctccaagtctggcacctgtgaagcgcacttacgagcaaatggaatttcccttactgaaaaaacgaaagttagatgatgatagtgattcacccagcttctttgaagagaagcctgaagagcctgttgttttagctttagaccccaagggtcatgaagatgattcctatgaagccaggaaaagctttctaacaaagtatttcaacaacagccctatcccaccaggagagaaattgagaagctagcagccagtttatggttatggaagagtgacatcgcttccctttttagtaacaaaaggaagaagtgtgtccgtgattgtgaaaagtacaagcctggcgtgttgctggggtttaacatgaaagaattaaataaagtcaagcatgagatggattttgatgctgagtggctatttgaaaatcatgatgagaaggattccagagtcaatgctagtaagactgctgacaaaaagctcaaccttgggaaaggaagatgacagttcctcagacagttttgaaaatttggaagaagaatccaatgaaagtggtagcccttttgaccctgtttttgaagttgaacctaaaatctctaacgataacccagaggaacatgtactgaaggtaattccttgaaggatgcttcagaatctgaggagaagctagaccaaaa

SEQ ID NO: 186437 - DNA, 1463 bp, Homo Sapiens
actttgtacaaaaaagttgggtttgactgaaccgctgctctggagacctagagtaaaacggctgatggaagttgtgggacccacttccatttccttcagtcattagaggtggaagggaggggtctccaagtttggagattgagcagatgaggcttgggatgcccctgctttgacttcagccatggatgaggagtgggatggcagcaaggtggctcctgtggcagtggagttgtgccagaaacagtggccagttgtatcgcctataagacagggtaaggtctgaagagctgagcctgtaattctgctgtaataatgatagtgctcaagaagtgccttgagttggtgtacagtgccatggccatcaagaatcccagatttcaggttttattacaaaatgtaagtggtcacttggcgattttgtagtacatgcatgagttaccttttttctctatgtctgagaactgtcagattaaaacaagatggcaaagagatcgttagagtgcacaacaaaatcactatcccattagacacatcatcaaaagcttatttttattcttgcactggaagaatcgtaagtcaactgtttcttgaccatggcagtgttctggctccaaatggtagtgattccaaataatggttctgttaacactttggcagaaaatgccagctcagatattttgagatactaaggattatctttggacatgtactgcagcttcttgtctctgttttggattactggaatacccatgggccctctcaagagtgctggacttctaggacattaagatgattgtcagtacattaaacttttcaatcccattatgcaatcttgtttgtaaatgtaaacttctaaaaatatggttaataacattcaacctgtttattacaacttaaaaggaacttcagtgaatttgtttttattttttaacaagatttgtgaactgaatatcatgaaccatgttttgatacccctttttcacgttgtgccaacggaatagggtgtttgatatttcttcatatgttaaggagatgcttcaaaatgtcaattgctttaaacttaaattacctctcaagagaccaaggtacatttacctcattgtgtatataatgtttaatatttgtcagagcattctccaggtttgcagttttatttctataaagtatgggtattatgttgctcagttactcaaatggtactgtattgtttatatttgtaccccaaataacatcgtctgtactttctgttttctgtattgtatttgtgcaggattctttaggctttatcagtgtaatctctgccttttaagatatgtacagaaaatgtccatataaatttccattgaagtcgaatgatactgagaagcctgtaaagaggagaaaaaaacataagctgtgtttccccataagtttttttaaattgtatattgtatttgtagtaatattccaaaggaatgtaaata

SEQ ID NO: 186438 - DNA, 1943 bp, Homo Sapiens
  misc_feature (1502)..(1551): n is a, c, g, or t
tacaaaaaagttggattattgttctttcacttattcagaacattacatgccttcaaaatgggattgtactataccagtaagtgccacttctgtgtctttctaatggaaatgagtagaattgctgaaagtctctatgttaaaacctatagtgtttgaattcaaaaagcttatttatctgggtaacccaaactttttctgttttgtttttggaagggtttttgtggtatgtcatttggtattctattctgaaaatgcctttctcctaccaaaatgtgcttaagccactaaagaaatgaagtggcattaattagtaaattattagcatggtcatgtttgaatattctcacatcaagcttttgcattttaattgtgttgtctaagtatacttttaaaaaatcaagtggcactctagatgcttatagtactttaatatttgtagcatacagactaatttttctaaaagggaaagtctgtctagctgcttgtgaaaagttatgtggtattctgtaagccatttttttctttatctgttcaaagacttattttttaagacatgaattacatttaaaattagaatatggttaatattaaataataggcctttttctaggaaggcgaaggtagttaataatttgaatagataacagatgtgcaagaaagtcacatttgttatgtatgtaggagtaaacgttcggtggatcctctgtctttgtaactgaggttagagctagtgtggttttgaggtctcactacactttgaggaaggcagcttttaattcagtgtttccttatgtgtgcgtacattgcaactgcttacatgtaatttatgtaatgcattcagtgcacccttgttacttgggagaggtggtagctaaagaacattctgagtataggtttttctccatttacagatgtctttggtcaaatattgaaagcaaacttgtcatggtcttcttacattaagttgaaactagcttataataactggtttttacttccaatgctatgaagtctctgcagggcttttacagttttcgaagtccttttatcactgtgatcttattctgaggggagaaaaaactatcatagctctgaggcaagacttcgactttatagtgctatcagttccccgatacagggtcagagtaacccatacagtattttggtcaggaagagaaagtggccatttacactgaatgagttgcattctgataatgtcttatctcttatacgtagaataaatttgaaagactatttgatcttaaaaccaaagtaattttagaatgagtgacatattacataggaatttagtgtcaatttcatgtgtttaaaaacatcatgggaaaaatgcttagaggttactattttgactacaaagttgagtttttttctgtagttaccataatttcattgaagcaaatgaatgagtttgagaggtttgtttttatagttgtgttgtattacttgtttaataataatctctaattctgtgatcaggtacnnnnnnnnnnnnnnnnnnnnnnnnnnnnnnnnnnnnnnnnnnnnnnnnnngggccatttctaagcctaccagatctgctttatgaaatccaggggaccaatgcattttatcactaaaactatttttatataattttaagaatataccaaaagttgtctgatttaaagttgtaatacatgatttctcactttcatgtaaggttatccacttttgctgaagatattttttattgaatcaaagattgagttacaattatacttttcttacctaagtggataaaatgtacttttgatgaatcacggaatttttttaaagttggagtttagttctaaattgactttacgtattactgcagttaattccttttttggctagggatggtttgataaaccacaattggctgatattgaaaatgaaagaaacttaaaaggtgggatggatc

SEQ ID NO: 186439 - DNA, 2681 bp, Homo Sapiens
tcacctcatagtttatgtctgacttactccaaacctcagttatctgatttgtagtctgtgtcaggaaagttttcttcatatctattctgtctccctcctctttgattttaaatttttttcttttacccagtaggacaaaaaagagcagttggtcatcatccccaatattcttagtcttcagtatgcttcaggcctctcaatgaacacttaagtctcaattcttcagacaaaattgcttaagctcttctcctcagtcctattttaatgactttatatttaagaatatagaattatattttcttttatattcaaattcattactccagttaagtaatagtttgatagtttgatagaatcgagagttaagatgtttctatttgaaagtggattcaaccatcagaccaccagcaaatcggcacttaatttttgtgttatctaacattttctattgtggaattttatgattttatattctcattagttataactaaaaagccatgcacacagaattgtatatcattttgccattaaaattttttaacatattgcagcaagcttagttttatgattgagccacaaccttttacatattttttgtatgaaatattaaacactaaatgcaagattaactttcaaaagcaaaccctacattaatcaggtattatcgatggacatttttgtagaccacttttgaaatacttattattttgcaacatagactggactatacaactttcatttaacttttaggtgactgatttaagttgagtgtgcatatagagaaaaacctagaaatttatctcatggcagatacatttgaaagtacttcagaagaatttatgctgtatattaaaactaggctcaaaataaatctatcgtatctttaaaagtccaattctgttattactgtgatgtttgtagtgttactattaaacattgtgaacatacacatttttaaaacaacttgaaacccattttaaaatctgggtaagagagaaggaatcttcagaacaaaatcacatcattagggtgtccagtttatgattgaatttttaagcaaattactgtatttgaaactacaacttgatttggttttcagttttaaaaggcaacatgtgggttttatccattttatttatacctttagatttcagaaacatcttcatgttttagatgcattctacagacatcatgttacttaaaaactcagggcccctttcatccctttgtacactgaaaaagttcaattgttagcaagtaagcaattagatccagttgaatatttaaagtgtttgttgcacagttcatttaatgtttcatcttatttgactttttcacatagatataatatcagatttcattaattataaaaagttgcccagttctgtaattactgaacagagggaatgactcaactaattggctacatgttgcaacaaatttaggcctttagagttgaagcactgacttaaaacgacttacatttctgttctttggtcaaatgaccatacatgatatgggacaaattgtttcattttgtttgttttttaataagggaacttggtaaagtagttcctgtcagataggattttctcaagagacaatttaacgttataaagccttctaaaagtgaactaaatattttataactttagtaatagcttggatggttttgagaaaataacctgtatttatcacattgtcaaacagaatttttctttgaatcagacaagttcaagctctaaattgatgtgctatatacttaaaatcctaggaagttatctgtaaccagtctcttgtctcaggctcttcaccttgttaccaatcctcgtaagtatgtaaaggaaacatatttttaaagaagcttaacagtaagaaaaaattactaaaagatgcaattcaaagataggtcccagtttaacactgaattgcttgacttctgtggcttttctttttctggccacatttatttatttaagcaatttttgtatgccttgttatttcatttccatagagattatattgtatcagtgtttatgtaagctggaatcatcctcagttttttgctgataatttttcaaataaagatacatggataattgtaaaatacactaactcttagggtgttgtagtagctgaaacatggagatgcgtagctgtcatgctttttctgaatggacaggagaaacataagctacggagtattcacttctgaggatgcttttccggaaaaagaaaggctagaaaatactcgcacttcctcagaaccctctttcttgttaacgggtatcttttgttggtgtgttttgctcttacattacagatagactatcatatatgactttatgaataatttcagttattttgcttttgtataagctgtctgaagccttgctatgctgtataagttgtgtttgatggatcagtgtgagtataaaataaagcaaatcacttttcttttgtattatctatggatgccactatgaaagctgacattaagccactaaagagttttctatgaataattgtaagtaaatgctttgatatatataaacctaaataaaaagattgtattgatacagagacattggagaaggagattttaaggcagttctttaggtttaaaaaggcttgctgtaaaatggtgcgttattccgtttattaaagatcatattaatgac

SEQ ID NO: 186440 - DNA, 1086 bp, Homo Sapiens
gggctttaattttttactttgattttcagcatttcttagcattagttatgggagtgaagagaataacttgtttccgaagtttgggatattcctgggaaaagccctggtcttttcccatgataattcctcaaaaatagttggttgaaaacagatggcatgaataaaaatgctatacatccacctgttcctcttttcatgattttcacatcaaaagcacctgaagtatcaattgtgttcaacacagaatagcactaggggctgaagagaggtgatatcacttgccataatatcagctgaggtgacatgggatctaaactacccaagaagtcttcactggcaaacctgcctgacaccagggcctcctgaagagagcaggacaagcagctgtgcatgctcaaatagcaagacgtgcaaaacacatcctcactctgctagaaataaagagtacacaggaagtacatgacatcaagaacctgcttctgactactggggcagatattcaagaaacctctgcaccaaaggtgaagggtaagcagagaaatggcaacacctgggggtgagggagaaagagagacgcacatatacgcatgtgctcacatgcacacatgaccgcctatgaaggctgcctgattactccgggcccacaagcagctgtccaacagccctctcgacttgcccggctcagaacttcagcagctgcagtcttttaactatctacactttcttctctccttttaaggcacaaacatatttacagtttcaaatatactgtcaagatctgagaaccatactaagcaagttaatcacaggctagtgcacagaagccagttggtcctttttggctgtacgtatcactgagggacggtgtcaggtctgaagcaaccagaaggtatgggccttctctccgtgccactgtgggatgttgtcaagtctacgccccaccgtcaaggtggggtcacaggagaagccaaagtggcaaaagcatgaccgggattggggacaattcatatttttttactttgcattgaacatattcctaaaaggacagcagctcttgtctgcctgagccaactctcagaaagccaa

SEQ ID NO: 186441 - DNA, 1522 bp, Homo Sapiens
agcaatgcttttttaccatatagccaactttgtacaaaaaagttggcgatggaataaatctagcacccctgatggtgtgcccacactttgctgccgaaacgaagccagacaacagatttccatcagcaggatgtgggggctcaaggttctgctgctacctgtggtgagctttgctctgtaccctgaggagatactggacacccactgggagctatggaagaagacccacaggaagcaatataacaacaaggtggatgaaatctctcggcgtttaatttgggaaaaaaacctgaagtatatttccatccataaccttgaggcttctcttggtgtccatacatatgaactggctatgaaccacctgggggacatgaccagtgaagaggtggttcagaagatgactggactcaaagtacccctgtctcattcccgcagtaatgacaccctttatatcccagaatgggaaggtagagccccagactctgtcgactatcgaaagaaaggatatgttactcctgtcaaaaatcagggtcagtgtggttcctgttgggcttttagctctgtgggtgccctggagggccaactcaagaagaaaactggcaaactcttaaatctgagtccccagaacctagtggattgtgtgtctgagaatgatggctgtggagggggctacatgaccaatgccttccaatatgtgcagaagaaccggggtattgactctgaagatgcctacccatatgtgggacaggaagagagttgtatgtacaacccaacaggcaaggcagctaaatgcagagggtacagagagatccccgaggggaatgagaaagccctgaagagggcagtggcccgagtgggacctgtctctgtggccattgatgcaagcctgacctccttccagttttacagcaaaggtgtgtattatgatgaaagctgcaatagcgataatctgaaccatgcggttttggcagtgggatatggaatccagaagggaaacaagcactggataattaaaaacagctggggagaaaactggggaaacaaaggatatatcctcatggctcgaaataagaacaacgcctgtggcattgccaacctggccagcttccccaagatgtgactccagccagccaaatccatcctgctcttccatttcttccacgatggtgcagtgtaacgatgcactttggaagggagttggtgtgctatttttgaagcagatgtggtgatactgagattgtctgttcagtttccccatttgtttgtgcttcaaatgatccttcctactttgcttctctccacccatgacctttttcactgtggccatcaggactttccctgacagctgtgtactcttaggctaagagatgtgactacagcctgcccctgactgtgttgtcccagggctgatgctgtacaggtacaggctggagattttcacataggttagaatctcatttcacgggactagttagctttaagcaccctagaggactaagggtaatctgacttctcacttcct

SEQ ID NO: 186442 - DNA, 2404 bp, Homo Sapiens
  misc_feature (355)..(415): n is a, c, g, or t
  misc_feature (2171)..(2180): n is a, c, g, or t
gccaactttgtacaaaaaagttggcaagctaaagagacaaagccaccttctgctgcagagctccatccctgatcagcagcttttgaaagctttagacgaaaatgcaaaactcacccagcaacttgaagaagagagaattcagcatcaacaaaaggtcaaagaattagaagagcaactagaaaatgaaacactccacaaagaaatacacaacctcaaacagcaactggagcttctagaggaagataaaaaggaattggaattgaaatatcagaattctgaagagaaagccagaaatttaaagcactctgttgatgaactccagaaacgagtgaaccagtctgagaattcagtaccnnnnnnnnnnnnnnnnnnnnnnnnnnnnnnnnnnnnnnnnnnnnnnnnnnnnnnnnnnnnnatgtccatgatccggaaacgatcccaccccagtggcagtggtgctaagaaagaaaaggcaactcaaccagaaacaactgaagaagtcacagatctaaagaggcaagcagttgaagagatgatggatagaattaaaaagggagttcatcttagacccgttaatcagacagccagaccgaagacaaagccagaatcttcgaaaggctgcgaaagtgcagtggatgaactaaaaggaatactggggacacttaacaaatccactagttcaagaagcttaaaatcccttgaccctgaaaacagtgaaactgagttagaaaggattttgcgtcgcagaaaggtgacagcagaagcagatagcagtagtccaactgggatattagccacctcagagtccaaatccatgccagtgttgggttctgtatccagtgtaacaaaaacagccttgaacaagaaaactctggaggcagaattcaacagcccgtcccccccaacacctgagccaggtgaagggccccgtaaattggaaggatgcacaagttccaaggttacgtttcagcctcccagtagcattggatgcaggaaaaaatacattgacggtgaaaaacaagccgaaccagttgtagttttagatcctgtttctacacatgaaccccaaaccaaagaccaggttgctgaaaaagatccaactcaacacaaggaggatgaaggcgaaattcaaccagaaaacaaagaagacagcattgaaaacgtgagagagacagacagctccaactgctgatccataaaccagaagcctgacatgtttggaagtccttttcaataagcacatgattagtgttgttatattggcaagggctgtagacattctgctctggtcactgtattcagaatacaggttcttttctggtgtcacttttgtaagtagcaactataaacataagtaagctgtttagcaaaacacacattcctagtaggttttggttttttgatctttataaagatgaggtttttttcctagttactgtattaagtatgacttcttttagaaggttacaaaaaaattcagatgttgatacctttttaggaaatgtgcataccactcatcaaatggaatgctgaaagtttgaggtgcttgtatataatcggataaacaaaactgatcaacccaatgtgattttaaaagcccccaaagaagcttctgttttgggtctgatcctcttgatggagaaactgcagcagcatggaaattgttgggtactgtggcatacaagttattttctacagtagactgagataaactgaaaactcaggagctggcatcaaactcgtagtcccatagtcagtgttaattacacacattgttaactattggatgaaaaatacatgctattgattgtgtccaaagcctcccgaggacctccgtggggatgctctggtagcctgaatacagaactgaggtgaaagtccaaaccttgaattttacagtagtaagttggtaaaccatgtgctctgtgctatgagttaattatgttttcccaaatactaatgtggcacaagtaccatattttatcagagttcttatgtacagtatggtgaagataagtgacaagcacacatttttcttgcttcactgctgttctatattacacaggtttgttgttgttttttttaaaaaagaaattaagcagtagttagtctctaaaaatacaatgtttcaggctaccacagtgaataaatagaaatgtaatcagggattnnnnnnnnnncttatgcagcttttcaaagttgattgtttcaaaattggtgtttatttaaaataagtggtaatgtacttgaatgcactttttatgacaatgattcagtaatggtaattttactattaaagaaagtgaaaggtttagttttgttagcatggctcagcatgtagctgtcagtgtttttcacctaaggcaaaagaaatgatagtaataattgcagtagttgtattgta

SEQ ID NO: 186443 - DNA, 928 bp, Homo Sapiens
ttttttttactgaagtgtaaataagtgctgcaccatactgtaaacaaaacttccggatatgtgactgaataaaatcaaaatgttcatctctgtagtcatgttctttctccaatacactaatggcatcacactttgtgcaaactactagtactggaatgcccaagttatgtgtaagtgtatccgcacccagaggtaaaactacactgtcatctttgtcttcttgtgacgcagtatttcttctctggggagaagccgggaagtcttctcctggctctacatattcttggaagtctctaatcaacttttgttccatttgtttcatttcttcaggagggattttcagtttgtcaacatgttctctaacaacacttgcccatttctgtaaagaatccaaagcagtccaaggctttgacatgtcaacaaccagcataactagagtatccttcagagatacggcatccagtgaaaatttaaggaggcctttgtgatataggtctccatctaagatccaaacattacatcttgtttgatcatccctgtcttcatcatgcacatttaagtacaaatattccaatcctcttcctttcttatactcctctattccctgaatttttcttattaagcttgtttttccagctccatcttcacccagcagtagcacgttcttccccgcagggagcttggagcgcgagcgggtggagacctcgctgaggatgcaggaccaaaggttctgcccgtcctcgtcgtcgcctgccgcggcgccaccgttgcccgacgctatctcgttgcccaaggggccgccagtgtaagtcgaggataatcccggcggagaagaaccgaaggagccgactcgccccacggccgccatcttggtcgggaatcacaccacccccggcaagactaaatgtgcgaggcggctgaggcccaa

SEQ ID NO: 186444 - DNA, 1843 bp, Homo Sapiens
  misc_feature (1705)..(1731): n is a, c, g, or t
ctttgtacaaaaaagttggcgtggggcgagtccggctccttcggttcttctccgccgggattatcctcgacttacactggcggccccttgggcaacgagatagcgtcgggcaacggtggcgccgcggcaggcgacgacgaggacgggcagaacctttggtcctgcatcctcagcgaggtctccacccgctcgcgctccaagctccctgcggggaagaacgtgctactgctgggtgaagatggagctggaaaaacaagcttaataagaaaaattcagggaatagaggagtataagaaaggaagaggattggaatatttgtacttaaatgtgcatgatgaagacagggatgatcaaacaagatgtaatgtttggatcttagatggagacctatatcacaaaggcctccttaaattttcactggatgccgtatctctgaaggatactctagttatgctggttgttgacatgtcaaagccttggactgctttggattctttacagaaatgggcaagtgttgttagagaacatgttgacaaactgaaaatccctcctgaagaaatgaaacaaatggaacaaaagttgattagagacttccaagaatatgtagagccaggagaagacttcccggcttctccccagagaagaaatactgcgtcacaagaagacaaagatgacagtgtagttttacctctgggtgcggatacacttacacataacttgggcattccagtactagtagtttgcacaaagtgtgatgccattagtgtattggagaaagaacatgactacagagatgaacattttgattttattcagtcacatatccggaagttttgtttacagtatggtgcagcacttatttacacttcagtaaaagaaaacaaaaatatagacttagtatataaatacatcgttcagaaactatatggatttccctataagattcctgctgttgttgtggaaaaggatgcagtatttattccagcagggtgggataatgataagaaaataggaatattacatgaaaattttcaaacattaaaagcagaagataattttgaagacatcataactaaaccacctgttcgaaagtttgtacatgagaaggaaattatggcagaagatgatcaggtgtttcttatgaagctacagtcccttttagcaaagcaaccaccaactgcagctggaaggcctgtggatgcctcaccaagagtcccaggaggctccccacgaacaccaaatagatctgtatcatctaatgttgccagcgtgtcacccattcctgctgggtcaaaaaaaattgatccaaacatgaaagctggagctacaagtgaaggcgttctggcaaatttcttcaacagtttgttgagtaaaaagactggctctccaggaggccctggtgtgagtggtggtagccctgcaggtggggctggaggtggaagcagtggtttaccaccatccaccaaaaagtcaggccagaagcctgtcttagatgttcatgcagaactagacagaattacacgaaaaccagttacagtttctcccacaacacctacatctcctacggaaggagaagcttcttgaagataccaaataaagccatttattctgttttctgggataatgtaaacatgcctctgccttttccttcaaaagtggaattagaaagctggagtgcttcttcagatggactaaatttatgtcnnnnnnnnnnnnnnnnnnnnnnnnnnngttacccattttttagaaggagccgtacagaagaaaaattattctacattatgtaggattggctgtttgcattgccattttgcataagaaagtaatttttgattttgaaaat

SEQ ID NO: 186445 - DNA, 857 bp, Homo Sapiens
gctcgccggggccaccaaactgcagcagcgccacgcgtgcgttgagagggtcgtcgtccctccgggccagcgtcagccgccgcgccacatgctccacgaagcgccgggctttgtggaagttctgctcacccagccgctcggagccgtccagcaggaagacgatgtccacgggccgctgcgtgcactgtgccacggacagctctgtttggcagggaaggtctgggcacacgatctgagggtccgggcagaggacgtcctccatgtcatcgatgaacttctcagcgaccaggtcggagaacagcgtcatgttgcgcacctgctgtggcttgtcgcaggcgatggagtagaggttttcactctcgtgcttctcgtggaacatgtccccgatgccgatggccgtcactgtgacgtcgcggtcgcacagcgcccgcaagttgaggtcatcgtcccgagggtcgtggcgcccgtccgtgatgactaccgcaaacacacgtgtcttctggcgccggctctccttgatgaggcggtcgtaggcaaacttgagggctgagggtgtccaggtgccacctgcaatccactcgaggttcttgacagcctccttgaagctcgacagggagtcgatatgttcgtcgtccagctggatggcctcaaaggtgccctcgtggctgtactgcaccacgcccacacgcgtccctgtctcggacttggggtccttagcgatggcacccagcctgttgaccacgttgatgacgaagttcttctccagtgtgaagttggtgtacccaatgctctcggagctgtcgatgacgaagaccacgtccagggcgccacagcgctccaacttttttgtacaaagt

SEQ ID NO: 186446 - DNA, 2673 bp, Homo Sapiens
ttggtgcttactcggcgcccgcgcctcgggccgtcgggagcggagcctcctcgggaccaggacttcagggccacaggtgctgccaagatgctccagggcacctgctccgtgctcctgctctggggaatcctgggggccatccaggcccagcagcaggaggtcatctcgccggacactaccgagagaaacaacaactgcccagagaagaccgactgccccatccacgtgtacttcgtgctggacacctcggagagcgtcaccatgcagtcccccacggacatcctgctcttccacatgaagcagttcgtgccgcagttcatcagccagctgcagaacgagttctacctggaccaggtggcgctgagctggcgctacggcggcctgcacttctctgaccaggtggaggtgttcagcccaccgggcagcgaccgggcctccttcatcaagaacctgcagggcatcagctccttccgccgcggcaccttcaccgactgcgcgctggccaacatgacggagcagatccggcaggaccgcagcaagggcaccgtccacttcgccgtggtcatcaccgacggccacgtcaccggcagcccctgcgggggcatcaagctgcaggccgagcgggcccgcgaggagggcatccggctcttcgccgtggcccccaaccagaacctgaaggagcagggcctgcgggacatcgccagcacgccgcacgagctctaccgcaacgactacgccaccatgctgcccgactccaccgagatcgaccaggacaccatcaaccgcatcatcaaggtcatgaaacacgaagcctacggagagtgctacaaggtgagctgcctggaaatccctgggccctctggccccaagggctaccgtggacagaagggtgccaagggcaacatgggtgagccgggagagcctggccagaagggaagacagggagacccgggcatcgaaggccccattggattcccaggacccaagggcgttcctggcttcaaaggagagaagggtgaatttggagccgacggtcgcaagggggcccctggcctggctggcaagaacgggaccgatggacagaagggcaagctggggcgcatcggacctcctggctgcaagggagaccctggaaaccggggccccgacggttacccgggggaagcagggagtccaggggagcgaggagaccaaggcggcaagggggaccctggccgcccaggacgcagagggcccccgggagaaatcggggccaagggaagcaaggggtatcaaggcaacagtggagccccaggaagtcctggtgtgaaaggagccaagggcgggcctgggccccgcggacccaaaggcgagccggggcgcaggggagaccccggcaccaagggcagcccaggcagcgatggccccaagggggagaagggggaccctggccctgaggggccccgcggcctggctggagaggttggcaacaaaggagccaagggagaccgaggcttgcctggacccagaggcccccagggagctcttggggagcccggaaagcagggatctcggggagaccccggtgatgcaggaccccgtggagactcaggacagccaggccccaagggagaccccggcaggcctggattcagctacccaggaccccgaggagcacccggagaaaaaggcgagcccggcccacgcggccccgagggaggccgaggcgactttggcttgaaaggagaacctgggaggaaaggagagaaaggagagcctgcggatcctggtccccctggtgagccaggccctcgggggccaagaggagtcccaggacccgagggtgagcccggcccccctggagaccccggtctcacggagtgtgacgtcatgacctacgtgagggagacctgcgggtgctgcgactgtgagaagcgctgtggcgccctggacgtggtcttcgtcatcgacagctccgagagcattgggtacaccaacttcacactggagaagaacttcgtcatcaacgtggtcaacaggctgggtgccatcgctaaggaccccaagtccgagacagggacgcgtgtgggcgtggtgcagtacagccacgagggcacctttgaggccatccagctggacgacgaacatatcgactccctgtcgagcttcaaggaggctgtcaagaacctcgagtggattgcaggtggcacctggacaccctcagccctcaagtttgcctacgaccgcctcatcaaggagagccggcgccagaagacacgtgtgtttgcggtggtcatcacggacgggcgccacgaccctcgggacgatgacctcaacttgcgggcgctgtgcgaccgcgacgtcacagtgacggccatcggcatcggggacatgttccacgagaagcacgagagtgaaaacctctactccatcgcctgcgacaagccacagcaggtgcgcaacatgacgctgttctccgacctggtcgctgagaagttcatcgatgacatggaggacgtcctctgcccggaccctcagatcgtgtgcccagaccttccctgccaacagagctgtacgtggcacagtgcacgcatcggccccgtggacatcgtcttcctgctggacggctccgagcggctgggtgagcaaaacttccacaaggccccgggccttcttggagaatgtggcgcggcg

SEQ ID NO: 186447 - DNA, 2009 bp, Homo Sapiens
  misc_feature (130)..(144): n is a, c, g, or t
  misc_feature (412)..(461): n is a, c, g, or t
  misc_feature (1893)..(1901): n is a, c, g, or t
gccaactttgtacaaaaaagttggaatagattttaaagtacaagccaaatgattttcattggtggaactgacacaaaaaaagtaacttaaaaacaagaaacttggttattgaataaacagataagttttnnnnnnnnnnnnnnnctacttcatctaccagtaattgatgtgtttattatctgcctcagaagccagggttggaggaagaactttagatatggatattaatgcttttgccattatacctaatttttgagaacagcaagccctatttgaccactctcttcagcctgtgtgttcctgctgttttgaagtaatcaaatgctgtgcatggtattttacctgagctgcaacctgttatggacttgaacttctgtttaagttgaaagcaagagtccctgagtataaaggnnnnnnnnnnnnnnnnnnnnnnnnnnnnnnnnnnnnnnnnnnnnnnnnnntacccattggtgatgttttttaaaaaaatcttgctttcagctttcaggagttaatattctttgttttaatttgataattggatatggttgatttatattgggtttaaactgtggagctttcatgtttactgtaatttagtcttaaaatattttttacttagtaaccagtgcttttgataatgtggttggcaacaaaccagcaactatttagaagtgtcataagagttcattctttgagtattgggaaagttaattcagatcctactcaaaaagcatcttcacatattaaaagattcagacagggatctgtgtagaggagtaatttgcagttatttaacataaacctgatttgcagtgatctctaagtaattctgcaaaatccggtattactatgtcaagttattgcttttggtaaattgtctgacccagttattaatgaaagaatatggatttaaaaatttttaaactaaataatttgtgctgtcacagaaatggtattgttgctcttgtttactgggtataatttcccaatgcattgatgtgaagggatagaaaatctaaactaatttagttatccattggggggtgtatttactgtgatgaagatgagacagatgccatcagagctttgtgaatcagctggggtgttttcactgataaacaacacatagcaggtgtgcattcattacaaatatatgtatctgccaaggtggagccactttaaagagtgagttttgtcttgtatctaaagtggatacaagcgtatgtttaaactgcaagatttttacttgctagagaatctgttttaatatagtggtttggcctctgattatttataggttttataaattttagaatcaatttctctttaagtggctcagatttttcaactcttgtgcacataaaattgagttgaagttcattgtgcctttttttctttatccaaattttgagttaaagcttcatatggtaactgcatcctgttcggacactatagtctaaatttttgaaactgtgtggtgttcgctaaaagtaggaataacaacgtaaaagctaattaaggtcacaaacttcggtgaaacccttaaaagtccaaatcttcttgatattgtgaaccgtaccccttccagtttagtttcttctggactttccttacttaactgacagttaccttttaaaatttgcacacattatgattaaaattgggcctctactgtgatgattcctatttcctctcatgttttaaagtgcaaactaacatttaagtgaacattagcatcaagtagtgcagacacttgtatgcatttccttgattcaatttgtgaccttaccagttttgaattggaattgcaccatttcgtagataaaggaaactaagtatattgctgcacttttaagttttcaaaacagtgtctaaaaattgcattgttannnnnnnnnaaactcagtttaaaaagactaaaacgttctttcaaaagaggcatctaaatgtgttcctaattttgtatatgggcttaggttttgtaaccaataaaaaaagctgctatc

SEQ ID NO: 186448 - DNA, 1246 bp, Homo Sapiens
  misc_feature (194)..(203): n is a, c, g, or t
  misc_feature (1050)..(1112): n is a, c, g, or t
ttttaatctgcaaaactattttaaagaaaaatgtcctaaacagtgagcaaaagaaaacacaatagtgagaatttaacacaatcacaagtcctgtgaagtaaatgttaaaacttcttacatactttgcacttacaagggtgtgtatatatttgcaccaatttcaagcacatcatcaaactgtatatattgaaatnnnnnnnnnngtaaaacaatacaaaattcagtaactagcattttttaaaagagcctccaatgcttatctccagtctttagggatagtacaaacttggatctttgatgttcaatttatttgcaatggttcttggcaaacactaacagaccacatgacaagtgtgtcagccaccatggaaatgcacagattttagaagatgagtttgggtaacatctgttattttcatgatgtccatgctttattttcttactcaataacaagatggccacaaagtcatctaacaactggaaaagctgttagatcctatcttcatgctcaactagatttctttcctgtttacatcttgttgagagaattaaaagctttggatttgattccagcattgagtgcagaggtacacttgtcggtcctatactgcttctgttttggtagagaggttttcttcattcagctgacaattcccattgtgctgtattttgttttcctcagtccttggtgcatccttgtcatctacttctttgctcacacttgaatctggttctttattgtgctctttctctttaagtgaagtactgttcttctccaacttctccttcccatctctatcattagaactctttctcatagacgttgaacgttctctctctcttctttcactgatgtggtccctttctttttctctctttttatccttcttatttctgctcctgggggacggagatctagaagatttcctttttatggtttttgatgttcttggcgatctggaagaactcctgctcctcctcctacgcctttccctgctggaactacgagatcttcgcgatgcattgtaactcctgggtggtgttctggannnnnnnnnnnnnnnnnnnnnnnnnnnnnnnnnnnnnnnnnnnnnnnnnnnnnnnnnnnnnnntttgtcctgttccttttccttctctttgtctcgatccttctcatgctctttttcccgttctctctctctgtccttttccttgtcttttcccggtccttttcccgttccttgtcccggtctttgtttttaccccg

SEQ ID NO: 186449 - DNA, 1787 bp, Homo Sapiens
  misc_feature (83)..(92): n is a, c, g, or t
  misc_feature (261)..(286): n is a, c, g, or t
  misc_feature (1608)..(1617): n is a, c, g, or t
ccccaaaaaaacttacctttattaaaaacagggaactaaaaataacaaattccaacttttgctctatttctacttatatatcnnnnnnnnnncagctgttgatgcaaaacacactctttcacaatctttccatatgcccccaagcattcttgtatcaaaataacctgtttaccacccaaccgtatggggctgaatgattaaaatgaccatctatactttacatagtaaagcatcttccaaaattttaaggtacacagggannnnnnnnnnnnnnnnnnnnnnnnnncagtaattctgaacacatgaagagtgattaagcagcttcataatcaaatcaggcttcattacttgcaacaagggcaactctttccattccccactaaatactaaagtttcaatcttattaacattaaaagaaaactcaagttgaaaccaagtaactaacatgctattcagctttttagatctaaaaaagtaactcttcccatgaggtaaggcaactgagtaatctgattgtattagattgcattaaaataattatacttaacttttaatacactaattaaaaggtattacttttttggaaatacaacaataatgagttcagaaaccacaagttatagtactggggaaaaacattagcagtgctgtcactttactatttgcatactttctgtaaaaagtgagcctaagaatgatggatgacctgtatcttaaactcaagtaaacgtatccttaaacataaaaccaataacctcccatatactcctaagtccttaagtacaatttctgcacatcatttatgaaaagatgattgagaggtaataaggccatccaatgtagacaactaaagggttttcttcaatttaaggaaaataagaacatgtttcattttcaattatcacagtataaaactgatggtcccaaagctgcatgactctaatgtcattcttgaaaacaggacttccttctcattttaggtgaaatcagtaagaagctcttctgacatatcacttacacacttctctatgggtatgcatgaaatatccatctagattccatatgaattgagaatgactagcacatataaaattctagaaaacagtataccacattgtagaaggcactaaagcttcagcttgtgctcccatagcccattttgaaaagccagtttccttttttataagggcacctttgccacctacagctgacaagacacactgcaatattattcataataagcttggaaatgtcaagaaaatttaaaaagaaatgctcactttgtgggtagtcccaatgattctaaacactgaatactaattcatcattattagtattcaacacggttgctcttccttttgaaagagaacagtagcatgcattgtcagttttttaatccacttatttaagcaattttaatctgcaaaactattttaaagaaaaattgtcctaaacagtgagcaaaagaaaacacaatagtgagaatttaacacaatcacaagtcctgtgaagtaaatgttaaaacttcttacatactttgcacttacaagggtgtgtatatatttgcaccaatttcaagcacatcatcaaactgtatatattgaaatnnnnnnnnnngtaaaacaatacaaaattcagtaactagcattttttaaaagagcctccaatgcttatctccagtctttagggatagtacaaacttggatctttgatgttcaatttatttgcaatggttcttggcaaacactaacagaccacatggacaagtgtgtcccaacttttttgta

SEQ ID NO: 186450 - DNA, 1304 bp, Homo Sapiens
  misc_feature (969)..(978): n is a, c, g, or t
aacgggaaaaagagcatgagaaggatcgagacaaagagaaggaaaaggaacaggacaaagaaaaggaacgagaaaaagacagatccaaagagatagatgaaattttaaagaaggataaaaaatccagaacaccacccatgagttacaatgcatcgcgaagatctcgtatttccagcagggaaaggcgtaggaggaggagcaggagttcttccagatcgccaagaacatcaaaaaccttaaaaaggaaatcttctttatctccgtcccccatgagcagaaataagaaggataatattagagaaaaagaaagggaccacatcagtgaaagaagagagagagaacgttcaacgtctatgagaaagagttctaatgatagagatgggaaggagaagttggagaagaacagtacttcacttaaagagaaagagcacaataaagaaccagattcaagtgtgagcaaagaagtagatgacaaggatgcaccaaggactgaggaaaacaaaatacagcacaatgggaattgtcagctgaatgaagaaaacctctctaccaaaacagaagcagtataggaccgacaagtgtacctctgcactcaatgctggaatcaaatccaaagcttttaattctctcaacaagatgtaaacaggaaagaaatctagttgagcatgaagataggatctaacagcttttccagttgttagatgactttgtggccatcttgttattgagtaagaaaataaagcatggacatcatgaaaataacagatgttacccaaactcatcttctaaaatctgtgcatttccatggtggctgacacacttgtcatgtggtctgttagtgtttgccaagaaccattgcaaataaattgaacatcaaagatccaagtttgtactatccctaaagactggagataagcattggaggctcttttaaaaaatgctagttactgaattttgtattgttttacnnnnnnnnnnatttcaatatatacagtttgatgatgtgcttgaaattggtgcaaatatatacacacccttgtaagtgcaaagtatgtaagaagttttaacatttacttcacaggacttgtgattgtgttaaattctcactattgtgttttcttttgctcactgtttagacaatttttctttaaaatagttttgcagattaaaattgcttaaataagtggattaaaaaactgacaatgcatgctactgttctctttcaaaaggaagagcaaccgtgttgaatactaataatgatgaattagtattcagtgtttagaatcattgggactacccacaaa

SEQ ID NO: 186451 - DNA, 2475 bp, Homo Sapiens
ttggagcggtggctgggctgcgcttgggtccgtcgctgcttcggtgtccctgtcgggcttcccagcagcggcctagcgggaaaagtaaaagatgtctgaatatattcgggtaaccgaagatgagaacgatgagcccattgaaataccatcggaagacgatgggacggtgctgctctccacggttacagcccagtttccaggggcgtgtgggcttcgctacaggaatccagtgtctcagtgtatgagaggtgtccggctggtagaaggaattctgcatgccccagatgctggctggggaaatctggtgtatgttgtcaactatccaaaagataacaaaagaaaaatggatgagacagatgcttcatcagcagtgaaagtgaaaagagcagtccagaaaacatccgatttaatagtgttgggtctcccatggaaaacaaccgaacaggacctgaaagagtattttagtacctttggagaagttcttatggtgcaggtcaagaaagatcttaagactggtcattcaaaggggtttggctttgttcgttttacggaatatgaaacacaagtgaaagtaatgtcacagcgacatatgatagatggacgatggtgtgactgcaaacttcctaattctaagcaaagccaagatgagcctttgagaagcagaaaagtgtttgtggggcgctgtacagaggacatgactgaggatgagctgcgggagttcttctctcagtacggggatgtgatggatgtcttcatccccaagccattcagggcctttgcctttgttacatttgcagatgatcagattgcgcagtctctttgtggagaggacttgatcattaaaggaatcagcgttcatatatccaatgccgaacctaagcacaatagcaatagacagttagaaagaagtggaagatttggtggtaatccaggtggctttgggaatcagggtggatttggtaatagcagagggggtggagctggtttgggaaacaatcaaggtagtaatatgggtggtgggatgaactttggtgcgttcagcattaatccagccatgatggctgccgcccaggcagcactacagagcagttggggtatgatgggcatgttagccagccagcagaaccagtcaggcccatcgggtaataaccaaaaccaaggcaacatgcagagggagccaaaccaggccttcggttctggaaataactcttatagtggctctaattctggtgcagcaattggttggggatcagcatccaatgcagggtcgggcagtggttttaatggaggctttggctcaagcatggattctaagtcttctggctggggaatgtagacagtggggttgtggttggttggtatagaatggtgggaattcaaatttttctaaactcatggtaagtatattgtaaaatacatatgtactaagaattttcaaaattggtttgttcagtgtggagtatattcagcagtatttttgacatttttctttagaaaaaggaagagctaaaggaattttataagttttgttacatgaaaggttgaaatattgagtggttgaaagtgaactgctgtttgcctgattggtaaaccaacacactacaattgatatcaaaaggtttctcctgtaatattttatccctggacttgtcaagtgaattctttgcatgttcaaaacggaaaccattgattagaactacattctttaccccttgttttaatttgaaccccaccatatggatttttttccttaagaaaatctccttttaggagatcatggtgtcacagtgtttggttcttttgttttgttttttaacacttgtctcccctcatacacaaaagtacaatatgaagccttcatttaatctctgcagttcatctcatttcaaatgtttatggaagaagcacttcattgaaagtagtgctgtaaatattctgccataggaatactgtctacatgctttctcattcaagaattcgtcatcacgcatcacaggccgcgtctttgacggtgggtgtcccatttttatccgctactctttatttcatggagtcgtatcaacgctatgaacgcaaggctgtgatatggaaccagaaggctgtctgaacttttgaaaccttgtgtgggattgatggtggtgccgaggcatgaaaggctagtatgagcgagaaaaggagagagcgcgtgcagagacttggtggtgcataatggatattttttaacttggcgagatgtgtctctcaatcctgtggctttggtgagagagtgtgcagagagcaatgatagcaaataatgtacgaatgttttttgcattcaaaggacatccacatctgttggaagacttttaagtgagtttttgttcttagataacccacattaaatgaatgtgttaagtgaaatgatacttgtactccccctacccctttgtcaactgctgtgaatgctgtatggtgtgtgttctcttctgttactga

SEQ ID NO: 186452 - DNA, 1542 bp, Homo Sapiens
cagtaactgatgcactgctttaaactatgcccctcattattgttcagtttaatatagttttatatatggctcacagcagtgttcagaaccaggggattattcctaaggaaattaagtggaatgaagaaaaataatacaaactttcattacttttgatttataattgctccttaaattatagttcaaagcccgttttataatttaaattgtggtgctgttgtagtgagataaagtacagtaaatatttttaagctatgacttaagaattctgaaccttcttcacttccatagttgaccaagtcataacagctacattttaaacagttttaaatacaaatggattcagtgtcattgctaagtccataataaaaattatcttaatggtccaaggaggtaaacaggctattggatttactcgaaagaacacaaacgctccacagtaagcaagtgtccctgtgttgtttggatctctccaatctggcattccctcctaataccgtgtccagcactttggatcaataaatcccacttcacagaagctaaaataatattgaaattttgtcagctagggctgaccagtggttacgttttccacagggtaatgcatttgcaaggacatcaatcctcttcctctgggtggctctctttgatggatgcatttccatgatgaaatgacaaggcactctctctggctttctgtgggtcagtgtccttggcaggtcttacaacacatctgtctgaagtatgctcgactgcagaacttgaacttcagcaccagtgggcaataagccactttattcacatctttgcactcttcagtattagaaatgggggtactgtcacatttgctttcacactgctgcattgatggaggccgaacagtttctagacagtcactagatgcctgtccggtgtaggagagacactgcacagttctcatctgctgtccaaggccacactgagcagaacactggccccagtctcctgtgacccagcgaggaggagggcagcggcccaaactgcagcggatgcggacaggaggtttgctttcctctggacattgtgcagctgggaatgtcttagaaaggtcactgctcttgcacagaacaatccgatgcttgaatcctggaccacattttggagtacactcagaccagtccaaagccacccactgtggtggacatgactggttgttgcagggctctttttcgacaggccggtgtgttaaacaaccactgtagtccagcgtctcctcctcagaaggtccgatcttcctgatgcagagcactgcccttgtgcgcatcccaccatcacaagtcttgctgcattccaaccaatccccaatgaaccactcaggtgggcagggctcagtgttgcaggctctttgattttcaggtggcttactgtcaggatcacagtaattgttctggacaatggagttgtcatccaaccttttacagaccacctcctgtctttggacaccttgagaaaaggaggacatcattaattgaagagaagtttaccttccattaagttagccaa

SEQ ID NO: 186453 - DNA, 2312 bp, Homo Sapiens
  misc_feature (476)..(520): n is a, c, g, or t
  misc_feature (1818)..(1830): n is a, c, g, or t
ttgggttgttttttccttaacagaccttcctgatgtaaatgataaacaaagccaagccataaatgatctcctagaagccatatatccaagtgtggacaaacgagaatatattattaagctagaacccatagaaactaatcaaaatgcagtatttcaatatatttcgaggactgataatcctattgaagtcacagagtcaagcagtactcctgaacaaaccgaagttcagatacaggaaactagcactgaacagtcaaaaacagtaccggttacagatacagaggtggaaactgtagagccccctcctgttgagattgttacagatgaagttgcacctacatctgatgaacaacctcaggagtcgcaggctgacttggaaacttctgacaattctgattttggtcaccagttgatatgttgtctttgtagaaaagaattcaattctagacgaggtgttcgccgtcacattcgaaaannnnnnnnnnnnnnnnnnnnnnnnnnnnnnnnnnnnnnnnnnnnncgaaagaatccaaaccaatcctctaaaggacgcagtaagaatgttctagttccattaagtaggagttgtccagtatgttgtaaatcatttgctacaaaagcgaatgtaaggaggcattttgatgaagttcatagaggactaaggagggattcaattactcctgatatagcaacaaagcctgggcaacctttgttcctggattctatttctcctaaaaaatcttttaagactcgaaaacaaaagtcttcttcaaaggctgaatacaatttaactgcatgcaaatgcctcctttgcaagaggaaatatagttcacaaataatgcttaaaagacatatgcaaattgtccacaagataactctttctggaacaaactctaaaagagaaaaaggccctaataatactgccaacagttcagaaataaaagttaaagttgaaccagcagattctgtagaatcttcacccccttccattacccattctccacagaatgaattaaagggaacaaatcattcaaatgaaaaaaagaacacaccggcagcacagaaaaataaagttaaacaagactctgaaagccctaaatcaactagtccgtcggctgcaggtggccagcaaaaaaccagaaaaccaaaactttcagctggctttgactttaagcaactttactgtaaactttgtaaacgtcagtttacttccaaacagaacttgactaaacacatcgagttgcacacagatggaaataacatttatgttaaattctacaagtgtcctctttgcacttatgaaactcgtcggaaacgtgatgtgatacgacatataactgtggttcataaaaagtcatctcgttatcttgggaaaataacagccagtttagagatcagagctataaaaaagcctattgattttgttctaaataaagtggcaaaaagaggcccttcgagggatgaagcaaaacatagtgattcaaaacatgatggcacttctaactctcctagtaaaaagtatgaagtagctgacgtcggtattgaagtaaaagtcacaaaaaacttttctcttcacagatgcaataaatgtggaaaggcatttgccaaaaagacttaccttgaacatcataagaaaactcataaggcaaatgcttccaattcacctgaaggaaacaaaaccaaaggccgaagtacaagatctaaggctcttgtctgataacttcaagtgatgtacgaaaaggtttggagttcatttttgtggaaagactttaaattggtgttagaaccactaaacatcttcaaatggtactatgaggnnnnnnnnnnnnncatttttctaaatattcaactataactgctgttttctgactaaaataaccatctaaccacttgtttctaaggcactgcctattccagcactttcaagtagctgtgatattacatgttgtcatcacagtccatcagctatccacccttgaccttgtgcatttggtcgacagtttctacaaaaatgttacaaattttgttttctaaacaatttgttgattaagtgatcaacaacctgaagaaaatatcaatttttaattgacaaagactttatatcttagtgattttagttttgtttctctttatttggcaacattttcatctgaattgtatagatatatgattttctagtgagtgtatgttaggaacaaaagacaaaatagtatcaacacattataaatatttagcttactaaatatttgtaattatttttacatccatttatttctagcttgttctccagcacttcagtgtttgaaagtttc

SEQ ID NO: 186454 - DNA, 910 bp, Homo Sapiens
  misc_feature (417)..(429): n is a, c, g, or t
acaaaaaagttggatacttttcccaagtctatatatattttaaaagttcaccttctatacctgtgtcccctgtattaaggcatttaatgtatttaatgagtattaaattagtttcagattcaggttctaaagcaaaatattagtttgagtgctgtgagggttaaatgttgtggtttgattatcacacgtttttttatttgtgtggaaaacttgagatgaaaccatcttttagaagtaatttactgttgcatagttttaaaaactaggttttattagtaaactcaaaagtgttcatttattcccatttctcctcagataacttcaagtgatgtacgaaaaggtttggagttcatttttgtggaaagactttaaattggtgttagaaccactaaacatcttcaaatggtactatgaggnnnnnnnnnnnnncatttttctaaatattcaactataactgctgttttctgactaaaataaccatctaaccacttgtttctaaggcactgcctattccagcactttcaagtagctgtgatattacatgttgtcatcacagtccatcagctatccacccttgaccttgtgcatttggtcgacagtttctacaaaaatgttacaaattttgttttctaaacaatttgttgattaagtgatcaacaacctgaagaaaatatcaatttttaattgacaaagactttatatcttagtgattttagttttgtttctctttatttggcaacattttcatctgaattgtatagatatatgattttctagtgagtgtatgttaggaacaaaagacaaaatagtatcaacacattataaatatttagcttactaaatatttgtaattatttttacatccatttatttctagcttgttctcagcacttcagtgtttgaaagtttc

SEQ ID NO: 186455 - DNA, 1687 bp, Homo Sapiens
ttgggcaaatgattctgttatccctcaaatctgtggtcctgggacgtggttgactccatttcttcaagcagtctacctctttgtacagtatatcattatggttaatcttcttattgcatttttcaacaatgtgtatttacaagtgaaggcaatttccaatattgtatggaagtaccagcgttatcattttattatggcttatcatgagaaaccagttctgcctcctccacttatcattcttagccatatagtttctctgttttgctgcatatgtaagagaagaaagaaagataagacttccgatggaccaaaacttttcttaacagaagaagatcaaaagaaacttcatgattttgaagagcagtgtgttgaaatgtatttcaatgaaaaagatgacaaatttcattctgggagtgaagagagaattcgtgtcacttttgaaagagtggaacagatgtgcattcagattaaagaagttggagatcgtgtcaactacataaaaagatcattacaatcattagattctcaaattggccatttgcaagatctttcagccctgacggtagatacattaaaaacactcactgcccagaaagcgtcggaagctagcaaagttcataatgaaatcacacgagaactgagcatttccaaacacttggctcaaaaccttattgatgatggtcctgtaagaccttctgtatggaaaaagcatggtgttgtaaatacacttagctcctctcttcctcaaggtgatcttgaaagtaataatccttttcattgtaatattttaatgaaagatgacaaagatccccagtgtaatatatttggtcaagacttacctgcagtaccccagagaaaagaatttaattttccagaggctggttcctcttctggtgccttattcccaagtgctgtttcccctccagaactgcgacagagactacatggggtagaactcttaaaaatatttaataaaaatcaaaaattaggcagttcatctactagcataccacatctgtcatccccaccaaccaaattttttgttagtacaccatctcagccaagttgcaaaagccacttggaaactggaaccaaagatcaagaaactgtttgctctaaagctacagaaggagataatacagaatttggagcatttgtaggacacagagatagcatggatttacagaggtttaaagaaacatcaaacaagataaaaatactatccaataacaatacttctgaaaacactttgaaacgagtgagttctcttgctggatttactgactgtcacagaacttccattcctgttcattcaaaacaagcagaaaaaatcagtagaaggccatctaccgaagacactcatgaagtagattccaaagcagctttaataccggattggttacaagatagaccatcaaacagagaaatgccatctgaagaaggaacattaaatggtctcacttctccatttaagccagctatggatacaaattactattattcagctgtggaaagaaataacttgatgaggttatcacagagcattccatttacacctgtgcctccaagaggggagcctgtcacagtgtatcgtttggaagagagttcacccaacatactaaataacagcatgtcttcttggtcacaactaggcctctgtgccaaaatagagtttttaagcaaagag

SEQ ID NO: 186456 - DNA, 654 bp, Homo Sapiens
caaccaataatagccataaacagtgtttgtgaagcatctcctacattccagagcttgatgggtgctcttcattaattctctcatctcatccttacaaccatgctgagtggtgggttttgccagcttcatttcatgtgaggaaactgagtttcagagaagttaaagaacttacccaagggacacagttgatattcaaatccaggcctatgtgactccaagcccatgctctttccaccacactgcctaccaacttgtgtagcatttggcttttaaaagtgctattcatgaccaggcgtgagccactgttcccagcaggaatttcttttttatagtattggataaagtttggtgtttttacagaggagaagcaatgggtcttagctctttctctattatgttatcatcctcccttttttgtacaatatgttgtttacctgaaaggaaggtttctattcgttggttgtggacctggacaaagtccaagtctgtggaacttaaaaccttgaaggtctgtcataggactctggacaatctcacaccttagctattcccagggaaccccagggggcaactgacattgctccaagatgttctcctgatgtagcttgagatataaaggaaaggccctgcacaggtggctgtttcttgtctgtt

SEQ ID NO: 186457 - DNA, 2074 bp, Homo Sapiens
agggagtgctcccatgttctatttttgatttttaaattgctaaccaaagactatttagttctcatgcaattgcatcaaagcaacaaatacttacactctgaactacattgacaaaacttttcacaaaaatttgtgctatcacacaagggcacgaactgtcacaaggctgccgtggatgatcacagggttgatagttgtaaacatggttagaggagccgtctgagtaaagataacatcatgcaggccaatgaatccagggagatggaaacgatcatacacaattaacacgagtacattcttccctactacctgtggagtgtagctggcctgcctttactgaatgcataacattacacatattccggtttccacaacgatggcaaaaaatactctcccacccccaagtgcttatgagttccatctaaagcacggctacatctcagtcccatcccaaagcacttctccttcaactgactcggactcacaccttccagtcagcctccactttacagaagagaattgactggggattcatcagtagacgtcctccattcaaattggtttaacatacagaaggcaattatattagaataacccaagctctaatccagttactattctaaaacaaatgaaaacaaagcagatattgttaagctaataatgagaggaatggaaagatgctaaccctttttcagctgtatctttctgcagtgtgcagcccacaacctgcaaaaacacaaagaaaattaaaccaaatttctgcgggaagctacaaatccaacagagagctgcttaactggatctatctgtgccatgaatacaggaatgcgttaaagccaagagtcatgccctgcccagtttatttttgccatcagtttgaagcaactcaaacagcttgatggctcaggctgccccaggtgtggcaagacgtcatttcctgtgttcatccatgactcctggtcagaactcgtgagctcccaatgctgcacaaagcagcaggtgtgtctgcctgttgatttattctgatgtggatgacactgatcacttcctcttatttcaggcatcataaaccaagcaagtgaactacgtggtcagaaataattcaaccaaaatttcagaagcatctcctaaagccggtgtttcctcttctttttccttggaggagtatccacatcctcagcgggagctggagctatgatgctagattctttgactctaaactcatacacctgtctacatgttttggtcccaattaacctagcaatggcacagaaattgtcatagtaagtgccaatgaggactctaaacattgaggcttcagcaccactccactccacattctcaggaggttcaatatttggcttcatctttattggtgtttgacaccgagaatttgcttcagaggagctcgaagtttcatctttcttctcttcttcttctttatcattgttctctccccccgtttcagtccctgcttccctatcactgtctgtatcctttgattccagcacattaatggtgggggtgctgggcctgctactgttattgggaagccgtcctcttctgcggcctcctggacgttttggtggggtctttatccgctcagcggtgagagcagcagcaaactcctttgctccctccaaatgctggtaacactgtggtccacaaggtttgttgtctagagctgtttctgtgttcttccgcttataagtgttgggtgttgcatgaaaaggatgtaggaagcagtcatatttaaaacatcgcctacagaaaagcgtatgaaaggagtgtaagctttgctctctctgaacagatttagcatttggtccatctatgttgggggtacattcaggaggaagtgcgcctgggagctgctgttcggtgagttctttatatttttcctttagttcttctgctgtgcccttatctggaaacattgaggaaatggcttcaaaaattttatcagaaggaaatttccgaggtgggcggctttctttatcatctcggtgatcctccagatctttctgcttttcttctctttcttcaggatcgtctccatcatcatcatcgccaa

SEQ ID NO: 186458 - DNA, 1220 bp, Homo Sapiens
tacacttcgactagagccatggcgctttcggttttcgtgctgtacattttctgaggagtctactaatccaagatacaggatactatcagctccattttcccgtccatgtgcaataatgagttccatggcctcatccactcttgctctcagagaatcctcacttgctagaaggagaagcagctgagctggggataattccaacaacatgccagtgattttacttgcaaatgctggttgcattgcttgtacacgaggataaagcctctctccaagtgcctgccgatgtgctggcaaaggctcaggatcatcgctaggattcccttcagaggctggtctaaagggcctagtgtcgatggaaagctgtcttctaaagtctctatcccggtccctccgagaacctgctcgcaaaccactactcctcctcatttccctttctctctccctttcccggtctctctctcctcggttccttaatctctgcattaaacttgtgtgggtgcctttgttggcattttggatacactctagatttggcaatttttcatttgataaaaatgcttgtgcaatggctgtataaaaacttcgtgctacaccactgccctctcctggctcatccttaaatgtgacttttactctgtgtacagccattggtgtagtagcacatcttcgaccaaagtgattgttaagctgcctcatagtctgctgaatgagaagatctcgatcccgatcaacctctagtgacaaatctcttgactgctggtttctcagtttttccatttctctgcggaattttgattcttttacccaaaaccacccaattcagttaggattgatccaggttctgctccaacatcttccatgaataccctgccgaacagttctaaagaaaggcgccaacgtcctagcagcatatcatgggaaataaccattcccataaagctacactgtggcctgaaagatgtgagaggtggcccttcactttcagtaagtcctatttctgctagtaagctactttttaattgtgcagcaagatcatgagcagatggccctggttttgaactctcagtttcttctggcagcacgggctgttcttccccttcttttttttgccggttttgcatgttcattacatttttcagattggcagcataagacatttttgttggaagaacctctaggcagtttctatccactgtaacctccattaaacatttccccaa

SEQ ID NO: 186459 - DNA, 2459 bp, Homo Sapiens
  misc_feature (94)..(150): n is a, c, g, or t
ttggcaagcatttttatcaaatgaaaaattgccaaatctagagtgtatccaaaatgccaacaaaggcacccacacaagtttaatgcagagattnnnnnnnnnnnnnnnnnnnnnnnnnnnnnnnnnnnnnnnnnnnnnnnnnnnnnnnnntagtggtttgcgagcaggttctcggagggaccgggatagagactttagaagacagctttccatcgacactaggccctttagaccagcctctgaagggaatcctagcgatgatcctgagcctttgccagcacatcggcaggcacttggagagaggctttatcctcgtgtacaagcaatgcaaccagtgtgcatttgcaagtaaaatcactggcatgttgttggaattatccccagctcagctgcttctccttctagcaagtgaggattctctgagagcaagagtggatgaggccatggaactcattattgcacatggacgggaaaatggagctgatagtatcctggatcttggattagtagactcctcagaaaaggtacagcaggaaaaccgaaagcgccatggctctagtcgaagtgtagtagatatggatttagatgatacagatgatggtgatgacaatgcccctttgttttaccaacctgggaaaagaggattttatactccaaggcctggcaagaacacagaagcaaggttgaattgtttcagaaacattggcaggattcttggactatgtctgttacagaatgaactatgtcctatcacattgaatagacatgtaattaaagtattgcttggtagaaaagtcaattggcatgattttgctttttttgatcctgtaatgtatgagagtttgcggcaactaatcctcgcgtctcagagttcagatgctgatgctgttttctcagcaatggatttggcatttgcaattgacctgtgtaaagaagaaggtggaggacaggttgaactcattcctaatggtgtaaatataccagtcactccacagaatgtatatgagtatgtgcggaaatacgcagaacacagaatgttggtagttgcagaacagcccttacatgcaatgaggaaaggtctactagatgtgcttccaaaaaattcattagaagatttaacggcagaagattttaggcttttggtaaatggctgcggtgaagtcaatgtgcaaatgctgatcagttttacctctttcaatgatgaatcaggagaaaatgctgagaagcttctgcagttcaagcgttggttctggtcaatagtagagaagatgagcatgacagaacgacaagatcttgtttacttttggacatcaagcccatcactgccagccagtgaagaaggattccagcctatgccctcaatcacaataagaccaccagatgaccaacatcttcctactgcaaatacttgcatttctcgactttacgtcccactctattcctctaaacagattctcaaacagaaattgttactcgccattaagaccaagaattttggttttgtgtagagtataaaaagtgtgtattgctgtgtaatattactagcaaattttgtagatttttttccatttgtctataaaagtttatggaagttaatgctgtcatacccccctggtggtaccttaaagagataaaatgcagacattccttgctgagtttatagcttaaaggcctaaggagcactagcaacatttggctatattggtttgctagtcaccaacttctgggtctaaccccagccaaagatgacagcagaacaacataatttacactgtgatttatctttttgctgagggggaaaaaatgtaaatgttctgaaaattcactgctgcctttgtggaaactgtttcagcaaaggttcttgtatagagggaatagggaatttcaaaataaaaaattaagtatgttctgtgttttcattttaactttttttatggtgtttaatttgtggttggctgcaactgtgtatcatgtatatggaacttgtaaaaaagttctcgacattcagatcttaagagatgaaatcacttttacctataaaaaccacttttattgcggtttgactgcattgagctctaggatattaaatgatatcactaatattttgcatgtaatttgctcatttgagtgagggcactttttttgtacatatgatggggccaatgcacaatacttttatcacaatcaactttttctttgtatccctatttcaatgagcagtcagtctcaagaggttactgcacttcagttctaactagacatttgtactaaggtatttcagttatgtaaactcagcctgggcactttctgataactgtaaaatgttttataagatcatgattattgaagatacattttggaaaattttaaatgttcgtgagcagcttaactacttttgtatctagccttttttaagtatcttgttacatttacttttttaaataaagaaattacagaag

SEQ ID NO: 186460 - DNA, 1045 bp, Homo Sapiens
gccaactttgtacaaaaaagttggctgaatgcaagtaaagaagggctgctggcttctggagcagagggcggagatctcacggcttggggtgaagatggaactccattaggacacacgcggttccaaggggctgatgatgttaccagtgtcttattttctccctcctgtcccaccaagctctatgcctcacatggagaaaccattagtgtactggatgtcaggtccctcaaagattccttggaccattttcatgtgaatgaagaagaaatcaattgtctttcattgaatcaaacggaaaacctgctggcttctgctgacgactctggggcaatcaaaatcctagacttggaaaacaagaaagttatcagatccttgaagagacattccaatatctgctcctcagtggcttttcggcctcagaggcctcagagcctggtgtcatgtggactggatatgcaggtgatgctgtggagtcttcaaaaagcccgaccactctggattacaaatttacaggaggatgaaacagaagaaatggaaggcccacagtcacctggtcagctcttaaaccctgccctagcccattctatctctgtggcttcgtgtggtaatatttttagttgtggtgcagaagatggtaaggttcgaatctttcgggtgatgggagttaagtgtgaacaggaactgggatttaagggccacacttcaggggtatcccaggtctgctttctcccagaatcctatttgctgcttactggagggaatgatgggaagatcacgttgtgggatgcaaacagtgaagttgagaaaaaacagaagagtcccacaaaacgtacccacaggaagaaacctaaagaggaacttgcaccaagcagggtggaaatactaacgcttcagtaacagatgaggaagagcatggcaacattttaccaaagctaaatattgacatggagaaaaagtgaactggctcttgggtacaaaaataaagggacacaaaatatattagtagctgatcaaactagttgtatatctgtataccccttaatga

SEQ ID NO: 186461 - DNA, 1531 bp, Homo Sapiens
  misc_feature (128)..(144): n is a, c, g, or t
  misc_feature (248)..(316): n is a, c, g, or t
  misc_feature (583)..(591): n is a, c, g, or t
  misc_feature (736)..(751): n is a, c, g, or t
  misc_feature (830)..(838): n is a, c, g, or t
cccaattttgtcataaaaagtgttctgaacccgatttccaaagacataacggtaatatatgaactacaatattgcaaattttgagctgatgtgtgactgtattggggaaaatagaggcatcacatagnnnnnnnnnnnnnnnnnacagtctcatgttctgaggaaagtcataagtcatggttctcaaacacaagaaacacctagagagcatgttaagatgcagatggaagattccaggtccacttagnnnnnnnnnnnnnnnnnnnnnnnnnnnnnnnnnnnnnnnnnnnnnnnnnnnnnnnnnnnnnnnnnnnnnggttctaatgcaagtggtctgagttcaggtttaaggaatcctggtcataacactcgcaggtaccacaggaatggtgagaattaacttttacaagagatggtgaaaactgtccaaagaaaagccattttgcttctgttaaaaacaatttcttaaatattcaacttttcaggaaaccacctaaagataaatgttaacttttctaattctgtaaaaggaggagtattaatttagtaaagtagttaaaatacaaaaaatggaaatctgccnnnnnnnnnaaaggatctatcaaacttccctcaattgtaatcaatttttactaagtagcacaaggtttaaagaaatatatattgaaaaggatcagggtgggacagacacattgggaaccacaaaacctcttccaagagttaaaaataaacaccnnnnnnnnnnnnnnnnagcaaaagtgaaaaatgtaagcatatatttttctaatttatttttgaattggataataagctgtgaatcagcactaggnnnnnnnnnattggataattatcctttaaagagttgtttaacagtttagactttaaaaatgtgttatgtaggctgacttctgaaaagcaaaataaagtaccctaataaaggcagcaaaatgcattaatccactatgaatggagttttacattttaatttatgcctaatatttataaaagaatttcattcataggctactcacagttgttatctgacgcatacagaagtgttaaacaaccaattgctagttcagtagtttcctcatgacatctaatgttaagcaaaaattagtatgcatatttcaacatcaccagtaaccaatacttttcaaaatgaaaaaagtttcaattataccatgctttttttcaaatcatgctcttatttatacagatctcaagttcatactcattagttttaaaaagatccaaaactggatggcaggtacattttattctgattctttctttatcgttagcacgcttcccagaagtccataaacttctccatttgcgctgtgtgggcgagaagcattatttcccatatggctattgtaagggcttcttaaattaaagaaagaagctttcgtttctgcagtaggaagtaactcttctttggctgtgacctgtgagacactttcagcagatgaagcccccctccaaatgtccttgtcttgtgtttctcgactggtaacagaattgccaa

SEQ ID NO: 186462 - DNA, 1433 bp, Homo Sapiens
  misc_feature (333)..(349): n is a, c, g, or t
  misc_feature (453)..(521): n is a, c, g, or t
  misc_feature (940)..(955): n is a, c, g, or t
  misc_feature (1034)..(1042): n is a, c, g, or t
cattgttcttaggacaatggttttaataaaggttaaggatgcattcaggagaagtttccaaaccatcctggaatcactgagtttggtaagtggccctgtttttccatccctaaggctaactaagtagatgttactcattagaacacacaaataatcacagattttcgtgagatgttgagccagatatgaaagttatcccctccacccaatttttgtcataaaaagtgttctgaacccgatttccaaagacataacggtaatatatgaactacaatattgcaaattttgagctgatgtgtgactgtattggggaaaatagaggcatcacatagnnnnnnnnnnnnnnnnnacagtctcatgttctgaggaaagtcataagtcatggttctcaaacacaagaaacacctagagagcatgttaagatgcagatggaagattccaggtccacttagnnnnnnnnnnnnnnnnnnnnnnnnnnnnnnnnnnnnnnnnnnnnnnnnnnnnnnnnnnnnnnnnnnnnnggttctaatgcaagtggtctgagttcaggtttaaggaatcctggtcataacactcgcaggtaccacaggaatggtgagaattaacttttacaagagatggtgaaaactgtccaaagaaaagccattttgcttctgttaaaaacaatttcttaaatattcaacttttcaggaaaccacctaaagataaatgttaacttttctaattctgtaaaaggaggagtattaatttagtaaagtagttaaaatacaaaaaatggaaatctgccttttttttaaaggatctatcaaacttccctcaattgtaatcaatttttactaagtagcacaaggtttaaagaaatatatattgaaaaggatcagggtgggacagacacattgggaaccacaaaacctcttccaagagttaaaaataaacaccnnnnnnnnnnnnnnnnagcaaaagtgaaaaatgtaagcatatatttttctaatttatttttgaattggataataagctgtgaatcagcactaggnnnnnnnnnattggataattatcctttaaagagttgtttaacagtttagactttaaaaatgtgttatgtaggctgacttctgaaaagcaaaataaagtaccctaataaaggcagcaaaatgcattaatccactatgaatggagttttacattttaatttatgcctaatatttataaaagaatttcattcataggctactcacagttgttatctgatgcatacagaagtgttaaacaaccaattgctagttcagtagtttcctcatgacatctaatgttaagcaaaaattagtatgcatatttcaacatcaccagtaaccaatacttttcaaaatgaaaaaagtttcaattataccatgctttttttcaaatcatgctcttatttatacagatctcaccaa

SEQ ID NO: 186463 - DNA, 1191 bp, Homo Sapiens
ttgggtcacgtgatcttttacagttcttagacctggtagcacttaatacaaccaggtacctcaccttctggtcccatttctaaaggatgtccagcttccccatgagtgtggtgcagtaactcttcaggagcactgtttgagcccagaatcagaaccctgctaaggcggtcctgtttgcttctgtacctgcaggggaggtcatcaaggcttgggacattgccatagccaccatgaaggtgggggaggtgtgccacatcacctgcaaaccagaatatgcctacggttcagcaggcagtcctccaaagattccccccaatgccacgcttgtatttgaggtggagttgtttgagtttaagggagaagatctgacggaagaggaagatggcggaatcattcgcagaatacagactcgcggtgaaggctatgctaagcccaatgagggtgctatcgtggaggttgcactggaagggtactacaaggacaagctctttgaccagcgggagctccgctttgagattggcgagggggagaacctggatctgccttatggtctggagagggccattcagcgcatggagaaaggagaacattccatcgtgtacctcaagcccagctatgcttttggcagtgttgggaaggaaaagttccaaatcccaccaaatgctgagctgaaatatgaattacacctcaagagttttgaaaaggccaaggagtcttgggagatgaattcagaagagaagctggaacagagcaccatagtgaaagagcggggcactgtgtacttcaaggaaggtaaatacaagcaagctttactacagtataagaagatcgtgtcttggctggaatatgagtctagtttttccaatgaggaagcacagaaagcacaggcccttcgactggcctctcacctcaacctggccatgtgtcatctgaaactacaggccttctctgctgccattgaaagctgtaacaaggccctagaactggacagcaacaacgagaagggcctcttccgccggggagaggcccacctggccgtgaatgactttgaactggcacgggctgatttccagaaatgtcctgcagctctaccccaacaacaaagccgccaagacccagctggctgtgtgccagcagcggatccaaagcagcttgcccgggagaagaagctctatgccaatatgtttgaga

SEQ ID NO: 186464 - DNA, 1756 bp, Homo Sapiens
ttggggctcggcggcagccgggctcggagtggacgtgccactatggggtcgtccaagaagcatcgcggagagaaggaggcggccgggacgacggcggcggccggcaccgggggtgccaccgagcagccgccgcggcaccgggaacacaaaaaacacaagcaccggagtggcggcagtggcggtagcggtggcgaacgacggaagcggagccgggaacgtgggggcgagcgcgggagcgggcggcgcggggccgaagctgaggcccggagcagcacgcacgggcgggagcgcagccaggcagagccctccgagcggcgcgtgaagcgggagaagcgcgatgacggctacgaggccgctgccagctccaaaactagctcaggcgatgcctcctcactcagcatcgaggagactaacaaactccgggcaaagttggggctgaaacccttggaggttaatgccatcaagaaggaggcgggcaccaaggaggagcccgtgacagctgatgtcatcaaccctatggccttgcgacagcgagaggagctgcgggagaagctggcagctgccaaggagaagcgcctgctgaaccaaaagctggggaagataaagaccctaggagaggatgacccctggctggacgacactgcagcctggatcgagaggagccggcagctgcagaaggagaaggacctggcagagaagagggccaagttactggaggagatggaccaagagtttggtgtcagcactctggtggaggaggagttcgggcagaggcggcaggacctgtacagtgcccgggacctgcagggcctcaccgtggagcatgccattgattccttccgagaaggggagacaatgattcttaccctcaaggacaaaggcgtgctgcaggaggaggaggacgtgctggtgaacgtgaacctggtggataaggagcgggcagagaaaaatgtggagctgcggaagaagaagcctgactacctgccctatgccgaggacgagagcgtggacgacctggcgcagcaaaaacctcgctctatcctgtccaagtatgacgaagagcttgaaggggagcggccacattccttccgcttggagcagggcggcacggctgatggcctgcgggagcgggagctggaggagatccgggccaagctgcggctgcaggctcagtccctgagcacagtggggccccggctggcctccgaatacctcacgcctgaggagatggtgacctttaaaaagaccaagcggagggtgaagaaaatccgcaagaaggagaaggaggtagtagtgcgggcagatgacttgctgcctctcggggaccagactcaggatggggactttggttccagactgcggggacggggtcgccgccgagtgtccgaagtggaggaggagaaggagcctgtgcctcagcccctgccgtcggacgacacccgagtggagaacatggacatcagtgatgaggaggaaggtggagctccaccgccggcgtccccgcaggtgctggaggaggacgaggcggagctggagctgcagaagcagctggagaagggacgccggctgcgacagttacagcagctacagcagctgcgagacagtggcgagaaggtggtggagattgtgaagaagctggagtctcgccagcggggctgggaggaggatgaggatcccgagcggaaaggggccatcgtgttcaacgccacgtccgagttctgccgcaccttgggggagatccccacctacgggctgg

SEQ ID NO: 186465 - DNA, 1631 bp, Homo Sapiens
  misc_feature (1439)..(1447): n is a, c, g, or t
ttggtaaagatcgtacagaagaatgatccatttgtggtggactgctcagataagcttgggcgtgtgcaggagtttgacagtggcctgctgcactggcggattggtgggggggacaccactgagcatatccagacccacttcgagagcaagacagagctgctgccttcccggcctcacgcaccctgcccaccagcccctcggaagcatgtgacaacagcagagggtacaccagggacaacagaccaggaggggcccccacctgatggacctccagaaaaacggatcacagccactatggatgacatgttgtctactcggtctagcaccttgaccgaggatggagctaagagttcagaggccatcaaggagagcagcaagtttccatttggcattagcccagcacagagccaccggaacatcaagatcctagaggacgaaccccacagtaaggatgagaccccactgtgtacccttctggactggcaggattctcttgccaagcgctgcgtctgtgtgtccaataccattcgaagcctgtcatttgtgccaggcaatgactttgagatgtccaaacacccagggctgctgctcatcctgggcaagctgatcctgctgcaccacaagcacccagaacggaagcaggcaccactaacttatgaaaaggaggaggaacaggaccaaggggtgagctgcaacaaagtggagtggtggtgggactgcttggagatgctccgggaaaacaccttggttacactcgccaacatctcggggcagttggacctatctccataccccgagagcatttgcctgcctgtcctggacggactcctacactgggcagtttgcccttcagctgaagcccaggaccccttttccaccctgggccccaatgccgtcctttccccgcagagactggtcttggaaaccctcagcaaactcagcatccaggacaacaatgtggacctgattctggccacaccccccttcagccgcctggagaagttgtatagcactatggtgcgcttcctcagtgaccgaaagaacccggtgtgccgggagatggctgtggtactgctggccaacctggctcagggggacagcctggcagctcgtgccattgcagtgcagaagggcagtatcggcaacctcctgggcttcctagaggacagccttgccgccacacagttccagcagagccaggccagcctcctccacatgcagaacccaccctttgagccaactagtgtggacatgatgcggcgggctgcccgcgcgctgcttgccttggccaaggtggacgagaaccactcagagtttactctgtacgaatcacggctgttggacatctcggtatcaccgttgatgaactcattggtttcacaagtcatttgtgatgtactgtttttgattggccagtcatgacagccgtgggacacctnnnnnnnnngtgtgtgtgtgcgtgtgtggagaacttaaaactgactgttgccctttatttatgcaaaaccacctcagaatccagtttaccctgtgctgtccagcttctcccttgggaaaaagtctctcctgtttctctctcctccttccacctcccctccctccatcacctcacgcctttctgttccttgtcc

SEQ ID NO: 186466 - DNA, 1128 bp, Homo Sapiens
  misc_feature (240)..(258): n is a, c, g, or t
  misc_feature (317)..(346): n is a, c, g, or t
  misc_feature (617)..(629): n is a, c, g, or t
actttgtacaaaaaagttggctgtgctgtccagcttctcccttgggaaaaagtctctcctgtttctctctcctccttccacctcccctccctccatcacctcacgcctttctgttccttgtcctcaccttactcccctcaggaccctaccccaccctctttgaaaagacaaagctctgcctacatagaagactttttttattttaaccaaagttactgttgtttacagtgagtttggggnnnnnnnnnnnnnnnnnnntggctttcccagtccttgcatcaacgggatgccacatttcataactgtttttaatggtnnnnnnnnnnnnnnnnnnnnnnnnnnnnnnttctgaaggacaaaaaaggtgactgctgaactgtgtgtggtttattgttgtacattcacaatcttgcaggagccaagaagttcgcagttgtgaacagaccctgttcactggagaggcctgtgcagtagagtgtagaccctttcatgtactgtactgtacacctgatactgtaaacatactgtaataataatgtctcacatggaaacagaaaacgctgggtcagcagcaagctgtagtttttaaaaatgtttttagttaaacgttgaggagnnnnnnnnnnnnnggcttttcccccaaagtatcatgtgtgaacctacaacaccctgacctctttctctcctccttgattgtatgaataaccctgagatcacctcttaaaactggttttaacctttacctgcagcggctacgctgccacgtgtgtatatatatgacgttgtacattgcacatacccttggatccccacagtttggtcctcctcccagctacccctttatagtatgacgagttaacaagttggtgacctgcacaaagcgagacacagctatttaatctcttgccagatatcgcccctcttggtgcgatgctgtacaggtctctgtaaaaagtccttgctgtctcagcagccaatcaacttatagattacttttttctgggtttttgttatgttttgctttctttctcatcgaggtgtgaaaaagttctaggttcagttgaagttctgatgaagaaacacaattgagaatttttccacgataaaatctgcatatttgtatttcaa

SEQ ID NO: 186467 - DNA, 1115 bp, Homo Sapiens
ttggcttaagagaacactatactgttcatactaaggaaaaacagtttgtttgtcaaacatgtggaaagcagtttttaagagagcgtcagttgcgactgcacaatgatatgcacaaaggcatggccagtggtgaaatagggccttctaaacctgtggagaagtgagagatctgaatttggagaggacatggggaagaatcaatcttcaacagataatctttaagtacagacccaggaatatcagatctgaagtggcaccatcttttctgtcttcctgacaaacttccatcaacccaaaaagttccagttgcaaagatccaagaaaactcagtaaagatcactttggaatcactttgttgtaacaaaattgattcatggtgactctaatatttgtgtaaatctgctgaagaaaagtaactagaaaattcatacaacatcagtggttacagctatactaaaataaaactttatatgctaattatcttcaagggtctttctaaaataaaaggggttgttaggctactgcaaatataaagagacataatcacaaatctatttatatagatataaataattctaaacttaaaatcactagaattatagcttaaatattatgaaatgtacttagtcaacttaaaaacttacaccaaaaatctgtagtttagagtgtaagaagtaatgggtacagagaaaaaaaatttaagaccaatattttaacaggataatttggttattactcactatagtaaaacacttgcccttcttccttttccactgtatatgccagtcacaatcttgatcatttatatgaatgaaactcccttttaaacctgttaacttgaaggagaacagaaatggtattacttcatagtggtagatttccacaaatcagacacattattttcttctgaacttggcaatataacctaataagggcagattaagtttctgttaaaatacttattctcaatatttatgtataaaccatgcttctcagctttcaaatttcaagataaaatttaagtattcagtaaaatgatggttaacatgttttaaaaaatctttaatggaagaagttaaatatttggtgagattttagtctggctataaatgctt

SEQ ID NO: 186468 - DNA, 366 bp, Homo Sapiens
agagaggccgggacgcggaccgggccggggcgcccacagccgcccgacggcgcccagagagcgcgcgccccgcagccccgcgcctagcccgccgggcatggggcgcgcggcagccgcctgaagccccggcctggcccggccgcacccggccggaggcggagggcagagcgcgcgcccagttgcccgggcaccaaataggagcgcggcgtgcgggagggcccaagcaggactggaaatgtcctggccgcgccgcctcctgctcaaatacctgttcccggccctcctgcttcacgggctgggagagggttctgccctccttcatccagacagcaggtctcatcctaggtccttatagaaaagtgcctg

SEQ ID NO: 186469 - DNA, 2422 bp, Homo Sapiens
  misc_feature (76)..(115): n is a, c, g, or t
ttgggcagccgacgcggagcgaggccggccgccgggcacttcctgtggaggccgcagcgggtgcgggcgccgacgnnnnnnnnnnnnnnnnnnnnnnnnnnnnnnnnnnnnnnnntcccgccgtcgccatgggccagaacgacctgatgggcacggccgaggacttcgccgaccagttcctccgtgtcacaaagcagtacctgccccacgtggcgcgcctctgtctgatcagcaccttcctggaggacggcatccgtatgtggttccagtggagcgagcagcgcgactacatcgacaccacctggaactgcggctacctgctggcctcgtccttcgtcttcctcaacttgctgggacagctgactggctgcgtcctggtgttgagcaggaacttcgtgcagtacgcctgcttcgggctctttggaatcatagctctgcagacgattgcctacagcattttatgggacttgaagtttttgatgaggaacctggccctgggaggaggcctgttgctgctcctagcagaatcccgttctgaagggaagagcatgtttgcgggcgtccccaccatgcgtgagagctcccccaaacagtacatgcagctcggaggcagggtcttgctggttctgatgttcatgaccctccttcactttgacgccagcttcttttctattgtccagaacatcgtgggcacagctctgatgattttagtggccattggttttaaaaccaagctggctgctttgactcttgttgtgtggctctttgccatcaacgtatatttcaacgccttctggaccattccagtctacaagcccatgcatgacttcctgaaatacgacttcttccagaccatgtcggtgattgggggcttgctcctggtggtggccctgggccctgggggtgtctccatggatgagaagaagaaggagtggtaacagtcacagatccctacctgcctggctaagacccgtggccgtcaaggactggttcggggtggattcaacaaaactgccagcttttatgtatcctcttcccttcccctcccttggtaaaggcacagatgttttgagaactttatttgcagagacacctgagaatcgatggctcagtctgctctggagccacagtctggcgtctgacccttcagtgcaggccagcctggcagctggaagcctcccccacgccgaggctttggagtgaacagcccgcttggctgtggcatctcagtcctatttttgagtttttttgtgggggtacaggagggggccttcaagctgtactgtgagcagacgcattggtattatcattcaaagcagtctccctcttatttgtaagtttacatttttagcggaaactactaaattattttgggtggttcagccaaacctcaaaacagttaatctccctggtttaaaatcacaccagtggctttgatgttgtttctgccccgcattgtattttataggaatactgaaaacatttagggacacccaaagaatgatgcagtattaaaggggtggtagaagctgctgtttatgataaaagtcatcggtcagaaaatcagcttggattggtgccaagtgttttattgggtaacaccctgggagttttagtagcttgaggcaaggtggaggggcaagaagtccttggggaagctgctggtctgggtgctgctggcctccaagctggcagtgggaagggctagtgagaccacacaggggtagccccagcagcagcaccctgcaagccagcctggccagctgctcagaccagcttgcagagccgcagccgctgtgggcagggggtgtggcaggagctcccagcactggagacccacggactcaacccagttacctcacatggggccttttctgagcaaggtctcgaaagcgcaggccgccctggctgagcagcaccgccctttcccagctgcactcgccctgtggacagccccgacacaccactttcctgaggctgtcgctcactcagattgtccgtttgctatgccgaatgcagccaaaattcctttttacaatttgtgatgccttaccgatttgatcttaatcctgtatttaaagttttctaacactgccttatactgtgtttctctttttgggggagcttaactgcttgttgctccctgtcgtctgcaccatagtaaatgccacaagggtagtcgaacacctctctggcccctagacctatctggggacaggctggctcagcctgtctccagggctgctgcggcccagccccgagcctgcctccctcttggcctctcatccattggctctgcagggcagggtgaggcaggtttctgctcataagtgcttttggaagtcacctacctttttaacacagccgaactagtcccaacgcgtttgcaaatattcccctggtagcctacttccttaccccc

SEQ ID NO: 186470 - DNA, 1610 bp, Homo Sapiens
  misc_feature (320)..(426): n is a, c, g, or t
ttggcctagattcaagatgaatagcgatcaagttacactggttggtcaagtgtttgagtcatatgtttcggaataccataagaatgatattcttctaatcttgaaggaaagggatgaagatgctcattacccagttgtggttaatgccatgactctgtttgagaccaacatggaaatcggggaatatttcaacatgttccccagtgaagtgcttacaatttttgatagtgcactgcgaaggtcagccttgacaattctccagtccctttctcagcctgaggctgtttccatgaaacagaatcttcatgccaggatatcannnnnnnnnnnnnnnnnnnnnnnnnnnnnnnnnnnnnnnnnnnnnnnnnnnnnnnnnnnnnnnnnnnnnnnnnnnnnnnnnnnnnnnnnnnnnnnnnnnnnnnnnnnctgagctggtgagggaacacatacctaaaaccaaggatgtgggacactttttatctgtcactgggacagtgattcgaacaagtctggtgaaggttctggagtttgagcgggattacatgtgtaacaaatgcaagcatgtgtttgtgatcaaggctgactttgagcagtattacaccttttgccggccatcctcgtgtcccagcttggagagctgtgattcctctaaattcacttgcctctcaggcttgtcttcgtctccaaccaggtgtagagattaccaggaaatcaaaattcaggaacaggttcaaaggctatctgttggaagtattccacgatctatgaaggttattctggaagatgacttagtggatagttgcaaatctggtgatgacctcactatttacgggattgtaatgcaacggtggaagccctttcagcaagatgtgcgctgtgaagtggagatagtcctgaaagcaaattacatccaagtaaataatgagcagtcctcagggatcatcatggatgaggaggtccaaaaggaattcgaagatttttgggaatactataagagcgatccctttgcaggaaggaatgtaatattggctagcttgtgccctcaagtgtttggaatgtatctagtaaagcttgctgtggccatggtgctggctggtgggattcaaaggactgatgctacaggaacacgggtcagaggagaatctcatcttttattggttggggatcctggcacagggaaatctcagttcctcaaatatgcagcaaagattacaccaagatctgtgctgaccacaggaattggatctactagtgcaggtctgacggtaactgctgtaaaagactcaggagaatggaatttggaggctggggcattagttcttgcagatgcgggcctttgctgtattgatgagttcaatagcctcaaagagcatgataggaccagtatccatgaagcaatggagcaacaaaccataagtgttgctaaactggcctcgtgtgcaagctgaacacaagaccaccatcctggcagcaacgaaccccaaaggccagtacgacccccaggagtccgtgtctgtgaacattgccctcggcagcccactcttaagtcgatttgacctgatcctggttttgcttgataccaagaatgaagactgggatcgtatcatttc

SEQ ID NO: 186471 - DNA, 1642 bp, Homo Sapiens
  misc_feature (699)..(718): n is a, c, g, or t
tcccatgtcaatccttcatgacgtaggctgttggtggcattaatgcgtttcaccatgactttcttcatattgtttttgggtcagtaacccttctgttatgcttttactttcttcaaatttgggtaacacaactgcaatgtagctttcagtagatggcttttcttgaagaatagatggcttatggaggatgttttcattcacttccatcaaacgtcctctaacacaactagacacagtatattcttcaccatctgagcagtaaatcttacagagaggtgcaagctctgttagaaactgtgccccccgcttaaatttcccagagaccttgttctgaagtctgctacagttggtactgatctgataggaaatgcttttaattgtttttccactttgaagaactggatgagattctgccaatgtgatgacacatattcggttagagtgctgtagtatacagtggtcctcacaaaattttcctttgacatccggtttgtaccagcgagtgaagtatcgatccacgagcgaaggcaccaccggctccgcggcttcgggctcggtagccatggcgacctccggcgccgccacccccgccctccgggaccccagcgcttcctccgcgcagcccggactgggcgtgctcttccggcgcacagcgcgtgtcgtgcgcacgcgcgctgctctcaggtccgcaggttccannnnnnnnnnnnnnnnnnnnaattacagtgctttggggttcgacatcaaaacagagatcaaatacaaaagtttgggcagatgggcaagagggcagagggacaggggacgcggccaatgtagctcctctacctctacggtgccaggcctacaaagaaggccggccgccgtaagtgaccagaagcgggcccggcctcgccccctccgcctggtgacgtcactcccgcgccgcactcccagtgctgcggctgcctagttgacgcacccattgagtcgctggcttctttgcagcgcttcagcgttttcccctggagggcgcctccatccttggaggcctagtgccgtcggagagagagcgggagccgcggacagagacgcgtgcgcaattcggagccgactctggaattgaaagaagaagatgtcacgaagaccatgtaccctgcaccagttaccagcagtgtctacctgtccagggatcctgacgggaataaaatagaccttgtctgcgatgctatgagagcagtcatggagagcataaatcctcataaatactgcctatccatacttacatctcatgtaaagaagacaaccccagaactggaaattgtactgcaaaaagtacacgagcttcaaggaaatgctccctctgatcctgatgctgtgagtgctgaagaggccttgaaatatttgctgcatctggtagatgttaatgaattatatgatcattctcttggcacctatgactttgatttggtcctcatggtagctgagaagtcacagaaggatcccaaagaatatcttccatttcttaatacacttaagaaaatggaaactaattatcagcgggtttactatagacaaatacttgaaacgatatgaaaaagccattggccacctcagcaaatgtggacctgagtacttcccagaatgcttaaacttgataaaa

SEQ ID NO: 186472 - DNA, 1670 bp, Homo Sapiens
aactttgtacaaaaaagttggcacaccctgtgaatcaagtcacattcttagcacaccctcaaaagagtaatgaccttgctgttctagatgccagtaaccagatttctgtttataaatgtggtgattgtccaagtgctgaccctacagtgaaactgggagctgtgggtggaagtggatttaaagtttgccttagaactcctcatttggaaaagagatacaaaatccagtttgagaataatgaagatcaagatgtaaacccgctgaaactaggccttctcacttggattgaagaagacgtcttcctggctgtaagccacagtgagttcagcccccggtctgtcattcaccatttgactgcagcttcttctgagatggatgaagagcatggacagctcaatgtcagttcatctgcagcggtggatggggtcataatcagtctatgttgcaattccaagaccaagtcagtagtattacagctggctgatggccagatatttaagtacctttgggagtcaccttctctggctattaaaccatggaagaactctggtggatttcctgttcggtttccttatccatgcacccagaccgaattggccatgattggagaagaggaatgtgtccttggtctgactgacaggtgtcgctttttcatcaatgacattgaggttgcgtcaaatatcacgtcatttgcagtatatgatgagtttttattgttgacaacccattcccatacctgccagtgtttttgcctgagggatgcttcatttaaaacattacaggccggcctgagcagcaatcatgtgtcccatggggaagttctgcggaaagtggagaggggttcacggattgtcactgttgtgccccaggacacaaagcttgtattacagatgccaaggggaaacttagaagttgttcatcatcgagccctggttttagctcagattcggaagtggttggacaaacttatgtttaaagaggcatttgaatgcatgagaaagctgagaatcaatctcaatctgatttatgatcataaccctaaggtgtttcttggaaatgtggaaaccttcattaaacagatagattctgtgaatcatattaacttgttttttacagaattgaaagaagaagatgtcacgaagaccatgtaccctgcaccagttaccagcagtgtctacctgtccagggatcctgacgggaataaaatagaccttgtctgcgatgctatgagagcagtcatggagagcataaatcctcataaatactgcctatccatacttacatctcatgtaaagaagacaaccccagaactggaaattgtactgcaaaaagtacacgagcttcaaggaaatgctccctctgatcctgatgctgtgagtgctgaagaggccttgaaatatttgctgcatctggtagatgttaatgaattatatgatcattctcttggcacctatgactttgatttggtcctcatggtagctgagaagtcacagaaggatcccaaagaatatcttccatttcttaatacacttaagaaaatggaaactaattatcagcggtttactatagacaaatacttgaaacgatatgaaaaagccattggccacctcagcaaatgtggacctgagtacttcccagaatgcttaaacttgataaagataaaaaacttg

SEQ ID NO: 186473 - DNA, 1587 bp, Homo Sapiens
tacaaaaaagttgggtttctgcgggtgaggctggcgcccgtaccatgagcgaggcggacgggctgcgacagcgccggcccctgcggccgcaggtcgtcacagacgatgatggccaggccccggaggctaaggacggcagctcctttagcggcagagttttccgagtgaccttcttgatgctggctgtttctctcaccgttcccctgcttggagccatgatgctgctggaatctcctatagatccacagcctctcagcttcaaagaacccccgctcttgcttggtgttctgcatccaaatacgaagctgcgacaggcagaaaggctgtttgaaaatcaacttgttggaccggagtccatagcacatattggggatgtgatgtttactgggacagcagatggccgggtcgtaaaacttgaaaatggtgaaatagagaccattgcccggtttggttcgggcccttgcaaaacccgagatgatgagcctgtgtgtgggagacccctgggtatccgtgcagggcccaatgggactctctttgtggccgatgcatacaagggactatttgaagtaaatccctggaaacgtgaagtgaaactgctgctgtcctccgagacacccattgaggggaagaacatgtcctttgtgaatgatcttacagtcactcaggatgggaggaagatttatttcaccgattctagcagcaaatggcaaagacgagactacctgcttctggtgatggagggcacagatgacgggcgcctgctggagtatgatactgtgaccagggaagtaaaagttttattggaccagctgcggttcccgaatggagtccagctgtctcctgcagaagactttgtcctggtggcagaaacaaccatggccaggatacgaagagtctacgtttctggcctgatgaagggcggggctgatctgtttgtggagaacatgcctggatttccagacaacatccggcccagcagctctggggggtactgggtgggcatgtcgaccatccgccctaaccctgggttttccatgctggatttcttatctgagagaccctggattaaaaggatgatttttaagctctttagtcaagagacggtgatgaagtttgtgccgcggtacagcctcgtcctagaactcagcgacagcggtgccttccggagaagcctgcatgatcccgatgggctggtggccacctacatcagcgaggtgcacgaacacgatgggcacctgtacctgggctctttcaggtcccccttcctctgcagactcagcctccaggctgtttagccctcccagatagctgcccctgccacgcaggccaggagtcttcacactcaggcaccaggcctggtccaggaggagctgtggacacagtcgtggttcaagtgtccacatgcacctgttagtccctgagaggtggtgggaatggctgcttcattcctcgaggatgcccgggccccacctgggcttgtctttctgtttagagggaagtgtaacatatctgccatgaggaacataaattcatgtaaagccattttctcttaaacaaaacaaaactttctaagtacagtcattctct

SEQ ID NO: 186474 - DNA, 1127 bp, Homo Sapiens
ctttgtacaaaaaagttggctcctgcagaagactttgtcctggtggcagaaacaaccatggccaggatacgaagagtctacgtttctggcctgatgaagggcggggctgatctgtttgtggagaacatgcctggatttccagacaacatccggcccagcagctctggggggtactgggtgggcatgtcgaccatccgccctaaccctgggttttccatgctggatttcttatctgagagaccctggattaaaaggatgatttttaagctctttagtcaagagacggtgatgaagtttgtgccgcggtacagcctcgtcctagaactcagcgacagcggtgccttccggagaagcctgcatgatcccgatgggctggtggccacctacatcagcgaggtgcacgaacacgatgggcacctgtacctgggctctttcaggtcccccttcctctgcagactcagcctccaggctgtttagccctcccagatagctgcccctgccacgcaggccaggagtcttcacactcaggcaccaggcctggtccaggaggagctgtggacacagtcgtggttcaagtgtccacatgcacctgttagtccctgagaggtggtgggaatggctgcttcattcctcgaggatgcccgggccccacctgggcttgtctttctgtttagagggaagtgtaacatatctgccatgaggaacataaattcatgtaaagccattttctcttaaacaaaacaaaactttctaagtacaatcattctctaggatttgggaagctccttgcacttggaacagggctcaggtgggtggagcagtaaggcactacccagagagcttgctgctgcggccctgtcctgcggcctcaaagttcttctttactatatataacgtgcggtcatacctttcttcgttgtggtggggatggaagagcagagggagcatggcccaggggtgttgaggccagcggtgagagctcgtgttagccaagacatggaactgtgttctcaagggttatgtggggcgtgggctctccatagtgtgtatgaaaagcttgttgactctagcggctcagagaggactttgctgggtttctttctgtgaatatctccgtgctgaccatg

SEQ ID NO: 186475 - DNA, 1104 bp, Homo Sapiens
ttgggaggcggaagtggcgcggccgcggaggggcctggagtgcggcggcggcgggacccggagcaggagcggcggcagcagcgactgggggcggcggcggcgcgttggaggcggccatggcaaagcagtacgactcggtggagtgccctttttgtgatgaagtttccaaatacgagaagctcgccaagatcggccaaggcaccttcggggaggtgttcaaggccaggcaccgcaagaccggccagaaggtggctctgaagaaggtgctgatggaaaacgagaaggaggggttccccattacagccttgcgggagatcaagatccttcagcttctaaaacacgagaatgtggtcaacttgattgagatttgtcgaaccaaagcttccccctataaccgctgcaagggtagtatatacctggtgttcgacttctgcgagcatgaccttgctgggctgttgagcaatgttttggtcaagttcacgctgtctgagatcaagagggtgatgcagatgctgcttaacggcctctactacatccacagaaacaagatcctgcatagggacatgaaggctgctaatgtgcttatcactcgtgatggggtcctgaagctggcagactttgggctggcccgggccttcagcctggccaagaacagccagcccaaccgctacaccaaccgtgtggtgacactctggtaccggcccccggagctgttgctcggggagcgggactacggcccccccattgacctgtggggtgctgggtgcatcatggcagagatgtggacccgcagccccatcatgcagggcaacacggagcagcaccaactcgccctcatcagtcagctctgcggctccatcacccctgaggtgtggccaaacgtggacaactatgagctgtacgaaaagctggagctggtcaagggccagaagcggaaagtgaaagacaggctgaagcctatgtgcgtgacccatacgcactggacctcatcaccagctgctggtgctggaccctgcccagcgcatcgacagcgatgacgccctcaaccacgacttcttctggtccgaccccatgccctccgacctcaagggcatgctctccacc

SEQ ID NO: 186476 - DNA, 3285 bp, Homo Sapiens
ttggagtttctttctgtttttgcgaggacacagattatccttatttgggtaccaccatggacacctataaggaactgattgagaggattcctgagttgaacaaagtggcacgagcagctgcagaggtcgctggtcagttcgtgattaaactaacccatgatgttgaattgaacctggactatgagaggtacaacagccaactgctttcatttgtgagggatctgaaccaatacagagcagacataaaggaaatgggcctgagtttacagtggctgtattctgctcgtggagacttcttccgtgctacttccagactaacaacagatttcgggaatgctgagaaaacagacagatttgtcatgaagaaactcaatgatcgtgtcatgagagtggagtatcacttcctctctccctacgtatctccaaaagagtctcctttccgacatgtcttctggggctccggctctcacacgctgccagctttactggagaacttgaaactgcgtaaacaaaataacggtgcttttaatgaaacgctgttcagaaaccagttggctctagctacttggactattcagggagctgcaaatgccctctctggtgacgtttgggacattgacaatgagttttaaatgtgatacccatagcttccatgagaacagcagggtagtctggtttctagacttgtgctgatcgtgctaaattttcagtagggctacaaaacctgatgttaaaattccatcccatcatcttggtactactagatgtctttaggcagcagcttttaatacagggtagataacctgtacttcaagttaaagtgaataaccacttaaaaaatgtccatgatggaatattcccctatctctagaattttaagtgctttgtaatgggaactgcctctttcctgttgttgttaatgaaaatgtcagaaaccagttatgtgaatgatctctctgaatcctaagggctggtctctgctgaaggttgtaagtggtcgcttactttgagtgatcctccaacttcatttgatgctaaataggagataccaggttgaaagaccttctccaaatgagatctaagcctttccataaggaatgtagctggtttcctcattcctgaaagaaacagttaactttcagaagagatgggcttgttttcttgccaatgaggtctgaaatggaggtccttctgctggataaaatgaggttcaactgttgattgcaggaataaggccttaatatgttaacctcagtgtcatttatgaaaagaggggaccagaagccaaagacttagtatattttcttttcctctgtcccttcccccataagcctccatttagttctttgttatttttgtttcttccaaagcacattgaaagagaaccagtttcaggtgtttagttgcagactcagtttgtcagactttaaagaataatatgctgccaaattttggccaaagtgttaatcttaggggagagctttctgtccttttggcactgagatatttattgtttatttatcagtgacagagttcactataaatggtgtttttttaatagaatataattatcggaagcagtgccttccataattatgacagttatactgtcggttttttttaaataaaagcagcatctgctaataaaacccaacagatactggaagttttgcatttatggtcaacacttaagggttttagaaaacagccgtcagccaaatgtaattgaataaagttgaagctaagatttagagatgaattaaatttaattaggggttgctaagaagcgagcactgaccagataagaatgctggttttcctaaatgcagtgaattgtgaccaagttataaatcaatgtcacttaaaggctgtggtagtactcctgcaaaattttatagctcagtttatccaaggtgtaactctaattcccattttgcaaaatttccagtacctttgtcacaatcctaacacattatcgggagcagtgtcttccataatgtataaagaacaaggtagtttttacctaccacagtgtctgtatcggagacagtgatctccatatgttacactaagggtgtaagtaattatcgggaacagtgtttcccataattttcttcatgcaatgacatcttcaaagcttgaagatcgttagtatctaacatgtatcccaactcctataattccctatcttttagttttagttgcagaaacattttgtggtcattaagcattgggtgggtaaattcaaccactgtaaaatgaaattactacaaaatttgaaatttagcttgggtttttgttacctttatggtttctccaggtcctctacttaatgagatagtagcatacatttataatgtttgctattgacaagtcattttaactttatcacattatttgcatgttacctcctataaacttagtgcggacaagttttaatccagaattgaccttttgacttaaagcagagggactttgtatagaaggtttgggggctgtggggaaggagagtcccctgaaggtctgacacgtctgcctacccattcgtggtgatcaattaaatgtaggtatgaataagttcgaagctccgtgagtgaaccatcattataaacgtgatgatcagctgtttgtcatagggcagttggaaacggcctcctagggaaaagttcatagggtctcttcaggttcttagtgtcacttacctagatttacagcctcacttgaatgtgtcactactcacagtctctttaatcttcagttttatctttaatctcctcttttatcttggactgacatttagcgtagctaagtgaaaaggtcatagctgagattcctggttcgggtgttacgcacacgtacttaaatgaaagcatgtggcatgttcatcgtataacacaatatgaatacagggcatgcattttgcagcagtgagtctcttcagaaaacccttttctacagttagggttgagttacttcctatcaagccagtacgtgctaacaggctcaatattcctgaatgaaatatcagactagtgacaagctcctggtcttgagatgtcttctcgttaaggagatgggccttttggaggtaaaggataaaatgaatgagttctgtcatgattcactattctagaacttgcatgacctttactgtgttagctctttgaatgttcttgaaattttagactttctttgtaaacaaatgatatgtccttatcattgtataaaagctgttatgtgcaacagtgtggagattccttgtctgatttaataaaatacttaaac

SEQ ID NO: 186477 - DNA, 1763 bp, Homo Sapiens
ttggcttattaacaatttaccttcttgcccttgagatatggtgggagtgaaaaaaactacagatactggagtggattcagagataagatagccacatgacattatccaggggaagaacatttatgtgctggtgcaggcatttgataggatatgtaaccttgtattatccaccacagataatactactgtatatgggtctcctcctcctaaaggccatcccttctccatccccttccccgtcctcttcctcttcacctgaatgttaagatgtccatctgcttccaaaacacctagctgtccagcacgtcctatactctcctgttattgctggttttctttgtcttttcccttagggtgtgaatacggactaattggaactctctttcagatagcattacaactctgccagatctaactccacttttcatcagcattgacccagagagggacacaaaagaagccatcgcaaattatgtgaaagaattttctcccaaactggttggcttgactggcacgagagaagaggtcgatcaagtggccagagcatacagagtgtattacagccctggccccaaggacgaagatgaagactacatagtggatcacacaataataatgtacttgattggaccagatggtgagtttctagattattttggccagaacaagaggaagggagaaatagctgcttcaattgccacacacatgaggccatacagaaaaaagagctagccaaagcagtgttgctggatgcagtattctcttgctaagaggaaggaaactgtctcgcataggagcctatataaatataaacatatatacgtgcactctacagaatggccttcataccatgagaacatttctgttttggatggggatgttacccttgcgttcaaccaaaattgattcttggaactgtaaagattacaacccaaagtctcccaggaagctgtggggagaccagaggatcaagctgaagtgaagccagtgaagagcccacctgtggaaggacatggcggggcgaggcacagccagtgcattcctgcctgcgaacaggccctcccagcagctttgccgcctctccatcgtcttgggcccttgctcaaatagctgtgggactgaatttcacagaaaagaatataatttccatagtgctcttgcttgcctcttcttgagttctttgctcttctgagttcttggtggctaataacagtcagattagggtctctgccattcagagttgatgcttgaaaactttagttttccttattaatgaatatcactatcagatttgactaatgaagaggaaatctattgtttgggggaaaaaaaacatcagtttgatttctctaggggttcttttatgtgatttttagctaagtggtgtgccaggttttcagtgacataccaaatggaaataagaggatattgatcacgagtgtgatgctgagtacctttctgcatatactggattgtactttgtgtaaagtaaacatactcagttttgctgttcagacaagcgtgatctttttcatgggtgatgagtgggtacatagatggctgcacacagttctcaggaaagagacccacaggctccagcgggcaggtgggtgggacgcttgctgaagtgcagttccccagacccagagctgaattcactgaatctgcagtatgatgcagagacctgcttccatgacagataccccaggtgactcggatgctggcggactgggaccatcccttaagaaagtgttttttgggga

SEQ ID NO: 186478 - DNA, 1986 bp, Homo Sapiens
  misc_feature (1365)..(1426): n is a, c, g, or t
ttggatcctgatgaaattggcatcgagttagaagccaccagcaagaagtcagccaagagatgtgttaaaggactgaagatggaggaggaaggcacagaagataatggcctggaagacgattccagagacgggcaggaggacatggaagcaagtctggagaacctgcagaatatgggcatgatggacatgagtgtgctagacgaaactgaagtggcgaatagcagtgctccagattttggggaggatggcacggacggccttctcgattccttttgtgatagtaaagaatacgtggctgcacagctgagacagctcccggctcagcccccagagcatgctgtggatggggaaggatttaagaacactttggaaacttcatcgttgaacttcaaagtaactccggacattgaagaatcccttttggagccagaaaatgagaaaatactcgacattttgggggaaacttgtaaatctgagccagtaaaagaagaaagttccgagctggagcagccatttgcacaggacacaagtagcgtggggccagacagaaagcttgcggaggaagaggacctatttgacagcgcccatccggaagagggtgatttagatttggccagcgagtcaacagcacacgctcagtcgagcaaggcagacagcctgttagcggtagtgaaaagggagcccgcggagcagccaggcgatggcgagaggacggactgtgagcctgtagggctagagccggcagttgagcagagtagtgcggcctccgagctcgcggaggcctctagcgaggagctcgcagaagcacccacggaagccccaagcccagaagccagagatagcaaagaagacgggaggaagtttgattttgacgcttgtaatgaagtccctccggctcctaaagagtcctcaaccagtgagggcgctgatcagaaaatgagctcttttaaggaagaaaaagatataaagccaatcattaaagatgaaaaaggtcgggtcggcagcggttctggtcggaacctgtgggtcagcgggctgtcctccacaacacgcgctacggatctcaagaaccttttcagcaagtatgggaaggttgtcggggccaaagtggtaacgaacgcccgcagcccgggggctcgatgctatggattcgtcaccatgtcgacatctgacgaggcgaccaagtgcatcagccatctccacagaactgagctgcatggacgaatgatctccgtagagaaggccaaaaatgagcctgctgggaaaaagctttccgacagaaaagagtgcgaagtgaagaaggaaaaattatcgagtgtcgacagacatcattctgtggagatcaaaattgaaaaaactgtaatnnnnnnnnnnnnnnnnnnnnnnnnnnnnnnnnnnnnnnnnnnnnnnnnnnnnnnnnnnnnnnaaaaagaccaggatgagctgaaacccggacctacaaatcggtctagagtcaccaaatcaggaagcagaggaatggagcggacggtcgtgatggataaatcgaaaggagagcccgtcattagcgtgaaaaccacaagcaggtccaaagagagaagctccaagagtcaggatcgcaagtcagaaagcaaagaaaagagagacatcttgtcgtttgataaaatcaaagaacaaagggagagagagcgccagaggcagcgggaacgggagatccgcgaaacggagaggcggcgggagcgcgagcagcgggagcgggagcaacgcctcgaggccttccatgagcggaaggagaaggcccggctacagcgggaacgcctgcagctcgagtgccagcgccagcggctggagcgggagcgcatggagcgggagcggctggagcgcgagcgcatgcgcgtggagcgtgagcgcacgaaggagcacgagcgcatccaccgcgagcgcgaggagctgcggcgccagcaggagcagctgcgttacgagcaggagcggcggcccgggcggagg

SEQ ID NO: 186479 - DNA, 887 bp, Homo Sapiens
ttggcgctgatcagaaaatgagttctcctgaagatgactcggatacaaaaaggctttccaaagaggaaaagggtcgcagcagttgtggtagaaatttctgggttagtggactctcttctacaaccagagctacagatttgaagaatcttttcagcaaatatgggaaggtggtgggcgccaaggttgtgacaaatgcccggagtcctggagctcgctgttacggttttgtcacgatgtccacagcagaagaggccacaaaatgcattaaccacctgcacaagacggagctccacggaaagatgatctccgtggagaaagccaaaaatgaacctgtgggaaagaaaacctctgacaaaagagacagtgacgggaaaaaggagaagtcgagcaacagtgacagatctacaaaccttaagagggatgataaatgtgacagaaaagatgatgctaagaagggtgacgacggaagtggagaaaagagtaaggaccaagatgatcagaaacctggcccctcagagcgatctcgagccacaaagtcaggaagtcgagggaccgaacggactgtagtaatggataaatccaaaggggtgcctgtgattagtgtaaaaacgtccgggtccaaagagagagcttccaaaagccaggatcgcaaatcagccagcagagagaagcggtccgtcgtgtcctttgataaggtcaaggagcctcggaagtcaagagactcagagtcccatagggtgcgtgaacgcagtgaacgcgaacaacgcatgcaggcgcagtgggagcgcgaggagcgtgagcggctggagattgcccgagagaggctggccttccagcgccagcggctggagcgggagcgcatggagcgggaacggctggagcgcgaa

SEQ ID NO: 186480 - DNA, 1599 bp, Homo Sapiens
ttgggtagctagcagttctcttcgtgttagtgtggcagccgtgccagttccacatttgtgattgctttatttccctggtaattaaaccttgtgccattctattcctgttaaatccgtagaaaatgagaaaatactcgacattttgggggaaacttgtaaatctgagccagtaaaagaagaaagttccgagctggagcagccatttgcacaggacacaagtagcgtggggccagacagaaagcttgcggaggaagaggacctatttgacagcgcccatccggaagagggtgatttagatttggccagcgagtcaacagcacacgctcagtcgagcaaggcagacagcctgttagcggtagtgaaaagggagcccgcggagcagccaggcgatggcgagaggacggactgtgagcctgtagggctagagccggcagttgagcagagtagtgcggcctccgagctcgcggaggcctctagcgaggagctcgcagaagcacccacggaagccccaagcccagaagccagagatagcaaagaagacgggaggaagtttgattttgacgcttgtaatgaagtccctccggctcctaaagagtcctcaaccagtgagggcgctgatcagaaaatgaggtttgttttttctcagttttagaccagacgctatctccttttcattggtcatgtaatgacacacataagctgtttttttctgcaattggccagccagactgacgaaattgtagttttgcttctaaagaatgtttcgtttctctttgtgtgtttttaatgggtgattcaattccttttctttttctcaacctaccatggttgtgttcttaaattcttcctaattacctttagcccagcagaattaattaactcctgtgggtctgaaatcttatggttaggtcagattttcaatacaagtttgtcggggtatcattttttcagaactaaatttcgggtaggtatgcaacctcagcacgaattttatggttttgagtttgtttcctccatgctgcttccttgtggagtgacattgtcttttgtctctagttctcccgaagatgactcggatacaaaaaggctttccaaagaggaaaagggtcgcagcagttgtggtagaaatttctgggttagtggactctcttctacaaccagagctacagatttgaagaatcttttcagcaaatatgggaaggtggtgggcgccaaggttgtgacaaatgcccggagtcctggagctcgctgttacggttttgtcacgatgtccacagcagaagaggccacaaaatgcattaaccacctgcacaagacggagctccacggaaagatgatctccgtggagaaagccaaaaatgaacctgtgggaaagaaaacctctgacaaaagagacagtgacgggaaaaaggagaagtcgagcaacagtgacagatctacaaaccttaagagggatgataaatgtgacagaaaaagatgatgctaagaagggtgacgacggaagtggagaaaagagtaaggaccaagatgatcagaaacctggcccctcagagcgatctcgagccacaaagtcaggaagtcgagggaccgaacggactg

SEQ ID NO: 186481 - DNA, 994 bp, Homo Sapiens
gggggcgtgagttgcttcccagctcagacctgtggagctcagagcctgggccctccactgctcctctttaggccaaggaccctggggtctgggctgacatgcgagccgctgggggactctgggcttggctgtggcccctggaaatgaagtcccttcccttagccccagataacccaggggtgctggccccctgcatagacacagagtcccagttaggagctggggatagaagacagctaaaggggactaagagagagaggtcagagtgagagaaataggaccatggggagaaacacattaacaggaacagagaaacaagggaaaaagagacaggatgagagagacacaactgtaatagagacacagaggagtggcacacagagaccacctcccagctggagacagtcaggaaggactgagggagaggggacagccagggctccacacccaggcaagaatgggggagggcctgtggaacagagaagtcatcaacacacacagttcaaagtctaccctaggctaggagggggagcaggaagaaggggcagggacgcaggggcccggcctgcgagctccctgttggcctctgctgccccctgctggctcccgctgcagtgctcaggcaggaagagaggaggctgctgtgtttaggcccaggacgctcttcattccctttgcacaccacccaccaaccactgcctgccccactccctgtcccccacttcacagagtgcccccagggccagcaggtggtgcgggtgtcttgcccgtgaccttgttggcacagtccagcagggcggtgtgaatgtccttggcacaggaaatctgggctttgatgaccgccaggtactgtgggtaggggaggctgtcaggctgcactgcgtcgggcttggtggctgtgggcaccaacgttggagagtgcttggcactgtcacaactctgtgacaggcactcatgcgccaggcgtgtccattgtcgatgttagtgttcccaa

SEQ ID NO: 186482 - DNA, 1511 bp, Homo Sapiens
ttggctataaaacattctgaaggagcaaatacttctggaaaagggttttcttgaggactcaggtctcctgaggatgaaaaagccccttgtgaaggggaatttatgaggctcttcactgcagagaacggcggcctctttgcgagcatcagtctattgagataacttttctttctcaattttctaatctttttggccttgggtgttctgtgggccacacgggagtgagttttatgaaagtggtatttttttctggaatgtacgactcgtttagcagccttcatattttttaactctagcctttgcattttctaaaattaaaatggtgtaggctaagtctttcaatctgtctatgacctgaggtagggcttttgcagttgtggaaggcagaaggcatgcccatggagaagggtttcagcaaagaggagactgttggcttctgctcttgggtgaatgaaggcttggtgtagacggcgtttcccgctacgttctcgggcccctgcactatgtgaggctattccagctcccttggggctggactcccgagccttttttctttggcagcattctccccaaatgcctgggcaccctgttccctcctgatactctgctttcccaccgctttgaagggccttttctggatgctccttgggcccatgaggactctcttcactctctgccggttttggcctacagtttgaatctttgccaggctgtttcctgtggttggcagtttaatgaacggtagtaacagtgatttcacatctaggtttaccgctgagaaataaggcaagatgtaacttagtgtactgataaaatcactctcgtcattggtgtctagctgctcactcccaaagcctgacaagttgatgccactgctgtctgagggctcctctggctcaacaatcagctcagtgcttgtgtagttcttccgggcttgtaacaccttcatgaacgctccttctggattccctaccgatgcttcttcagctgtcaaaaaagaagagactgctttgatcatgaaagatgatgggatgggatgcatcagtccatagctgtacaccccagtcacacagagtaggagtcagcaaacattcgagtgccattcagagaggagaaacacacacccaatcctaaacctatgaaatggcaacaacaaaaggagaaaatacatcttttgaaaacacggccacctacttggaacattccatagtgtgacatagagtaactctgtttaggattatttcgttgatccccagaggccaattgcccagtgctcagtcaaagcccaaggtggaagacaagtgcttccctgatgagctggcctctctgcagactgctccgtaccctgtgctgtcctgcctcagatgcagagagagcacaagggctcctgctctcctcgtcctcggtgcacctgtgttcgtgctaccatcacagctgaatgcaatgaaaggcggtcctctgagaggagcaggtggagatgctaaagtggaggccccgtcccattgctgata

SEQ ID NO: 186483 - DNA, 1991 bp, Homo Sapiens
ctttgtacaaaaaagttggtgggctttgctcactaacagctgggcaattggcctctggggatcaacgaaataatcctaaacagagttactctatgtcacactatggaatgttccaagtaggtggccgtgttttcaaaagatgtattttctccttttgttgttgccatttcataggtttaggattgggtgtgtgtttctcctctctgaatggcactcgaatgtttgctgactcctactctgtgtgactggggtgtacagctatggactgatgcatcccatcccatcatctttcatgatcaaagcagtctcttcttttttgacagctgaagatttcatcggtagggaatccagaaggagcgttcatgaaggtgttacaagcccggaagaactacacaagcactgagctgattgttgagccagaggagccctcagacagcagtggcatcaacttgtcaggctttgggagtgagcagctagacaccaatgacgagagtgattttatcagtacactaagttacatcttgccttatttctcagcggtaaacctagatgtgaaatcactgttactaccgttaattaaactgccaaccacaggaaacagcctggcaaagattcaaactgtaggccaaaaccggcagagagtgaatagagtcctcatgggcccaatgagcatccagaaaaggcacttcaaagaggtgggaaggcagagcatcaggagggaacagggtgcccaggcatctgtggagaacgctgccgaagaaaaaaggcttgggagtccagccccaagggagctggaacagcctcacacacagcaggggcctgagaagttagcgggaaacgccatctacaccaagccttcgttcagccaagagcataaggcagcagtctctgtgctgacacccttctccaagggcgcgccttctacctccagccctgcaaaagccctaccacaggtgagagacagattgaaagacaacacacactatttccattttagaaagtgcaaaggctagagttacaaatatgaaggcttctaaaccaatttcacattccagaaaaaaataccgctttcacaaaactcgctcccgcatgacccacagaacacccaaggtcaaaaagagtccaaaggtcagaaagaaaagttatctgagtagactgatgctcgcaaacaggcttccgttctctgcagcgaagagcctcataaattccccttcacaaggggctttttcatccttaggagacctgagtcctcaagaaaacccttttctggaagtatctgctccttcagaacattttatagaaaagaataatacaaaacacacaactgcaagaaatgcctttgaagaaaatgattttatggaaaacactaacatgccagaaggaaccatctctgaaaacacaaactacaatcatcctcctgaggcagattccgctgggactgcattcaacttagggccaactgttaaacaaactgagacaaaatgggaatacaacaacgtgggcactgacctgtcccccgagcccaaaagcttcaattacccattgctctcgtccccaggtgatcagtttgaaattcagctaacccagcagctacagtcccttatccccaacaacaatgtgagaaggctcattgctcatgttatccggaccttgaagatggactgctctggggcccatgtgcaagtgacctgtgccaagctcatctccaggacaggccacctgatgaagcttctcagtgggcagcaggaagtaaaggcatccaagatagaatgggatacggaccaatggaagattgagaactacattaatgagagcacagaagcccagagtgaacagaaagagaagtcgcttgaggtgaggaccacacagaaacatgagacccagatttcccatcatttagcatatcccaggaaagtgcccacacagaagagtctgggactcccaggccatagctcatcttggccatgtaactttggtcatgacagtgccaa

SEQ ID NO: 186484 - DNA, 1167 bp, Homo Sapiens
tactcagataacttttcttctgacctttggactctttttgactttgagtgttctgtgagtcacgtgagagcgagttttgtgaaagcggtatttttttctggcatgtacgattggtttagacgtcttcgtatttgtaactctagcctttgcactttctaaaatggaaatagcgtgggttaagtctttccatctgtctctcacctgtggtagggcttttgcagggctggaggtagaaggcgcgcccttggagaagggtttcagcacagagactgctgccttatgctcttgggtgaaggaaggcttggtgtagacggcgtttcccgctaacttctcaggcccctgctgtgtgtggggctgttccacctcccttggggctggactcccgagccttttttcttcggcagcgttctccacagatgcctgggcaccctgttccctcctgatgctctgccttcctacctctttgaagtgccttttctggatgctccttgggcccatgaggactctcttcactctctgccggttttggcctacagtttgaatctttgccaggctgtttcctgtggttggcagtttaattaacggtagtaacagtgatttcacatctaggtttaccgctgagaaataaggcaagatgtaacttagtgtactgataaaatcactctcgtcattggtgtctagctgctcactcccaaagcctgacaagttgatgccactgctgtctgagggctcctctggctcaacaatcagctcagtgcttgtgtagttcttccgggcttgtaacaccttcatgaacgctccttctggattccctaccgatgcttcttcaggacaatgtgtggtgtttgtcagacatgcactgttgcaatgcagcttgactgtcttgcagacagcctcaatgctgtttttaaattggcagaggcagcaggccatatggctaggtaagatcagtttttccagttcaacagtcatcatgagaatgttcttaagtgttgtaagtgggactagcgttgttcccatgtctagatattttaatgctggcaatttaaagagatacggatcttcaacagttgtcagaggattgtgattgagaattagtttctcggtccaactgtatgctttccatacatttccatcaatgtaagaaatatagtttccttggaaatt

SEQ ID NO: 186485 - DNA, 1651 bp, Homo Sapiens
tgggatcatcagaaggctgacatgggaccgctagagttggcaatcatagcagtgtgaggttggcaaggggagcaacccccttcaagacaaggcacaaactatttggcaaggagagatggggggtgggacctcactgtcaatggacatgctcagggaaaaaaaatgggttacatgcaacaggaggatcattcaggcaacttcagctatgaggctgggcatctgtgagggctgaaggctcaggctgttctcaaaggcttgtgattcacctgggagatgctcacgcctgtgagtctttccacactctctggcaggcgagttagaatgtccagtacttccccagtcactttggctgcccccatggtcccactgccgctggacaccagtgtgatcttattggctgaagtcaagggaccactgatctcctctgccacctggggcagcttctctagcagcatgtccagcggagcagcctcttggtacagctggaaggcttctgccttcttggccatctgctcagcctcggctcgggctcgggcccctatggcaaaggcctcagcttccccacgcatccgcacagacgcggcttctgcctccgcctgcataattagttgggacttctctgcctcggctaggcgctccagcttgtagcgctccgcttccgctggcttccgcacccgggcctccagctccttctcccgccgggcgatctcctgctcctgcactgccacctgctgggcccgctccaccacctgcacctgcacccgctgctcctcaatctgctgcttagtcttggccacctgaagctgataggccaggtcagcctgtgctcggcgggtgttgacctcgatgtcataggcggccttcttcagttcgtaatctctctgtgccttggccatctcgatctcactcaggtactgagcagacaccttttcctgcttggctttagcttcccggatcccagcatctctcttggcctctgcttctccaatccgtgcatctttttggacttgagctgttcgagccttccccaaagagtgcaaatagtcctggtcatcgtgaatgtccttcagagtgtagctaaccacactgatgcccatgttgaccaggtctgaggaggccactttgaaaacctgttctgagaatttctgcctgtccttatagatctcctccacagtcatgtgggccatgatggccctctggtggccctctaacgtctccagggcaatgtgggcaatctcagcctccgtcttccccaggaacatctgacaggcggccgccaacatctccttgttctgcccctggatttttacctgggcaatgccagtgactgagatggggaccccatggcgagtgtaaaccttttcactcttgacattgagggtcagtgtgttgagagagatcctctggatctgttggatgcagggcaggacaaagacacgccctccagccaccatgactggggggcttcggcagaacccggagaccaccatggcctcatttgggccacaagtgaaaaacatggttcaggctggagcttccgggacgcgggcggcagcccggctggggtctcgggaagggcggggtcgcgcagggacctgggagccgggcaggggccgctcgcagaccagctttcctgggagctggcccccaa

SEQ ID NO: 186486 - DNA, 1979 bp, Homo Sapiens
ggagaagataaagcataaaaaaaagatactagccaaaccaccaggttgcttgctcttcttgatgctctggcttcacacaaagcttgtaaattagctattttgcatctaattaatggaactattaaaggtgatgaaagatatgcagagatattccaggatcttttagctttggtgcggtctcctggagacagtgttattcgccaacagtgtgttgaatatgtcacatccattttgcagtctctctgtgatcaggacattgcacttatcttaccaagctcttctgaaggttctatttctgaactggagcagctctccaattctctaccaaataaagaattgatgacctcaatctgtgactgtctgttggctacgctagctaactctgagagcagttacaactgtttactgacatgtgtcagaacaatgatgtttcttgcagagcatgattatggattatttcatttaaaaagttctttaaggaaaaacagtagtgctctgcatagtttactgaaacgagtggtcagcacatttagtaaggacacaggagagcttgcatcttcatttttagaatttatgagacaaattcttaactctgacacaattggatgctgtggagatgataatggtctcatggaagtagagggagctcatacatcacggacgatgagtattaatgctgcagagttaaaacagcttctacaaagcaaagaagaaagtccagaaaatttgttccttgaactagagaagcttgttttggaacattcaaaagatgatgacaatctggattctttgttggacagtgtagttggacttaagcagatgctggagtcatcaggtgaccctttacctctcagtgaccaggatgtagaaccagtactttcagctccagaatctcttcagaatctgtttaacaataggactgcctatgtgcttgctgatgtcatggatgatcagttgaaatctatgtggttcactccatttcaggctgaagagatagatacagatctggatttggtaaaggttgacttaattgaactctctgaaaaatgctgtagtgactttgatttgcactcagaattagagcgctcatttttgtcagaaccatcatctccaggaagaaccaagactactaaaggattcaaacttgggaagcacaagcatgagacctttataacgtcaagtggaaaatctgaatacattgaacctgccaaaagagctcatgttgtgccaccaccaagaggaaggggcaggggaggatttggacagggtatacgacctcatgatatttttcgtcagagaaaacagaacacaagtagaccaccatctatgcatgtggatgactttgttgctgctgaaagtaaagaagtggttcctcaagatggaatacctccaccaaaacggccactcaaagtatcacagaagatttcttcccgtggtgggttttcaggcaatagaggaggacggggtgctttccacagtcagaataggtttttcacaccacctgcttcaaaaggaaactacagtcgtcgggaaggaacaagaggctccagttggagtgctcagaatactcctcgaggaaattacaatgaaagtcgtggaggccagagcaattttaacagaggccctcttccaccattacgaccccttagttctacaggttaccgcccaagtcctcgggaccgtgcttctagaggtcgtgggggacttggaccttcctgggctagtgcaaatagcggcagtggaggctcaagaggaaagtttgttagtggaggcagtggtagaggtcgtcatgtacgctcctttacacgataaaaatccttttgggaacatcttaactgtatatgaacatttcacgaggacaataaaaataagacattgaaggaccaatttagacttagcagttatctggagacatctgagagaatatttttatctgaagaaagcagaatttgtttgatacctaacaagatttcaataaa

SEQ ID NO: 186487 - DNA, 2164 bp, Homo Sapiens
  misc_feature (718)..(882): n is a, c, g, or t
  misc_feature (1327)..(1394): n is a, c, g, or t
  misc_feature (1476)..(1511): n is a, c, g, or t
ttggcatatttgctaagaaatgtttctgctgtagttggatttgcccatatttatgtaggtggttttaattttttaaatggtgattagtgttaaaaatcaatttaaatcatgactaatatggtaaaaagataaagcatcaaagcagtatttctcattcctgcctcctcaatatctaatactgggaagatacttcaaagaatattgagattgtctgaagttttagttaagattttcacacattaatatcaaaaaagtaagtttagtatttgtttctccatgggttatttgtaaagctgtaaactgagatatcggtgactccgtattatgactccattagtgagctgtggtatgggtaggattttcctacttcttctgtacttttacctgtagactatttttactaaggtgctttataatgtgttttaaagcattgcatttacaaaacaaggaaaatgctgtaaatattgcatattttatgtatttggaccaaaaggttacaagtaattagacaaaagtggttttgcaccaattttatgtcaagtaaaaccatcagacctactgttcttgtatttctcatttaactttactgttaagacatcactgaaatgaacttcagtaagctttcaattttgatacacagttcattattcataacttgaggcagtaattacagtggaatgagtactggacaaggagtcaaaaaacttgatttcaggtnnnnnnnnnnnnnnnnnnnnnnnnnnnnnnnnnnnnnnnnnnnnnnnnnnnnnnnnnnnnnnnnnnnnnnnnnnnnnnnnnnnnnnnnnnnnnnnnnnnnnnnnnnnnnnnnnnnnnnnnnnnnnnnnnnnnnnnnnnnnnnnnnnnnnnnnnnnnnnnnnnnnntaaagcgctatgtaaatgtaaggtattatagaaacatctttaacatatagtttcataccattcattttttaacaaagaaagggaaaagtctgcttgtaagctggttgaaaaagttaatcttgatataaatttgtgtttgataaatatcctctcagtgttttatcttccatgtttcaacaactattgaaatatgaaatgcctgtgaactcttaaagcttcatgagcagctgcttgagttcaggaagttcactgttagaaataggctttgttagctgactagggtcagggaaacttttctcttcaaatttgaaagctgtttctgttttcattttacattattattcagaaatggtagctattctatacctatggtttaagtaaatatttctgaataaggcttcaccatactgtaagcattttatgtagattgccttaaaggttatgnnnnnnnnnnnnnnnnnnnnnnnnnnnnnnnnnnnnnnnnnnnnnnnnnnnnnnnnnnnnnnnnnnnnaaaaactaaaagaatgacagaacaatcatcttagcaccctttcctcacaataatataaaaatattaaaagaacataggcagnnnnnnnnnnnnnnnnnnnnnnnnnnnnnnnnnnnncaaattgacttttataggtatttcctgaaagtgtatacaaattatttcctcgcccaaaataaagcaccacttcaaggtgtggtttgacattacatgctaatgaacaaacccagtatgcaagttattcttgcaccacatgctcaaatcttcttgaggtgcattaactcttttaggtaactagagcagtacttggtgaactagatcaggaggtcagtaaactttctgtggaagggccagagagtaaatattttaggctttgcagcccatacggtctctgtcacagctagtcaaccctgccattttaccacaaaagcagcaatagacattatgtaaacaaatgagcacagttatgttccaataaaactttatttacaaaaacagatgacatcccagatgcagaccatgggcaaccaaccattgcactggctaaatcattatttatggagaaatcctctttgtgtctctactctggatgcctaaaagagtttatatacttctaaaagctcctaacttatatccaaagaattgctttctgattcgtgtagtctctcccacagattcataaacttttatgacttatattgtttccaggtgggcatggtttatttcccagtttaacagttcagataggggcatttattttatcatatttt

SEQ ID NO: 186488 - DNA, 2133 bp, Homo Sapiens
tccagatttctatcagagactcagatgcaggtcacatgagcttcacagccctccccactgtgttcagaaggtggtggcactaacattgctataatggaaatgtgcccctactttgccaaaaaccgtgcacatctggcattcctcgattgaccctgtctaggcggggacagccctcagacagccgtttctgcctaggtttcacagccccaaactgcacgtgaaccagtagctacttgctggagcaggccggaaaggcagcgtcgtaactggcattaagccacaactgaggaatgcttttcacggtacaaatgcacccaactcctagcctagaaagtgctcccttcctatcttgcttagaaatgtcagccccggggtggggcaggggagaaatgcttctcaattctctctgctgtcaggccaatgatgacgcgccaggctcccaggtggagctgtgcactccggggagacctatcctttaatgggtgacaaccaggctctgcactgctggcaagaggctgcttgggacattttacgctgaggcagaatgaatgtcctggttttcaaaaggtggcagtggctctctccaaaaggtgaagttactgaaggtatccgaacagggaaagtctgaagaatggcttcttttcagcaacgggaaaacgtggtcgactacttcacagagtctcacatacgaagagatgttggtctttgcatgttcctgtaccagctctcctttagggttgacggtaaatattctattcaaagacactcctacttgcttgtatgaatacacatcagctggtcggtttccaaaagcagcataaaagggttctgtgttggggaaaaacaggtttttgatgtctgtcaaacactggactttaaacttttctggcttcttttcaatcacttctctgtgcagggcagagaagaggctgctgggactcagcagcaggggcccctggggcagcaccgtgcccctctcgttgacccagtgcaggtagccccgcgtcatgtccgccatcccgatggcacgggcagaacagtagagaaatttatatccattctggctcactttatggtacagcttagcgatgccctgatgggtccaatccttcccaagggtgggcaaaatgtggccaagagtatctgatctggtaattgtcccatcaatatcagaaatgatgactttatcatcccagttccacagatagatggtgccctcacagcggcacgtgccttggtactgcgtggtgacactgaaaaccacgtcgttggggccattcttcaacttcaagcttttaagctgctcggaagtcagccggagagtcttcttgtagctgacattaggcagaagagggaggtggcctgcgtttgatggcttggcagctgcgcgctcctcatcactggaggatgattcatgctttaccctggtggccaagctgagctgcggcggttgctctccggtgctatgggccttgccagccaagcactgctctggcttactttcctccttgattgtggtgtttcttcccctccatgaaaaccaccatcttcctccctttttgggcattttatccctcatgatagattccacagtggcctttggcaaaggtttctggaaggcctgcattgccaggaggaggggtgctgctgttgtccagttataatatttactcccaatctttaccacgagattggggtcatcgataatagcggggttgtccacaaactgttgatatgacacagcttgctccaggaatgcatctttcgtgatctcccggtggtcgctgaggcccccgcagagggagatggcgatggaagggaggtccctcagcccgtccgaggtgctctccacgccactgtccacgcccgagctgcccaccgactgcggggactggttggctgaccgggctccgttgtcgcttgcatgttttgcgagtccggaaggatctccgtttttgggaaaatacagggccgccacttcaggatccatgtctgtgaggtcatccaagtagacgccgtcagcaccaagatgtcggcttcgtttatctcttttcctggaaggagaatccgtcttgtttgctgtctggactacactggcagaggggggtttgagctcctcgatcatgggcccaa

SEQ ID NO: 186489 - DNA, 1119 bp, Homo Sapiens
ttggctctgatagctcccagctcgctctctgcagccatgattgccagacagcagtgtgtccgaggcgggccccggggcttcagctgtggctcggccattgtaggcggtggcaagagaggtgccttcagctcagtctccatgtctggaggtgctggccgatgctcttctgggggatttggcagcagaagcctctacaacctcagggggaacaaaagcatctccatgagtgtggctgggtcacgacaaggtgcctgctttgggggtgctggaggctttggcactggtggctttggtgccggcggcttcggagctggtttcggcactggtggctttggtggtggatttgggggctccttcagtggtaagggtggccctggcttccccgtctgccccgctgggggaattcaggaggtcaccatcaaccagagcttgctcacccccctccacgtggagattgaccctgagatccagaaagtccggacggaagagcgcgaacagatcaagctcctcaacaacaagtttgcctccttcatcgacaaggtgcagttcttagagcaacagaataaggtcctggagaccaaatggaacctgctccagcagcagacgaccaccacctccagcaaaaaccttgagcccctctttgagacctacctcagtgtcctgaggaagcagctagataccttgggcaatgacaaagggcgcctgcagtctgagctgaagaccatgcaggacagcgtggaggacttcaagactaagtatgaagaggagatcaacaaacgcacagcagccgagaatgactttgtggtcctaaagaaggacgtggatgctgcctacctgaacaaggtggagttggaggccaaggtggacagtcttaatgacgagatcaacttcctgaaggtcctctatgatgcggagctgtcccagatgcagacccatgtcagcgacacgtccgtggtcctttccatggacaacaaccgcaacctgggacctgggacagcattattgccgaggtccgtgcccagtacgaggagattgcccagaggagcaaggctgaggctgaagccctgtaccagaccaaggtccaagcagctccagatctcggttgaccaacattggtga

SEQ ID NO: 186490 - DNA, 1300 bp, Homo Sapiens
ataaaaaggtcactttattttgccttttgtttggtatgctatcaatgccctttaaaatcctactattcaagtacaaatgctgatgtttacaaagtatttacaattttagtcttgttcctttctatcttaaaacacaacagctaactggttacaacagttaacaaaataataataataaaggtcacaaaaagagaaacccctgtcttatcaggcaccaaatctgaacaagggcttggatccaaccttctgcttcccgccaggtgctttaaaaacagtctggctaactgtttttatcatcagaataaacgtctttctttaaagaatagcagggcaactgtttcccagggtcgccaattagagtctgacagtgttcgggctgctgcctttatagtctgtgttctcaaagtttccaactcttacttgccgtattggaatgaacccagattcacaaggggaaggcctagacaacagcttcctgaacgcgtacttaattcttaggttagaaactttaacctttaaaagggaaggccaagaaaataacacactaaaaggagagtttttacgtacacgactaaatgaatttaactcaggtcaacggtagcatctagaagttactaaattgagtgctacgagtaaaaatatgtccgtgttttgtattagggaacagccaaaggaaacacacttgagagacaggagaccctcactgacgtgagatcggggcggaaactccacattgcaaatattcagaatcccattaagctctccaaaaaagcatttgagagatggtgttaaattctcttgtagtgttttagattaatagagcgcttttacttagacagttatgtctaggatattctaaaataagtgcactcaacattttatcttcaactataaggagactaccaagatttgggaaagacaaaaaaaatgaacagggcacacaaattaaaacaaatgacaaaggcagaattcctagatacttcagttctatcacatctgcggatgaggaggagtaaaagtctccactgggagccagatgtgaggcgcacacagcggccctccctccggcaagctgcgctctcacggcacgtgccaagccagggagaacgggttggttagaacaaacagattccagtcctctgctttggtatgttcaactaactaaaagattaatttcttctgtttcttcaaagcttggtttttacttttctccacatttcttatcaagagctcaagtgagctccccagttgatttcactgactcctgctgtatcgctgtccacagaaacctgtgggccaa

SEQ ID NO: 186491 - DNA, 1044 bp, Homo Sapiens
ttggccttattatgtgcctccagaaatttgggaaaacctgccttataacaataaaagtgacatctggtccttgggttgcatcctgtatgaactctgtacccttaagcatccatttcaggcaaatagttggaaaaatcttatcctcaaagtatgtcaagggtgcatcagtccactgccgtctcattactcctatgaacttcagttcctagtcaagcagatgtttaaaaggaatccctcacatcgcccctcggctacaacgcttctctctcgaggcatcgtagctcggcttgtccagaagtgcttaccccccgagatcatcatggaatatggtgaggaagtattagaagaaataaaaaattcgaagcataacacaccaagaaaaaaaacaaaccccagcagaatcaggatagctttgggaaatgaagcaagcacagtgcaagaggaagaacaagatagaaagggtagccatactgatttggaaagcattaatgaaaatttagttgaaagtgcattgagaagagtaaacagagaagaaaaaggtaataagtcagtccatctgaggaaagccagttcaccaaatcttcatagacgacagtgggagaaaaatgtacccaatacagctcttacagctttggaaaatgcatccatactcacctccagtttaacagcagaggacgatagaggtggttctgtaataaagtacagcaaaaatactactcgtaagcagtggctcaaagagacccctgacactttgttgaacatccttaagaatgctgatctcagcttggcttttcaaacatacacaatatatagaccaggttcagaagggttcttgaaaggccccctgtctgaagaaacagaagcatcggacagtgttgatggaggtcacgattctgtcattttggatccagagcgacttgagcctgggctagatgaggaggacacggactttgaggaggaagatgacaaccccgactgggtgtcagagctgaagaagcgagctggatggcaaggcctgtgcgacagataatgcctgaggaaatg

SEQ ID NO: 186492 - DNA, 1111 bp, Homo Sapiens
ttggcaagggtgcatcagtccactgccgtctcattactcctatgaacttcagttcctagtcaagcagatgtttaaaaggaatccctcacatcgcccctcggctacaacgcttctctctcgaggcatcgtagctcggcttgtccagaagtgcttaccccccgagatcatcatggaatatggtgaggaagtattagaagaaataaaaaattcgaagcataacacaccaagaaaaaaaacaagaggaagaacaagatagaaagggtagccatactgatttggaaagcattaatgaaaatttagttgaaagtgcattgagaagagtaaacagagaagaaaaaggtaataagtcagtccatctgaggaaagccagttcaccaaatcttcatagacgacagtgggagaaaaatgtacccaatacagctcttacagctttggaaaatgcatccatactcacctccagtttaacagcagaggacgatagaggtggttctgtaataaagtacagcaaaaatactactcgtaagcagtggctcaaagagaccccggacactttgttgaacatccttaagaatgctgatctcagcttggcttttcaaacatacacaatatatagaccaggttcagaagggttcttgaaaggccccctgtctgaagaaacagaagcatcggacagtgttgatggaggtcacgattctgtcattttggatccagagcgacttgagcctgggctagatgaggaggacacggactttgaggaggaagatgacaaccccgactgggtgtcagagctgaagaagcgagctggatggcaaggcctgtgcgacagataatgcctgaggaaatgttcctgagtcacgctgaggagagccttcactcaggagttcatgctgagatgatcatgagttcatgcgacgtatattttcctttggaaacagaatgaagcagaggaaactcttaatacttaaaatcgttcttgattagtatcgtgagtttgaaaagtctagaactcctgtaagtttttgaactcaatggagaaagtatagtggaatgagtgtgagcatcgggctttgcagtcccatagaacagaaatgggatgctagcgtgccactac

SEQ ID NO: 186493 - DNA, 935 bp, Homo Sapiens
  misc_feature (530)..(613): n is a, c, g, or t
ttggcaaagagcaactaactgatgctgacaccaaagatttaacagaggctttggatgaagatgcagaccccacaaaatctgcactgtctgcagttgcatctttggcagctgcatggccacagttacaccagggctgcagtttgaaaagtttggatcttgatagctgcactctttcagaaatcctcagactgcacatcttagcttcaggtgctgatgtaacatcagcaaatgcaaagtatagatatcaaaaacgaggaggatttgatgctacagatgatgcttgtatggagcttcgtttgagcaatcccagtctagtgaagaaactgtcaagcacctcagtgtatgatttgacaccaggagaaaaaatgaagatactccatgctctctgtggaaagctactgaccctaatttcaactagggattttattgaagattatgttgatatattacgacaggcaaagcaggagttccgggaattaaaagcagaacaacatcgaaaagagagggaagaagcagctgccagaattcgnnnnnnnnnnnnnnnnnnnnnnnnnnnnnnnnnnnnnnnnnnnnnnnnnnnnnnnnnnnnnnnnnnnnnnnnnnnnnnnnnnnnttcaacggcagatatatctattggggaggaagaaagggaagattttgatactagcattgagagcaaagacacagagcaaaaggaattagatcaagatatggtcactgaagatgaagatgacccaggatcacataaaagaggcagaagggggaaaagaggacaaaatggatttaaagaatttacaacgcaagaacagatcaactgtgtaacaagagagcctcttactgctgatgaggaagaagcattaaaacaggaacaccaacgaaaagagaaagagctcttagaaaaaatccaaagtgccatagcctgtaccaatatcttt

SEQ ID NO: 186494 - DNA, 1073 bp, Homo Sapiens
ttggcgatgagccgggacgtggcgccgctctagccagcgcctgggctctgtggcgggcgccgcagctccgcgtcccccgcgcctcctcccagcgcagacttcaagggctaccactggacccttcccctgtcttgaaccctgagccggcaccatgcacggacgcctgaaggtgaagacgtcagaagagcaggcggaggccaaaaggctagagcgagagcagaagctgaagctataccagtcagccacccaggccgtattccagaagcgccaggctggtgagctggatgagtccgtgctggaactgacaagccagattctgggagccaaccctgattttgccaccctctggaactgccgacgagaggtgctccagcagctggagactcagaagtctcctgaagagttggctgctctggtgaaggcagaactgggcttcctggagagctgcctgcgggtgaaccccaagtcttatggtacctggcaccaccgatgctggctgctaggccgcctgcctgagcccaactggacccgagagctggagctctgtgcccgtttcctggaggtggatgagcggaactttcactgctgggactatcggcggtttgtggccacacaggcagccgtgccccctgcagaagagctagccttcactgacagcctcatcacccgaaacttctccaactactcttcctggcattaccgctcctgtctcttgccccagctgcacccccagccggattctggaccacaggggcgcctccctgaggatgtgctgctcaaagagctggagctggtgcagaatgccttcttcactgaccccaatgaccagagtgcctggttttatcaccgttggctcctaggccgagctgacccccaggatgcactgcgctgcctgcatgtgagccgggacgaggcctgtctgactgtctccttctctcggcccctcttagtgggctccaggatggagatcttgctgctcatggttgatgattctcccctgattgtggagtggaggaccccagatggcaggaaccggcccagccatgtctggggtatcccaggaatgggtgggg

SEQ ID NO: 186495 - DNA, 1360 bp, Homo Sapiens
ttgggttctgcacaggtggagcagctgcgccaggccattgaagaactgtactactttgaatttgtggtagatgacttgccaatccggggctttgtgggctacatggaggagagtggtttcctgccacacagccacaagataggactctggacccatttggacttccacctagaattccatggagaccgaattatatttgccaatgtttcagtgcgggacgtcaagccccacagcttggatgggttacgacctgacgagttcctaggccttacccacacttatagcgtgcgctggtctgagacttcagtggagcgtcggagtgacaggcgccgtggtgacgatggtggtttctttcctcgaacactggaaatccattggttgtccatcatcaactccatggtgcttgtgtttttactggtgggttttgtggctgtcattctaatgcgtgtgcttcggaatgacctggctcggtacaacttagatgaggagaccacctctgcaggttctggtgatgactttgaccagggtgacaatggctggaaaattatccatacagatgtcttccgcttccccccataccgtggtctgctctgtgctgtgcttggcgtgggtgcccagttcctggcccttggcactggcattattgtcatggcactgctgggcatgttcaatgtgcaccgtcatggggccattaactcagcagccatcttgttgtatgccctgacctgctgcatctctggctacgtgtccagccacttctaccggcagattggaggcgagcgttgggtgtggaacatcattctcaccaccagtctcttctctgtgcctttcttcctgacgtggagtgtggtgaactcagtgcattgggccaatggttcgacacaggctctgccagccacaaccatcctgctgcttctgacggtttggctgctggtgggctttcccctcactgtcattggaggcatctttgggaagaacaacgccagcccctttgatgcaccctgtcgcaccaagaacatcgcccgggagattccaccccagccctggtacaagtctactgtcatccacatgactgttggaggcttcctgcctttcagtgccatctctgtggagctgtactacatctttgccacagtatggggtcgggagcagtacactttgtacggcatcctcttctttgtcttcgccatcctgctgagtgtgggggcttgcatctccattgcactcacctacttccagttgtctggggaggattaccgctggtggtggcgatctgtgctgagtgttggctccaccggcctcttcatcttcctctactcagtttttctattatgcccggcgctccaacatgtctggggca

SEQ ID NO: 186496 - DNA, 1061 bp, Homo Sapiens
ttggctaaagaagaaatgtagatctaaaaacccttctaaggaatcatttctcattaatattgttccagaaaaagataatttaacatctctatcagtgtattcagaagatggttgggatttaccatacataatgcatttgtggccacctatcctgctccgaaatcttcttccttacaaaattgcttattatatagagggaattgaaaattcggtttttactctaagtgaaggacattcagcccagatttgtactgcacagttgggtaaagccaggctacatttaaaattacttgactatctcaatcacgactggaaaagtgaatatcacataaagcctaatcagcaagacattagttttgtcagttttacttgtgttacagaaatggaaaagactgatttagatattgctgtccatatgacttacaatactggtcagacagttgtggcatttcatagtccttattggatggtcaataaaactggccgcatgttacagtacaaagcagacggaattcatcgaaagcatccacctaattataaaaagccagttctcttttcttttcagccaaatcacttttttaataacaataaggttcaacttatggtaactgatagtgagttgtccaatcagttttcaattgatactgttggtagtcatggagctgttaaatgtaaaggcctgaaaatggactatcaagttggtgtcactatagacctgagcagttttaacattactagaattgtgacatttacccctttttatatgattaaaaacaaaagcaaataccatatatcagtggctgaagaaggaaatgataaatggctctctcttgatttggagcagtgtatccccttttggcctgagtatgcttctagtaaacttcttattcaagtcgaaaggagtgaagatcctcccaaaaggatatattttaacaagcaggaaaattgtattctattgcgtctagataacgagcttggaggtattatagcagaagtgaatttggccgagcattctacagttattacatttttagattatcatgatggagcagctacattcc

SEQ ID NO: 186497 - DNA, 1683 bp, Homo Sapiens
acaaaaaagttggctcctgttcctagtggtagtccctatccaaatccatcctttttgggaacaccgtctcatggtatacagcctcctgccatgtcaactccagtgtgtgctctgggaaacccagcaactcaggccacaaatatgagttgtgtgactggaccagagattgtgtactctggaaaacacaatggtatttgcatttacttttctcggatcatgggaaacatttgggatgcaagcttagttgtggagagaatattcaagagtggcaacagagagatcactgcaattgaaagtagtgttccctgccaactgctagagtcagtgctacaagaactaaagggtttgcaggaatttctagacagaaactcccagtttgcaggaggaccattaggaaatccaaatactactgctaaagtgcagcagaggctgataggattcatgcgtcctgaaaacggaaatccccagcaaatgcaacaggaactgcagaggaagtttcatgaggctcaactaagtgaaaagatttcacttcaggcaattcagcagttggttcgaaaatcatatcaggctctggctttatggaaacttctttgtgaacatcaattcactatcattgtggcagaacttcagaaggaacttcaagagcagctgaagatcaccacctttaaagatcttgtaatcagggacaaagaactcacaggggcattaattgcttctcttatcaactgctacatcagagataatgccgctgttgatggcattagtttacatttacaggatatctgcccacttctatatagcactgatgatgcaatttgttctaaggcaaatgagcttctccagcgttcccgacaagttcaaaataagactgaaaaagaaagaatgttaagggaatcattaaaggaatatcaaaaaattagcaatcaagtggacctttccaatgtttgtgctcagtatagacaagtgagattttatgagggtgtggtggaactttctcttacggctgcagagaaaaaagatcctcaaggtcttgggcttcatttctataaacatggagaaccagaagaagacatagttggacttcaggccttccaagaaagattaaacagttacaaatgcattacagacacacttcaagaactggtaaatcaaagtaaggccgctcctcagtctcccagtgtacccaaaaaacctggtcctccagtgttgtcatctgatccaaatatgctgagtaatgaagaagcaggacatcattttgaacaaatgcttaaattgtcacagcgatccaaggatgagctctttagtattgccctttataattggctaatacaagtcgaccttgcagataagctgctacaggttgcttctccatttctggagccacatctagtccgaatggccaaagttgatcaaaacagagttcgttatatggatttactctggcggtattacgagaagaacagaagtttcagtaatgctgctcgtgtactgtccagactggctgacatgcatagcacagaaatttcacttcagcagcgactagagtacattgctcgagccattcttagtgccaaaagttccactgccatttcatcaatagctgccgatggtgaatttcttcatgaattagagaaaaatggagttgctaggatccaacttcagatacaggagacactacaaagg

SEQ ID NO: 186498 - DNA, 1925 bp, Homo Sapiens
  misc_feature (150)..(215): n is a, c, g, or t
ttgggactttgaattttatgatatcatggtttccttatgattaaatgattatgtgacaacttcttctccagggtaaatttcaacgttatatttctgctttattgatctttaacagttaagggaagaaagtcggaggctggctttggctgnnnnnnnnnnnnnnnnnnnnnnnnnnnnnnnnnnnnnnnnnnnnnnnnnnnnnnnnnnnnnnnnnnaaattgaagccaaaaataaagagaactttgaactccaagctgctcaagaaaaagaaaagcttaaagttgaagatgagcctgaagtcttgacagaacctccaagtgccacaaccactactaccataggtatatctgcaacctggacaactttggcaggttctcatggtaaaagaaataataccataactacaaccagttcaaagaggaaaaacaggaaaaataaaattactccagaaaacgttcaaattatatttgatgatccactaccaatttcatacagtcagccagagaaggtgaatggagagtccaagagcagcagtaccagcgagagtggggacagtgataacatgaggatttccagctgcagcgatgaaagtagtaacagcaacagcagtcgtaagagtgacaatcattcaccagctgtggtcactaccactgtgagcagcaaaaagcagccatcagttcttgttacatttccaaaggaagagagaaaatctgtttctggcaaggcttcaataaaattgtcagaaactatcagtgaagggaccagtaattctctatctacttgtacaaaatctggtccatctcccctttcttctccaaatgggaagttaacagtagcaagtcctaagcgtgggcaaaagagggaagaaggatggaaagaagttgtaagaaggtcaaagaaagtatctgttccatcaactgtgatatccagagtgattggaagaggaggctgtaatatcaatgctattcgggagtttactggtgcacacatagatattgataaacagaaagacaagactggagaccggataatcactataaggggtggcactgaatcaacaagacaagcaactcaattgattaatgctttgatcaaggatccagacaaagaaattgatgaacttattccaaagaatcgtttgaaaagctcctcagcaaattccaaaatagggtcatcagcacctaccaccactgctgctaacacttccttaatgggaattaaaatgacaactgtagctctgtcatcaacatctcaaactgccacagcactcactgtgcctgcaatttcttctgcatccactcacaaaaccattaagaacccagtgaataatgtgaggcctggttttccagtttctcttccattagcatatcctcctccacagtttgcacatgctttgcttgctgctcagactttccagcagatccgtccaccaaggttgcccatgacccactttggaggtacttttccaccagctcaatccacttggggtccgtttcctgtcaggcctttgagccctgccagagctactaactcgcctaagcctcacatggtgcctcgccatagcaatcagaatagcagtggttctcaggtgaattcagcaggttctttaacttcaagcccaacaactacaaccagttcatcagcttcaacggtgcctggtacatctacaaatggcagtccaagttcaccttctgtccgaaggcagctttttgtcacagttgtgaagacatccaatgccaccacaacaacagtcacaaccacggcaagcaacaacaacactgcacccacaaatgccacatatcctatgcctactgccaaagaacactatccagtatcatccccatcttccccatcaccaccagcccagccaggaggggtttctagaaacagccctttggattgtggatcagcatctccaaataaag

SEQ ID NO: 186499 - DNA, 1427 bp, Homo Sapiens
  misc_feature (675)..(765): n is a, c, g, or t
ttggcttactttagcctgcttccaaggaagaactgaagtggttagtcttctgcttgatagaaaagcaaatgttgaacacagagctaagactggtctcacaccactaatggaagctgcctctggtggatatgcggaggtgggccgagttcttttggataaaggtgctgatgttaatgcccctccagttccctcctcaagagatacagctttaaccatagcagcagataaagggcattacaaattctgtgagcttcttattggcaggggagctcatattgatgtacgtaacaagaaggggaacactccattgtggctagcagcaaatggtggacacctcgatgtggttcagttactggtgcaagcaggtgcagatgtggatgcagcagataaccgcaagataactcctcttatggcagcatttagaaagggtcatgtgaaggtggtgcgctacttagtcaaagaagtcaatcagtttccatcagattctgaatgtatgagatacatagcaaccatcactgataaggagatgctgaagaagtgtcatctttgtatggagtcaatagtacaagccaaagatagacaggctgctgaagcaaacaaaaacgccagcattttgttagaggagttagacttggaaaagttaagggaagaaagtcggaggctggctttggctgnnnnnnnnnnnnnnnnnnnnnnnnnnnnnnnnnnnnnnnnnnnnnnnnnnnnnnnnnnnnnnnnnnnnnnnnnnnnnnnnnnnnnnnnnnnctttgaactccaagctgctcaagaaaaagaaaagcttaaagttgaagatgagcctgaagtcttgacagaacctccaagtgccacaaccactactaccataggtatatctgcaacctggacaactttggcaggttctcatggtaaaagaaataataccataactacaaccagttcaaagaggaaaaacaggaaaaataaaattactccagaaaacgttcaaattatatttgatgatccactaccaatttcatacagtcagccagagaaggtgaatggagagtccaagagcagcagtaccagcgagagtggggacagtgataacatgaggatttccagctgcagcgatgaaagtagtaacagcaacagcagtcgtaagagtgacaatcattcaccagctgtggtcactaccactgtgagcagcaaaaagcagccatcagttcttgttacatttccaaaggaagagagaaaatctgtttctggcaaggcttcaataaaattgtcagaaactatcagtgaagggaccagtaattctctatctacttgtacaaaatctggtccatctcccctttcttctccaatgggaagttaacagtagcaagtcctaagcgtgggcaaagacggaagaagggatggaaagaagttgtaagaaggtcaagaaagta

SEQ ID NO: 186500 - DNA, 2205 bp, Homo Sapiens
ttggcaaagagcctgccgggccgcctgctgccggggccgaggtatccaggagtcgggcggagcggctggggatgagcgcgagccggaccatgcgtccgggttcgcggcggtgagggtcgcggccggcggccgaggcgcaggtgcgggtcgagagaccggcgcctccctccccgccgcccgtggactctgagcgcaggtgtttctactctgccggccgctccacctgggaaagcgccttcaagagctacctctggcggcacctggccctcagctgcagggaaaccgcactcaaacctgccgccgagcccgggtttttctgcaaaactcagaggacctggctcttgcccgaggtgccctgaaccattgtgtgaataagctggggaagcctgactggagtgttttttctttttaataaaaagagtttttctgaatctcaatttttagaaattttttttgcgaagtttgcaatactctctacctcttcgcatcctctcttgctcgtggagtctttttcctcctcagctataaatattttttactatcggcggagcagaccagggatgaacgtcttttaattgcaagtataactgttaaaaccacgtcgggatagtagtcaagatggataaaaagtcctttgaaatggtgctggatgaaattagaaaggctgttttgacagaatacaaattaaaagcaattgaatatgtgcatggatacttttctagtgaacaggtggttgatttgctgagatatttttcctgggccgagccccagttgaaggcaatgaaagcattacagcataaaatggtggctgtccagccaacagaagtggtcaatatactcaactgtttcactttcagtaaagacaaactagttgctcttgaactgttagcctcgaacattattgatgcacagaattctcgtcctattgaagatttattcagggtaaatatgtctgagaagaaacggtgcaagagaatacttgaacaggctttcaaggggggctgcaaagctcctcatgctatgatatcttcttgtggaacaatcccaggaaatccatatcccaaaggaagacctagccgcataaatggaattttcccaggaactcctttgaaaaaagatggtgaagaatgtactaacgaaggcaaaggaatagctgcacgaattcttgggccatccaaaccacctccttcaacatataatccacataaacctgttccttatccgatacctccatgccgaccacatgcaactattgcaccaagtgcttataacaatgcaggtctggtaccattagcgaatgtcatagctccacctccacctccatatactcctaatcctgtaggaacagagaatgaagacctttcgaatccgtcaaaacctatacagaatcaaacattttccaccccagcaagtcaactcttttctcctcatggttctaatccttcaacacctgctgcaactcctgttcctactgcatccccagtcaaggcaattaatcatccatcagcatcagcagctgccaccgtttctggaatgaacctgctgaatactgtccttcctgtgttcccagggcaggtctcctcagccgttcacacacctcagccatcaataccaaacccaacagttatcagaaccccttcattgcccactgcacctgttacatccatccacagtacaaccaccactcctgttccttccattttttctggcctagtgtcactgccaggtccttctgccactcctaccgcagccactcctaccccaggacctacaccacggtccactcttggttccagtgaagcatttgcttctacttctgcacctttcactagcctccccttttccaccagctcttctgctgcttctaccagcaacccaaattctgcttcattgtcatcagtttttgcagggctccctttgcccttaccaccaacatcccaaggcctatccaacccgactcctgtaattgctggtggctctactcccagcgttgccggtccacttggtgtgaacagtcctcttttgtctgcgttaaaggttttctgacatccaatgacaccaatttaatcaactcctctgctttatcctctgctgtcacaagtgggctggcttcactatcttctcttactcttcagactctgactcttctgcttcagcccctaacaagtgctatgccccatcagccatccctacccacagaggact

SEQ ID NO: 186501 - DNA, 2399 bp, Homo Sapiens
ttgtacaaaaaagttggccatcatttgccctttggtacttttctggtccaggaattaatcaagagcaagactcccaagcagctgatccagcaagtaggcaatgaagcctatgttatagggctctcctccttccacataccttcaataggagctgcatgtgtttgtttcttagaattgcttggccttgacagcctcaagctcagagttgatatgaaagtggccaatataattttgagctacaagtgcagaaatgaagatgctcagtacagctttatcagagagtctgtagccgaaaaactatctaaactagctgatggtgaaaagacaaccacagaagaattgcttgttctcttagaagaaggtacatggaacagcattcagcaacaggaaataaagaggttatccagtgaatctagcagccaatgggcattagtggtgcagttctgcaggctacacaatatgaaactaagcatatcttaccttagagaatgtgccaaagcaaatgattggctgcagttcattattcacagccaactccacaactaccacccagcagaggtgaaatcccttatccagtacttcagcccagtcattcaagaccacttaaggctggcttttgagaacttgccctcagtgcccacctccaaaatggacagcgatcaagtctgcaataagtgcccccaggaacttcaaggaagcaaacaagagatgaccgatttatttgaaattctgctccaatgctcagaggagccagactcctggcactggcttctggttgaagcagtgaaacaacaggcccctatcctcagtgttctggcctcatgtctccagggtgccagtgccatttcttgtctctgtgtttggatcatcacttctgtggaggacaatgttgcaactgaagcaatgggacacattcaggactcaacagaggaccatacctggaaccttgaggatctttcagtcatctggagaacattattaacaagacaaaagagcaaaactctcatcagaggtttccagcttttctttaaggattccccgttactactggtgatggagatgtatgaactgtgtatgttcttcaggaattataaagaagctgaagctaaacttctggagtttcagaagagccttgaaacgcttaacacagcagccacaaaggtccaccctgtcatccctgccatgtggctggaggatcaggtgtgtttccttttgaagcttatgctacagcagtgtaagacccagtatgagctggggaagcttttacagctctttgttgaaagagagcatctcttctctgatggtccagatgtgaaaaagctttgcatcctttgccagattttgaaggatacatccatagccattaatcatacaattattaccagctacagcattgagaatcttcagcatgaatgtagatctattttggaaagactgcagacagatggacaattcgctttggccaggagggtagcagaattagctgagttacctgtggacaacttggttattaaagagataacacaggaaatgcagaccctaaaacacattgaacagtggtcactaaaacaagcaagaattgacttctggaaaaaatgccatgagaattttaagaaaaattcaatttcaagcaaagcagcttcttcctttttctcaacccaggcccatgtggcatgtgagcacccaactggatggagcagcatggaggagcgccatctgctgctcaccttggcagggcactggcttgcccaggaggacgtggtgcccttggataagctggaggagctggagaagcagatctggctgtgccgcatcacccagcacactcttggaagaaatcaggaggaaacagagcccagattttctcgacagatctcaactagtggtgaactttcctttgatagtttagccagtgagttttccttctccaagttggctgctctgaacacatcaaaatacttagaacttaacagccttccatccaaagagacatgcgagaatagattggattggaaagagcaggagtcactaaactttttgattgggcgcctactggatgatggctgtgtgcatgaagcaagtagagtatgccggtattttcatttttataatccagatgtcgccttggtattgcactgcagagcactggcctcaggggaagctagtatggaggatctgcacccagagatccatgctctcctacaaagtgctgagctgcttgaggaagaagcacccgacattcccctaagagagtccacagcacttcaagtctggatagtcagaagtttgtgacagtgccctccagtaatgaagtggtaactaacctggaagtgctgacaagcaaatgcctccatgggaagaactactgtcgacaggtcctctgtctgtatgatcttgcc

SEQ ID NO: 186502 - DNA, 1173 bp, Homo Sapiens
  misc_feature (627)..(636): n is a, c, g, or t
  misc_feature (904)..(915): n is a, c, g, or t
ctttgtacaaaaaagttggaattgaaccttctgtgccctatcacccaacgctccaaagtcataattgcattgactttccccaccagatgctgaaaatgtccttgtgatgtgcacgtaaagtacttgtagttccacttatagcctctgtctggcaatgccacagccctgtcagcatgaatttgtaatgtcttgagctctattatgaatgtgaagccttccccttatcctccctgcaacttgatccatttctaattatgtagctctttgtcagggagtgttccctatccaatcaatcttgcatgtaacgcaagttcccagttggagctccagcctgacatcaaaaaaggcagttaccattaaaccatctccctggtgcttatgctcttaattgccacctctaacagcaccaaatcaaaatctctccactttcagctgtcttttggaggacgtacgtaataaggttttaatttagtaaaccaatcctatgcatggtttcagcactagccaaacctcaccaactcctagttctagaaaaacaggcacttggcagccttgtgatgtcatacagagaagtcacagggcagtacctgagggtctgtaggttgcacactttggtaccagataacnnnnnnnnnnctttataagaaagcctgagtactccacactgcacaataactcctcccagggttttaactttgttttattttcaaaaccaggtccaatgagctttctgaacagctggtgtagctacagagaaaccagcttccttcagagagcagtgcttttggcggggaggaggaaatcccttcatacttgaacgttttctaattgcttatttattgtattctggggtatggcgtaagtacagagaagccatcacctcagatggcagcttttaaaagannnnnnnnnnnnctctcaacaccatgattcctttaacaacatgtttccagcattcccaggtaggccaaggtgtcctacagaaaaaccttgggttagacctacagggggtctggctggtgttaacagaagggagggcagagctggtgcggctggccatggagaaagctgacttggctggtgtggtacagagaagccagcttgtttacatgcttattccatgactgcttgccctaagcagaaagtgcctttcaggatctatttttggaggtt

SEQ ID NO: 186503 - DNA, 1576 bp, Homo Sapiens
  misc_feature (1378)..(1387): n is a, c, g, or t
tttgtacaaaaaaagttggcaatctaccccctacagccaagtggcagatttgttattggtgggcctcagggtgatgctggtttgactggacgcaaaatcattgtggacacttatggcggttggggtgctcatggaggaggtgccttttcaggaaaggattataccaaggtcgaccgttcagctgcttatgctgctcgttgggtggcaaaatcccttgttaaaggaggtctgtgccggagggttcttgttcaggtctcttatgctattggagtttctcatccattatctatctccattttccattatggtacctctcagaagagtgagagagagctattagagattgtgaagaagaatttcgatctccgccctggggtcattgtcagggatctggatctgaagaagccaatttatcagaggactgcagcctatggccactttggtagggacagcttcccatgggaagtgcccaaaaagcttaaatattgaaagtgttagccttttttccccagacttgttggcgtaggctacagagaagccttcaagctctgagggaaagggccctccttcctaaattttcctgtcctctttcagctcctgaccagttgcagtcactctagtcaatgacatgaattttagcttttgtgggggactgtaagttgggcttgctattctgtccctaggtgttttgttcaccattataatgaatttagtgagcataggtgatccatgtaactgcctagaaacaacactgtagtaaataatgctttgaaattgaacctttgtgccctatcacccaacgctccaaagtcataattgcattgactttccccaccagatgctgaaaatgtccttgtgatgtgcacgtaaagtacttgtagttccacttatagcctctgtctggcaatgccacagccctgtcagcatgaatttgtaatgtcttgagctctattatgaatgtgaagccttccccttatcctccctgtaacttgatccatttctaattatgtagctctttgtcagggagtgttccctatccaatcaatcttgcatgtaacgcaagttcccagttggagctccagcctgacatcaaaaaaggcagttaccattaaaccatctccctggtgcttatgctcttaattgccacctctaacagcaccaaatcaaaatctctccactttcagctgtcttttggaggacgtacgtaataaggttttaatttagtaaaccaatcctatgcatggtttcagcactagccaaacctcaccaactcctagttctagaaaaacaggcacttggcagccttgtgatgtcatacagagaagtcacagggcagtacctgagggtctgtagttgcacactttggtaccagataacnnnnnnnnnnctttataagaaagcctgagtactccacactgcacaataactcctcccagggtttaaactttgttttattttcaaaaccaggtcccatgagctttctgaacagctggtgtagctacagagaaaaccagcttctttcagagagcagtgctttggcggggaagaggaaatcccttcatacttgaacgttttc

SEQ ID NO: 186504 - DNA, 1629 bp, Homo Sapiens
ttggcgcccgcctgctacgagtagaacgctgtccgcagcttgcgcatttcgcagccgctgccgcctcgccgctgctccttcgtaaggccacttccgcacaccgacaccaacatgaacggacagctcaacggcttccacgaggcgttcatcgaggagggcacattccttttcacctcagagtcggtcggggaaggccacccagataagatttgtgaccaaatcagtgatgctgtccttgatgcccaccttcagcaggatcctgatgccaaagtagcttgtgaaactgttgctaaaactggaatgatccttcttgctggggaaattacatccagagctgctgttgactaccagaaagtggttcgtgaagctgttaaacacattggatatgatgattcttccaaaggttttgactacaagacttgtaacgtgctggtagccttggagcaacagtcaccagatattgctcaaggtgttcatcttgacagaaatgaagaagacattggtgctggagaccagggcttaatgtttggctatgccactgatgaaactgaggagtgtatgcctttaaccattgtcttggcacacaagctaaatgccaaactggcagaactacgccgtaatggcactttgccttggttacgccctgattctaaaactcaagttactgtgcagtatatgcaggatcgaggtgctgtgcttcccatcagagtccacacaattgttatatctgttcagcatgatgaagaggtttgtcttgatgaaatgagggatgccctaaaggagaaagtcatcaaagcagttgtgcctgcgaaataccttgatgaggatacaatctaccacctacagccaagtggcagatttgttattggtgggcctcagggtgatgctggtttgactggacgcaaaatcattgtggacacttatggcggttggggtgctcatggaggaggtgccttttcaggaaaggattataccaaggtcgaccgttcagctgcttatgctgctcgttgggtggcaaaatcccttgttaaaggaggtctgtgccggagggttcttgttcaggtctcttatgctattggagtttctcatccattatctatctccattttccattatggtacctctcagaagagtgagagagagctattagagattgtgaagaagaatttcgatctccgccctggggtcattgtcagggatctggatctgaagaagccaatttatcagaggactgcagcctatggccactttggtagggacagcttcccatgggaagtgcccaaaaagcttaaatattgaaagtgttagccttttttccccagacttgttggcgtaggctacagagaagccttcaagctctgagggaaagggccctccttcctaaattttcctgtcctctttcagctcctgaccagttgcagtcactctagtcaatgacatgaattttagcttttgtgggggactgtaagttgggcttgctattctgtccctaggtgttttgttcaccattataatgaatttagtgagcataggtgatccatgtaactgcctagaaacaacactgtagtaaataatgctttgaaattgaacctttgtgccctatcacccaacgctccaaagtcataattg

SEQ ID NO: 186505 - DNA, 973 bp, Homo Sapiens
ataaaagccaactttgtacaaaaaagttggcgcccgcctgctacgagtagaacgctgtccgcagcttgcgcatttcgcagccgctgccgcctcgccgctgctccttcgtaaggccacttccgcacaccgacaccaacatgaacggacagctcaacggcttccacgaggcgttcatcgaggagggcacattccttttcacctcagagtcggtcggggaaggccacccagataagatttgtgaccaaatcagtgatgctgtccttgatgcccaccttcagcaggatcctgatgccaaagtagcttgtgaaactgttgctaaaactggaatgatccttcttgctggggaaattacatccagagctgctgttgactaccagaaagtggttcgtgaagctgttaaacacattggatatgatgattcttccaaaggttttgactacaagacttgtaacgtgctggtagccttggagcaacagtcaccagatattgctcaaggtgttcatcttgacagaaatgaagaagacattggtgctggagaccagggcttaatgtttggctatgccactgatgaaactgaggagtgtatgcctttaaccattgtcttggcacacaagctaaatgccaaactggcagaactacgccgtaatggcactttgccttggttacgccctgattctaaaactcaagttactgtgcagtatatgcaggatcgaggtgctgtgcttcccatcagagtccacacaattgttatatctgttcagcatgatgaagaggtttgtcttgatgaaatgagggatgccctaaaggagaaagtcatcaaagcagttgtgcctgcgaaataccttgatgaggatacaatctaccacctacagccaagtggcagatttgttattggtgggcctcagtaatgtcattttgttgcatttttctggattttgatggttacttaaaattttggctactacattttttt

SEQ ID NO: 186506 - DNA, 1865 bp, Homo Sapiens
ttggtgctggtttgactggacgcaaaatcattgtggacacttatggcggttggggtgctcatggaggaggtgccttttcaggaaaggattataccaaggtcgaccgttcagctgcttatgctgctcgttgggtggcaaaatcccttgttaaaggaggtctgtgccggagggttcttgttcaggtatacactctttatataacgaacgattaaaagtcatgtaagtgggagggtatttagtagtaatctacttaactacttgttttataccaacgtattatacaagtatatgggtctttgcaatcactgattcttacgacatttgaatccttttaggtctcttatgctattggagtttctcatccattatctatctccattttccattatggtacctctcagaagagtgagagagagctattagagattgtgaagaagaatttcgatctccgccctggggtcattgtcaggtaaagatggtaaagcctgttgctagtcaagtattgagggtgttgggtgtgtgtgtatatacttaaggctgaggaggtgaaggtgtgaaggaagactcctcaaatgggaatatattttaattcctggaacagttttgaactgctgccttagtgaagacttagttatttgagaaatttaaaattacggtgctccatggcttaggctaaccactctagagaatgttccagatttgatatttgagctttgtgctcttctacttaagggtgttaagaaaatagagataaagtgggttgctcaaggtttgttgcaatgtaaaaaccatggtagggtgtgggcggcgggaccttggtaagtattgtgtgatctcaggtgagctttttgacaattgaaatttctcagaataatgacaagttttcgtatttgttgagccagggacggaaaaacaactatagttactaataaggactgtgcaaggagtttggacaccagggaagtaacacttttgccacaaatttttttcctagcatatcccagagaactcatttgccagagctcttgaaaatgagtcttgctgattgttttgctttattttaatttaatgctacatattaagttacggacttgtatattccagggatctggatctgaagaagccaatttatcagaggactgcagcctatggccactttggtagggacagcttcccatgggaagtgcccaaaaagcttaaatattgaaagtgttagccttttttccccagacttgttggcgtatgctacagagaagccttcaagctctgagggaaagggccctccttcctaaattttcctgtcctctttcagctcctgaccagttgcagtcactctagtcaatgacatgaattttagcttttgtgggggactgtaagttgggcttgctattctgtccctaggtgttttgttcaccattataatgaatttagtgagcataggtgatccatgtaactgcctagaaacaacactgtagtaaataatgctttgaaattgaacctttgtgccctatcacccaacgctccaaagtcataattgcattgactttccccaccagatgctgaaaatgtccttgtgatgtgcacgtaaagtacttgtagttccacttatagcctctgtctggcaatgccacagccctgtcagcatgaatttgtaatgtcttgagctctattatgaatgtgaagccttccccttatcctccctgtaacttgatccatttctaattatgtagctctttgtcagggagtgttccctatccaaatcaatcttgcatgtaacgcaagttcccagttggagctccagccctgacatcaaaaaaggcagttaccatttaaaccatctccctggtgcttatgctcttaattgc

SEQ ID NO: 186507 - DNA, 1875 bp, Homo Sapiens
ttggctgctggccactgagatcgagcgtctcatcacatggtacaacccgctgtcagccccggaactggaactagaccaggccggagagaacagcgtggccaactggagatctaagtacatcagcctgagtgagaagcagtggaaggacaacgtgaacctcgcctggagcatctctccctacctagccgtgcagctgcctgccaggtttaagaacacagaagccattgggaacgaagtgacccgtctcgttcggttggacccgggagccgttagtgatgtgcctgaagcaatcaagttcctggtcacctggcacaccatcgacgccgatgctccagagctcagccatgtgctgtgctgggcgcccacggacccacccacaggcctctcctacttctccagcatgtacccgccgcaccctctcacggcgcagtacggggtgaaagtcctgcggtccttccctccggacgccatcctcttctacatcccccagattgtgcaggccctcaggtacgacaagatgggctatgtgcgggagtatattctgtgggcagcgtctaaatcccagcttctggcacaccagttcatctggaacatgaagactaacatttatctagatgaagagggccaccagaaagaccctgacatcggcgacctcctggagcagttagtagaggagaacacaggctccttgtccggcccagcgaaggacttttaccagcgggagtttgatttctttaacaagatcaccaacgtgtcggctgtcatcaagccctaccctaaaggcgacgagagaaagaaggcttgtctgtcggccctgtctgaagtgacggtgcagccaggctgctccctgcccagcaaccccgaagccattgtgctggacgtcgactacaagtctgggaccccgatgcagagtgctgcaaaagccccatatctggccaagttcaaggtgaagcgatgtggagttagtgaacttgaaaaagaaggtctgcggtgccgctcagactccgaggatgagtgcagcacgcaggaggccgacggccagaagatctcctggcaggcagccatcttcaaactgggagacgactgccggcaggacatgctggccctgcagatcatcgacctcttcaagaacatcttccagctggtcggcctggacctctttgtttttccctaccgcgtggtggccactgcccctgggtgcggggtgatcgagtgcatccccgactgcacctcccgggaccagctgggccgccagacagacttcggcatgtacgactacttcacacgccagtacggggatgagtccactctggccttccagcaggcccgctacaacttcatccgaagcatggccgcctacagcctcctgctgttcctgctgcagatcaaggacagacacaacggcaacattatgctggacaagaagggccatatcatccacattggtcagccagccacagcgccaccctcctctcccttcaccccggcacccaggggtggatagggatccccaccccacagagaggagaatgcccaggaccaccctgccaggagtgtcagggtccagctctgaggtccgaactgtcggccaccaagctgttctgctgtagagggtgcctggccccggccccagggagctggggcgagagccgccattgctctgagtcagaagctggagctgggcggagtggggctcgtccaggttcagtgccccagcttggctccttcctccacttcctcccttctctttctctgcctgctgccccaccacccaccccatcactgtctccaagaaaacacaacctgcccttttgggggtggagggggtgctcctgttgcagaagtccttttccactccttcaaaccagaccactc

SEQ ID NO: 186508 - DNA, 1466 bp, Homo Sapiens
gacctgttcgttgcaacaaattgcccccaccaatgcttttttataatgccaactttgtacaaaaaagttgggttaggattcggcgctagtttgatttctttaacaagatcaccaacgtgtcggctatcatcaagccctaccctaaaggcgacgagagaaagaaggcttgtctgtcggccctgtctgaagtgaaggtgcagccgggctgctacctgcccagcaaccctgaggccattgtgctggacatcgactacaagtctgggaccccgatgcagagtgctgcaaaagccccatatctggccaagttcaaggtgaagcgatgtggagttagtgaacttgaaaaagaaggtctgcggtgccgctcagactccgaggatgagtgcagcacgcaggaggccgacggccagaagatctcctggcaggcagccatcttcaaggtgggagacgactgccggcaggacatgctggccctgcagatcatcgacctcttcaagaacatcttccagctggtcggcctggacctctttgtttttccctaccgcgtggtggccactgcccctgggtgtggggtgatcgagtgcatccccgactgcacctcccgggaccagctgggccgccagacagacttcggcatgtacgactacttcacacgccagtacggggatgagtccaccctggccttccagcaggcccgctacaacttcatccgaagcatggccgcctacagcctcctgctgttcctgctgcagatcaaggacagacacaacggcaacattatgctggacaagaagggccatatcatccacatcgactttggcttcatgtttgaaagctcgccgggcggcaatctcggctgggaacccgacatcaagctgacggatgagatggtgatgatcatggggggcaagatggaggccacacccttcaagtggttcatggagatgtgtgtccgaggctacctggctgtgcggccctacatggacgcggtcgtctccctggtcactctcatgttggacacgggcctgccctgttttcgcggccagacaatcaagctcttgaagcacaggtttagccccaacatgactgagcgcgaggctgcaaatttcatcatgaaggtcatccagagctgcttcctcagcaacaggagccggacctacgacatgatccagtactatcagaatgacatcccctactgaggaggggaccttcgagggcctctgccccatgtgccctcaaagctgtcccacaatcatggagccctgcgacctccctgccctgccgccacatgcagtggaggagaggcctgtggcccaaagaacctggtagcgcctcctggggcagcacgtgggtggcgcagccttggtaacgccatggactgcagcgacaatcaatggatggtgctgtctatgcacaggtgtgagtcctctgtttgcactggacatattccctacctgtcttatttcata

SEQ ID NO: 186509 - DNA, 2615 bp, Homo Sapiens
  misc_feature (1095)..(1106): n is a, c, g, or t
  misc_feature (1490)..(1518): n is a, c, g, or t
  misc_feature (2402)..(2429): n is a, c, g, or t
  misc_feature (2530)..(2550): n is a, c, g, or t
actttgtacaaaaaagttgggatgagaataaaattggaatagatggcatacagcagttctgtgatgacctggcactcgatccagccagcattagtgtgttgattattgcatggaagttcagagcagcaacacagtgcgagttctccaaacaggagttcatggatggcatgacagaattaggatgtgacagcatagaaaaactaaaggcccagatacccaagatggaacaagaattgaaagaaccaggacgatttaaggatttttaccagtttacttttaattttgcaaagaatccaggacaaaaaggattagatctagaaatggccattgcctactggaacttagtgcttaatggaagatttaaattcttagacttatggaataaatttttgttggaacatcataaacgatcaataccaaaagacacttggaatcttcttttagacttcagtacgatgattgcagatgacatgtctaattatgatgaagaaggagcatggcctgttcttattgatgactttgtggaatttgcacgccctcaaattgctgggacaaaaagtacaacagtgtagcactaaaggaaccttctagaatgtacatagtctgtacaataaatacaacagaaaattgcacagtcaatttctgctggctggactgaactgaagatcaatcctcacaattcagactgagggttgagacaaaactttaaggatacatcttggaccatatcgtatttcattcttctaatggtggtttgggcttgtcttctagtctgggccgctctaaacatttataattccaacattgtggatttcatcttatatctgtggaccatcctagtttattctcccataagtcttagaagctttatggtgattattttgaggttttcattctcgcataaagcacaatgctgtcttcatcagaaaacagttggcataagaattaaacatatgaacatcacaaaacaatttataaaaacttcttaaatatacgctttgggctagttgcaaagactatgctaatagcacttccagtgagagtgatatatttaagtgtactggatctggaatggtgttttggtttggggggaannnnnnnnnnnncctggcaaatcacatgtgttgttgatgtgagtatctgatgaaaaaacaatgtcagaataaccgacatgaaaattttttaggataacttggtgcctacctgaaaaatgtattgtgttttagactcttgatttcaaaaggttccacagaactagtctgcgcttaccttacccatgtttatatatagctgtcctacagggagcttttatttagaaaatgtctgcataatgttagattcttctcctgtctacattatgcactacataattggacttcattatgcttttgaaatgcttatctgcctgtcacataagttaaactatttaatttgttttgaatgttttggattgctacacaatacaatattctaaatttaggcatgagggnnnnnnnnnnnnnnnnnnnnnnnnnnnnngtcatcgcactatggaacacaaatggaattctcttaatttataagaagatagttgcagttaaattttgaaaatggttgtaatgagccatgaagttcaatctttataatataggtactgctctttcagacaaatagtccattttcgatgacttattattttgttgaaattgctttaactgctaatcactgtggttgccaaatatttacttcaggagcaaagattttcaaacaagcatacacgatgcaaaataccaatctggcttctagtctctttactgttttcgtttcactcagattagctcagttttctcatcaaagcagaatgctatcttgtatgtatttttttcattacaagccccatgagctgcttttatgctgaaaatggtcatttccctgttcacttactgacatgtgaagaagggtttcttgctttcttaaacatttccgtaaggcaggctagaaatgtaatacttcaaatgtttgatgattatggtcttttgataggaatagattctgcttgggatatatatccaggcactctctaaggtctagggttgatattaacaaaggaatgtacttagaatagcagtacattttatgcaaatatggaaattattttaagaaacaatgacatatcaaaactgctttttacatgattttgaaatagactagaaagctttccctatagacatattaatattccaatcataactttaattcaagaatgcagttttaccaaaagaaaaatttgaaaatttctattcaggctactggaattggttattaaaagaaaaaggaaaaagaagaatcttgctgctttcagtatttcctgatttttttgtaaatataaagaggaacttcaattatgaaaaatttttaaaagnnnnnnnnnnnnnnnnnnnnnnnnnnnngtactgttttgtttcctgtcttgaagattttgagttatggttattggtttcagattgattaattcacatatgctgtgttttgaaatgagatcccattagcnnnnnnnnnnnnnnnnnnnnnacaatataaagtgttttctttaaaaagtcatattggttcgtgcctagtgccttggattttacata

SEQ ID NO: 186510 - DNA, 2094 bp, Homo Sapiens
  misc_feature (1646)..(1657): n is a, c, g, or t
tttgtacaaaaaagttgggacaaagcccatatcttgacagctctggcaataactgaatataaacaaggaaaaacggatgtagccaagacattgctatttaaatgctctatcttaaaggaaccaaccacagaaagccttcaagccctgtgtgctctagggttggcaatgcaggatgctacactgtcaaaagcagcacttaatgagttactgaagcacatcaaacacaaagacagtaattatcagaggtgccttcttacatcagcgatttatgcactccaaggccgcagtgtggctgtgcaaaaacaaatatctaaagctgttcacagcaaccctggtgaccctgctctttggtctctgttgtctcgagttgttgcacagtatgctcaacgaaatgcaaagggaggtgttgtagcaggaaatgtggctcatattctggactcaaatcatggaaagaaggcattactgtacactgcggtaaatcagttggctatgggaagcagttcagcagaagatgaaaaaaatactgcactaaagaccattcagaaggcagctctcctttctccaggtgatcctgctatctgggctgggctaatggcagcctgtcacgctgatgataaactggccttagtgaacaacactcagccaaagaggatagatttatacttggcactgttatctgctgtttctgcttcaattaaagacgaaaaattctttgaaaattacaaccagtcccttgaaaagtggtctctctcacaagctgtcactggtctaatagacacaggaagaatatctgaagctgaaactctctgcacaaagaatttaaaaagtaaccctgatcagccagccgttatcttacttttgagacaagttcagtgtaaaccactcctggagtcacaaaagccactcccagatgctgtacttgaagaactacaaaaaacagtcatgtccaactcaacctctgttccagcttggcagtggctggcacatgtgtatcaatcccaaggaatgatgagagctgcagagatgtgttacagaaagagtctacaattggcatcccaacggggcagttggagtgggaagctctcaagtctgttgagactagcactacttgcattaaaagtctgtatggctaacatttccaatgatcactggccatctttggttcaagaggctacaactgaggccttgaagctttgcttttgtccactggctgttcttttacaagctttgttacaattcaaacgcaaaatgggggcaagagagacacggcgtcttttggaaagagtggtatatcagcctgggtatcccaaatctattgcatcaactgcacgttggtacctactgagacacttatatgccaaagatgactatgagcttattgacgtgctggtaaacaatgccaaaactcatggagatacaagagcattggaactgaatcagagattgtcctcacaataacattggattattttatagtaaggaagcaaagaaaaagctgtaagaatgaagcaatgaatcaagacttctacccaaagcaacatttttttaaactatatttattccttttctaaaggaatctagagaagttgaagtttttaagttaggaatgcaattttctgttaactccaaacctgattttaatctgnnnnnnnnnnnntttaatttgggaaaaccagaatgaaaggaaaaccattattgccttggttgcttaacattatttgtaaaccattattttctgcatcttgcatggtgcacaatagaatatcttttactgtaatcccttacaataaagccttaatagccattttctatgtaatatgcaaaagtagattagcacaatgcacaattttcttttgttaaaaatcaaattcaaagatttaattcttgctatgaattctaaagttcggcaaaccaattcatcataaaatccaaataatcttgtaacctatttatctagtgattcatctccaattctgttgaaaaagcataatataaatgttgatgagactagactctaatggatatgtttatataattcccaacactcagtgtgtgaatgcatttaaaaacattaatggaaaataatgctgataa

SEQ ID NO: 186511 - DNA, 1975 bp, Homo Sapiens
  misc_feature (1568)..(1589): n is a, c, g, or t
ttggcgagcgaggcagccgggtgcttcgcagcggagctcgaggctctgtagcacccagttggacccagtcgcccaggcaccgcccgcgccccgcggccgtctcctgcgcctcccagaggagggagttcgagcatcccccgcggcggccactcctcggggccaggagcggggaagcgaagtgcgagagaccccggaccccagcgctgtctcttcccgccgcccgaaccaccatgacccacttcaacaagggggcttcctatgggctctcggccgaagtcaagaacaagattgcttccaagtatgatcatcaggcagaagaagatcttcgcaattggatagaagaggtgacaggcatgagcattggccccaacttccagctgggcttaaaggatggcatcatcctctgcgaacttataaacaagctacagccaggctcagtgaagaaggtcaacgagtcctcactgaactggcctcagttggagaatattggcaactttattaaagctattcaggcttatggtatgaagccacatgacatattcgaagcaaatgatctttttgagaatggaaacatgacccaggttcagactactctggtggctctagcaggtctggctaaaacaaaaggattccatacaaccattgacattggagttaagtatgcagaaaaacaaacaagacgttttgatgaaggaaaattaaaagctggccaaagtgtaattggtctgcagatgggaaccaacaaatgtgccagccaggcaggtatgacagcttacgggactaggaggcatctttatgatcccaaaatgcaaactgacaaaccttttgaccagaccacaattagtctgcagatgggcactaataaaggagccagccaggcagggatgttagcaccaggtaccagaagagacatctatgatcagaagctaacattacagccggtggacaactcgacaatttccctacagatgggtaccaacaaagttgcttcccagaaaggaatgagtgtgtatgggcttgggcggcaagtatatgatcccaaatactgtgctgctcctacagaacctgtcattcacaacggaagccaaggaacaggaacaaatggttcggaaatcagtgatagtgattatcaggcagaataccctgatgagtatcatggcgagtaccaggatgactaccccagagattaccaatatagcgaccaaggcattgattattagatccacacagaaggagctcagtatttagtcctttgtttttattcagtgagaaccaagctagccttgagtaatttttatcttgtcttcctaaaacactattaagcttattgtacttttaagaaaaattgccttacgtacattcctttttcctttttctgcctcttccctcaatagttgccttttagtgctgtaatagttaaatcctacagcataatcaataactcgcatatgaagtaaaaaggaatactgtgaaaggggagtactcttgtacagccagttcttttatgcaaaaatctatgcatttttacaatcttatattaaactggtattttcaaacaataggaaacnnnnnnnnnnnnnnnnnnnnnnacagtttagtgtatctggtttctacatggaaaactaaactcatgcttattgctaaatgtggtctttgccaactaaatttaaaatgcagcattttaaaaatttacatatcaatgtttctacagtattgtttgctaatttttaaataaagtcatgatcagtgtgcatttgtgattatatgtgtactccttctcttacctaacgaacaaaatcttttcaaaatggtgtttctaaaaaagcatgtacaaaaatggcctgtggacatttaggcctgggtgatgcatttgctcttcctgtttgtgccaatgtatcaatgtagagttgctctgttttcttcaactgtatttattgctgcatttctcagcataaacttatcccattgtattttt

SEQ ID NO: 186512 - DNA, 2419 bp, Homo Sapiens
ttggcacaggttgagaacttctgttcagctccctcaggggtttgcgaggctgcctttgcttttctagccccctaaacgggccccccttctctctacaggtgtttcccattaaacactaccaggacaaaatcaggccttacatccagctgccatcgcacagcaacattactggcattgtggaagtgatccttggggaaaccaaggcctatgtcttctttgagaaggactttggggacatgcactcctatgtgcgaagccggaagaggctgcgggaagaggaagccgcccggctcttcaagcagattgtctccgccgtcgcccactgccaccagtcagccatcgtgctgggggacctgaagcttaggaagttcgtcttctccacggaggagagaacccagcttagactagaaagtctagaagacacacacataatgaagggggaagatgatgctttgtcagacaaacatggctgcccagcctacgtgagccctgagatcctcaacaccactgggacctactccggaaaggctgcggacgtttggagcctgggggtgatgctctacacccttctggttggacgataccccttccatgactcagaccccagtgcccttttctccaaaattcggcgtggacagttctgcattcctgagcacatttcccccaaagccaggtgcctcattcgcagcctcttgagacgggagccctccgagagactcactgcccccgagatcctactgcacccctggtttgagtccgtcttggaacccgggtacatcgactcagaaataggaacttcagaccagattgttccagagtaccaggaggacagtgacattagttccttcttctgctaatccccaaaacctcagaaacctcataattcttaacacctggcatttccatttctaaagatggacaggccctttggcgtggtaccaaccagataatgactgcatcaggatgaaagctgctgaactcggcatggcgcctcctcttctctgttgggatgagtgactttattgatttgagcagcatatgctgtgattggctgccctgcaaatttgtttcccttaaggaaccctcaccaactatctctgctggatttgggagttccgcatcttttgtggagggcagagtatggacatcttacacccggtggtcaagtgtgtaataaacttgagcattcgaatgggagaaaaagcaaatcgcacaatgacatattttgagtaataaccgtatttttcacagggtgacaaattgggccaataaatctgccatctttgaactcatctttggtggctagactgctacggcagcttctctgatgggaaagttccttttttggcttaacactcaccctttcttcacactcacatttaccaatgactctgctccgtttttggagcagactgttttaagttgctcaggagcctgatggaaccatgaaccgagactcttctctgtttcctgccaagacctcatctgcactaatgccttctccctgaccttgacacttccccctttagctataaaagcacttaccagccgaacgtggaacagtatcacaaaagattccatctcccaacgatttcagaactctgagctcagagagactccagattttaaaaaataatttgagtgcttggaaactattagctttttaagttccttccaaatatgttagtacctaccctttactttttccccaagaccatctcagggtggagcattctgtctaagagaagaaagataaggaggctcccacccacctctcccaagagcagacattaaacatctttgtgctttgaagagagtgaattttggatagtcttgtgattctcagactaacttccagaattatactttaacccctcccagatatggtccgcctttggcattgtgtgtacatctgcagttttgcatggtgggttgttaatatttcaaatgtgtggtttatgaatacgtctgtataatcggcttctggagtgaaacagcaaaccccaaatcttcaaagttggaaggaactttaaaaatcatccggtccaatctctttcctctttctgccacctcccaaggcagaaatcccctcttcagcttcttttgtaggtgggaatccagcctctgttagatatgtccagagatggaaactcactcccctacaaaagatggagcttaatggagaaattgcaactttcattaaaaaacaaattcagatgaaatatcagtaactgtcttggacagtgctgaaatcacgtggttaaacgggtaaacaaaatatactgtattttgagaaatggcacaaaaacagcagtcatctttaagggctatgcctagcaaactactaacatgcattgtgagaatgccgtgtatacctcacgtactgtgtactttgtacatatattttacctttatacct

SEQ ID NO: 186513 - DNA, 955 bp, Homo Sapiens
tgaggacagagtccatctctcccagcgagtcctggttatcctttacttacactctggcctcgggggcagtggcgtgtggcctcggtcctccccaggtaactctggagggcgctgtggaatattgctgtgatttgcccttactcgtctttcacccatgttccgccttgattcggcataaggacagactgctccagtggggccttgggtcctcaggccttctgaccgcttggtcttgagtgacattccagaagagtgactaatgacataaaacgattaagaaaatccatgtggcagcggccaaccggaaacagttttgtcccaggctgcacagggtcggaggccccaaggtcaccggggccactgcccgtcacaggtccaccttgaccccctttatgaaaggcaggcccgtgggcaccctcttcttatactccaggtactcctctccaaaaaagtgaattagtgagatttcttcttcttctgttcgatcgcggaagaatcgccacactgtcagggcatagctgacgccgcagatggggttacacagcatcacctgagttccaatactccagtaaaaccacccgacgtaagaaggatgccgaaaccaagcgtacactccactggtcaccagagtatgtgtatctgatttttcattctgtaccacgtggttgaaattggagccagctgtaaacatggccgccttcctcagacattctccgaagaccaccatcagcagccctgtgacactgagccaggtaatctgcttcagttctggccaaaagatattttcaagtgtgaactctaaccaagaagaaagagcagctactgtatactccaggctgtgattcaggagaaaggaatccaaggacagacttttgggattattgactgctgccaacaagtattcagaatagtggaacaatgacagggagcacatgtaccagccaaagtgacccaa

SEQ ID NO: 186514 - DNA, 1112 bp, Homo Sapiens
ttgggttttcgatgatattgagacaaacatgaatttaattggagccactgcagttgaagacaagctacaagatcaagctgcagagaccattgaagctctgcatgcagcaggcctgaaagtctgggtgctcactggggacaagatggagacagctaaatccacatgctatgcctgccgccttttccagaccaacactgagctcttagaactaaccacaaaaaccattgaagaaagtgaaaggaaagaagatcgattacatgaattattgatagaatatcgcaagaaattgctgcatgagtttcctaaaagtactagaagctttaaaaaagcatggacagaacatcaggaatatggattaatcatagatggctccacattgtcactcatactaaattctagtcaagactctagttcaaacaattacaaaagcattttcctacaaatatgtatgaagtgtactgcagtgctctgctgtcggatggcaccattacagaaagcccagattgtcagaatggtgaagaatttaaaaggcagcccaataactctgtcgataggtgatggtgccaatgatgttagtatgatcttggaatcccatgtgggaataggtattaaaggcaaagaaggtcgccaagcagctaggaatagcgattattctgttccaaagtttaaacacttaaagaaactgctgttggctcatggacatctatattatgtgagaatagcacaccttgtacagtacttcttctataagaacctttgtttcattttgccacagtttttgtaccagttcttctgtggattctcacaacagccactgtatgatgctgcttaccttacaatgtacaatatctgcttcacatccttgcccatcctggcctatagtctactggaacagcacatcaacattgacactctgacctcagatccccgattgtatatgaaaatttctggcaatgccatgctacagttgggccccttcttatattggacatttctggctgcctttgaagggacagtgttcttctttgggacttactttctttttcagactgcatccctagaagaaaatggaaaggtatacggaaactggacttttggaaccatgtttttac

SEQ ID NO: 186515 - DNA, 926 bp, Homo Sapiens
ttggctttcgagtggcgtttgctgcccgccgcagcccgggcgttgaaggtagtaaagcggccacccggccgcatcatggtgaccccctgtcccaccagcccctcgagccccgccgcccgagcggggaggcgggacaacgaccagaaccttcgcgccccggtgaagaagagcaggcgtccgcgcctccggaggaagcagccgctgcatcccctgaacccgtgcccgctcccgggagactccggcatttgcgacctgttcgagtcccccagctccggctcagacggcgcagagagcccctctgcggcgcggggtggtagccccctgcccggcccggcccagcccgtggcgcagctagatctacagaccttccgcgactacggccagagctgctacgccttccgcaaggcgcaggagagccacttccacccgcgggaggcgctggcacggcagccacaagtgaggtgctggtagagccagctccacgccgccgctcttcctctcctcccaggctctctcctctcctgccggctcggccctccgagcgcccgggcccgcgacagcccaggtcccgccccgagtcgaagcacaaggggccgtggaggggcgtcaccggcctcattttacagatggagaaaagtggggcgtagacggcttgagggacttgccccgtcccaagctggctactggggcacggtagagaggaattcgtttccgggttgagtctggactcctaccgaactcgggcaagttatttaacacccctgagcttctttcttcatctgcaaaatggaacccctccccttcctttgaattgctgagcccattacgcgaggtaacgtgtacgacgctctctgcacagcgccaggtcccaatcccggtgttccggctcagcacggcccacgcgtttcccagtttccattgcgttt

SEQ ID NO: 186516 - DNA, 681 bp, Homo Sapiens
actttgtacaaaaaagttggctgcagtcacgctcagaagtctgcagctatgggacgatgacttgggagcgctatgggcctgccccatggacaaatacatccacaagcgctgggccctcgtgtggctggcctgcctactctttgccgctgcgctttccctcatcctccttctcaaaaaggatcacgcgaaagggtggctgaggctcttgaaacaggacgtccgctcgggggcggccgccaggggccgcgcggctctgctcctctactcagccgatgactcgggtttcgagcgcctggtgggcgccctggcgtcggccctgtgccagctgccgctgcgcgtggccgtagacctgtggagccgtcgtgaactgagcgcgcaggggcccgtggcttggtttcacgcgcagcggcgccagaccctgcaggagggcggcgtggtggtcttgctcttctctcccggtgcggtggcgctgtgcagcgagtggctacaggatggggtgtccgggcccggggcgcacggcccgcacgacgccttccgcgcctcgctcagctgcgtgctgcccgacttcttgcagggccgggcgcccggcagctacgtgggggcctgcttcgacaggctgctccacccggacgccgtacccgcccttttccgcaccgtgcccgtcttcacactgccctcccc

SEQ ID NO: 186517 - DNA, 2253 bp, Homo Sapiens
gacacaagcggggtaggcaccccaacagagcccaaaacctctgtcccactgcgagatgacccaatgttggccgaagcacccgtggggcaggagggtcactggaaaccaggtggctccacctcacaggatacacgatggctctgagcctctgtcagtggccggagcccctgtagccacctctggatatcatggtcaggttggaggttatagccacgacattcattctggagccgtcgcaactcagaaaggactgcaaactccttcctccgcttgtcaaaattgatgtatccattctccaactcatccttggaggctgcatccagcatcacaaggtccttcaggaaggtgccaaggtatgggaccacacccccaccccgggagccagacctcggggccttcttggagtgtggctccagaggagactgcagcttcacctcctgcacgagcagctcccgactctgggaataattatcctcctcggagaaaatctggcagaggctggaaaagactctgaggctgtccctggttgcttccccccaggctgcccgaagcctgtggatggggctggactgcagggctgacaccacggcataaactgaagagaagtttcggagcagccggcactcctctgccacgcggatccacttctccaggagccgggccctctgtgggggacggagtggccgtatggtcacctccccaggtccctctccagtggaagtagcccccaggacagaactaaccactgcccctgccaccttgttaaactgtgtgacagtagctcggacagatgggcagaggtgagaatgtcctggccggtctctgtgaccccacaggcctcccaggcactgagaggggatcaaattgagaaaaagttcctgcagggtagaggtcagaggttaaagttcatagtcaagtgaggtcagccttccaatatcagggatctgaggatctcaggtggccaaggaaccagaggggcacagggtttgaagggtaacgaccaaagggaaaaggggagaatcaaaatggtaggtggaggaggctaggagctggatcaggaaggggtggaagcaaggaaaggatctggagtcaaggagaggttagtaaggggtcagggggcataggggccagaggtcagggtctcaccgcatctagcagggtcagctgttcggccaagtggtcagcgaggaacaccaggacatccgtggggtcagcagggggatcgccggggagggccaggggcttaggaaggtcgggggcctgggggtccacccgggaccggagattgcggatgaggtcagcgctgccccccccaacacccttccctgctgcataccctgtctgaagtaagaagctctcaagccggtcaagctgacccttggcctcagagccaaaatcctcagggtgagaggccagccaggttgacagtacagagatggctacctctgttgtcctctctagttcgtcggtaggatgagattcaagggcttccagcctgtcagccataagccctagcaaggcaggcgtggaggtgaaggcccggtgggtagccaggaaggctgacatgaagctcacatcagtccctgatgtccgggtatccagtaggtgtctgaccagggcctccagagtgccagctcggagccgtcgggaggaacgtgggggaggcatagggaccaagggatcaagaggtcgatattggcggcttgtgacggtaaacacggcaccatcctcctcctcatcccagacggacacaggggcctgtggtggcagggcatagtaccagcgagtgcgaggaagggttgggggagctggtgaccccaggtctcccccactggggcccagacagccccaccccagccgcctcagggccccggtggagtcgaaggggctgcagtggaggcgtggatggagtacaggaattctgatcctggagacccccaaagccccttctccccagagctgaacccacacacgacagagaagcagggtacaaagggcaggagagggaagcgagaggcagcaagccagaggcagcgactaggggtagctgaaacctcagtccaggcactgccgcatgccccgcccctcccggccaaggactataccagcccagagaattagtctttttcaggacccctttcaccctggtccctcgggtagcgcctccactatctcagccctaagggacccccgaaggtagcagctccaatcccagtacaggaaggaaaaggggaagggggatgatagggccaa

SEQ ID NO: 186518 - DNA, 1494 bp, Homo Sapiens
ttggccacgctgcccccacccctcccgagcaggcgcccccatggcccgaccccgctgattccttcactcggccatgctcccgcggcccctgcggctgcttttggacacgagcccccccgggggagtcgtactgagcagcttccgaagccgggaccccgaagagggtgggggcccaggtggcctggtcgtgggcggggggcaggaggaagaggaggaggaagaagaagaggcccctgtgtccgtctgggatgaggaggaggatggtgccgtgtttaccgtcacaagccgccaatatcgacctcttgatcccttggtccctatgcctcccccacgttcctcccgacggctccgagctggcactctggaggccctggtcagacacctactggatacccggacatcagggactgatgtgagcttcatgtcagccttcctggctacccaccgggccttcacctccacgcctgccttgctagggcttatggctgacaggctggaagcccttgaatctcatcctaccgacgaactagagaggacaacagaggtagccatctctgtactgtcaacctggctggcctctcaccctgaggattttggctctgaggccaagggtcagcttgaccggcttgagagcttcttacttcagacagggtatgcagcagggaagggtgttggggggggcagcgctgacctcatccgcaatctccggtcccgggtggacccccaggcccccgaccttcctaagcccctggccctccccggcgatccccctgctgaccccacggatgtcctggtgttcctcgctgaccacttggccgaacagctgaccctgctagatgcggaactttttctcaatttgatcccctctcagtgcctgggaggcctgtggggtcacagagaccggccaggacattctcacctctgcccatctgtccgagctactgtcacacagtttaacaaggtggcaggggcagtggttagttctgtcctgggggctacttccactggagagggacctggggaggtgaccatacggccactccgtcccccacagagggcccggctcctggagaagtggatccgcgtggcagaggagtgccggctgctccgaaacttctcttcagtttatgccgtggtgtcagccctgcagtccagccccatccacaggcttcgggcagcctggggggaagcaaccagggacagcctcagagtcttttccagcctctgccagattttctccgaggaggataattattcccagagtcgggagctgctcgtgcaggaggtgaagctgcagtctcctctggagccacactccaagaaggccccgaggtctggctcccggggtgggggtgtggtcccataccttggcaccttcctgaaggaccttgtgatgctggatgcagcctccaaggatgagttggagaatggatacatcaattttgacaagcggaggaaggagtttgcagtccttttctgagttgcgacggctcc

SEQ ID NO: 186519 - DNA, 1292 bp, Homo Sapiens
  misc_feature (837)..(849): n is a, c, g, or t
  misc_feature (987)..(1003): n is a, c, g, or t
gcaatgagaaatacctaataaggcattgaaaaaattattttaaatacaagcaattaaaaatttaagttttgacccagtataaagttctttaatctgcatcacttttaaagattatactttttaatgtcatgattgcatcattttaatgtttttataagtgtgctttcaatagtttctttcatttataaggtgacaatggaatggactctgatatggaagaggaagcaaatgatggttctaagatgggatctgatttagtcagtcagcaagacatctgtatagattctgcttcatccgtgagaaagaataagcaacctgaaggtttggaattaaaacaaggaaaaggggaagatagtgatgtactcagtataaatgcagatgcttatgacagcgacatagaaggcccatgcaacgaagaagcagctgctcccgaggcaccagaaaatacagtccaaagtgaagctggtcagatagatgacctggagaaagacattgagaaaagtgtgaatgagattctaggactggcagagtctagcccaaacgaacccaaagcagccaccctggctgttcctccaccagaagatgttcaaccttctgcacagcaactggagctgctagaacttgagatgagggcaagagcgattaaagccctaatgaaagctggtgatataaaaaagccagcctaggtatttaacttgattttgaattttaggtatgtttgaacaaagccacatcatttaattttgtatctaaaatttatttggggtcttatatgttatttctcatgtaacccttattaggactcattttagccctaaattacctgtggctgtttcnnnnnnnnnnnnngactacttttatattataaatgtgtgttactgtcttatgaattcatggcaatatagttggatagcctggatactttgttagatgagtatttagctgtgtctgcaaatcttaaaagccattagcaaagagtcgtggtannnnnnnnnnnnnnnnnaaatgtttgggcaccaaacctaaaagcaaaagattgacgaagcatgtttctcttaaggctacttgtattttacaatacaatattaaattatttaatttgagaaatttagttttgcttatatgcactttttaaatatatactattttgaagattccttatgtaaatgcaaatttcctagttaaaacccgaataacagagatctgaaatgactgagaaaaacttttttattaaaggaaggaattaatttaaggcaatttttaactatgtaggactaattgcccatgtttaa

SEQ ID NO: 186520 - DNA, 1633 bp, Homo Sapiens
ttgggactgaacgagctgatgaagttgttaccgttgttttatgagtcttttgtatacagaataattgattttccccgcaggtggcacctggtaaatagcccttgcggagaaacaccctgttccttcccagggagagattgacgctccggcgagtgattaccagtgtgcttttccattaaggtgtgtgacaggtgccgcaagataagcccgatttttcatgactgctttttcctgcctttctgtgccctcaggacactgcccatctctaagataagaacctggaaaggggactctgttggccattggaaattgcagaataatgtctcaggtgacatttagtgatgtggctatagacttctctcatgaagagtgggcatgcctagattctgctcagagggacttatacaaggatgtgatggtccagaattatgagaacctggtctctgtaggtctttccgtaactaagccatatgtgatcatgttattggaggatggaaaagagccctggatgatggagaaaaaactgtcaaaagattgggaatcaagatgggaaaacaaggaattatcaacaaagaaggatatttatgatgaagattcaccccaaccagtaacaatggaaaaagttgtaaaacaaagttatgaattttcaaattctaataagaatttggaatatacagaatgcgacacatttagaagcacctttcattcaaagtctactctttctgaaccacaaaacaattctgctgaagggaattcacacaaatatgatatattaaagaagaatttatcaaaaaagtcagttataaaaagtgagagaataaatggtggaaagaaacttttaaattctaataaaagtggggcagccttcaaccagagcaaatctcttacccttccccagacttgtaatagagagaaaatctatacatgcagtgaatgtgggaaagcctttggcaaacagtcaatcctcagtcgccactggagaattcatacaggagagaagccctatgaatgtcgtgaatgtgggaagacttttagccatggttcatcccttacacgacatcagataagccatagtggagagaaaccttacaaatgcattgaatgtgggaaggcctttagccatggctcatcacttactaaccatcagagcactcacacgggagagaaaccgtatgaatgtatgaactgtggaaagtcttttagtcgtgtgtcccttctcattcagcatctaagaattcatacgcaagaaaaacgctatgagtgtcgtatatgtggaaaggccttcattcatagttcgtctctcattcaccatcagaaaagccatactggagagaagccttatgaatgtagagaatgtgggaaagctttctgctgtagctcacaccttactcaacatcaaagaattcacagtatgaagaaaaaatatgaatgcaacaaatgtctcaaggtctttagtagcttctcatttcttgttcaacatcagagtattcatactgaagaaaaaccgtttgaagtttagaaatgcaggaaatccttcaaccagcttgaatcactgaatatgcatttgagaaatcacattagattgaaaccctacgaatgcagtatatgtgggaaagcctttagtcataggtcg

SEQ ID NO: 186521 - DNA, 1531 bp, Homo Sapiens
ttggctcaggtgtttgggcttgttgttccgtatactcagtgggttcgcggccgccggcccagtgaggctgggttcgaggagctggagcgggaaactggagcttaaattctggcggcgagatggacattctgaaatcagagatccttcggaagcggcagctggtggaggacaggaacctgctggtggaaaataaaaaatatttcaagcgtagtgagctcgccaaaaaagaagaggaagcatattttgaaagatgtggctacaagatacagccaaaagaggaggaccagaaaccattaacttcatcgaatccagtgttagaacttgaactggcagaggaaaaattacctatgacgctttctaggcaagaggtcatcagaagattgagagaaagaggagaaccaatcagactatttggagagactgattatgatgcttttcaacgtttaaggaaaatagagatcctcacaccagaagttaacaagggattgaggaatgatttgaaagcagccttggataagattgatcagcagtacctcaatgaaatcgtcggcggtcaggagcctggagaggaagacacacagaatgatctgaaagttcatgaggaaaacaccacaattgaagagttagaggcgcttggagagtccttagggaaaggcgatgatcataaggacatggacatcatcaccaaattcctgaagtttcttcttggcgtttgggctaaagaattgaatgccagagaagattatgtgaaacgcagtgtgcagggtaaactgaacagtgcgacccagaaacagaccgagtcctacctaagaccactttttagaaagctacggaaaaggaatcttcctgctgatattaaagaatcaataacggatattattaaattcatgttgcagagagaatacgtgaaggcaaatgatgcttatcttcagatggccattggaaatgcgccttggcccatcggtgtcactatggttggtatccatgccagaactggcagagaaaagattttttccaagcatgttgcacatgttttaaatgacgaaactcagcggaaatatattcagggattgaagaggttaatgaccatttgccagaaacactttcctacagacccatccaaatgtgtggagtacaatgcactgtgagatctgtgtatggtgtgttaataacaataagaaacttagggaagcaggctgtggacttctggaattaccaacaggaatgaggaaagaagaaaactggagtttccagtctctgagttctacctgatgtaactcttgattggttttaagaactttgttggccttcatttcatatctgactgcaagctgatttttctttcttgctttcattttaattagtccaaaattaagttttaaagatttttcctcacaatttaaatccatagacaacagaagggggtttaaaatgacctttttttcagttgacccgaaagttgtggttagatgattaaaaagaaacatttgaggatggacttaattatttcagtaaaatattataatttgcc

SEQ ID NO: 186522 - DNA, 2249 bp, Homo Sapiens
  misc_feature (1862)..(1943): n is a, c, g, or t
ttgggttggaatgggctgacagtggctgacctcgtgttcccgtggtttgtatttattatgggatcttccatttttctatcgatgacttctatactgcaacgggggtgttcaaaattcagattgctggggaagattgcatggaggagtttcctgttaatctgcataggaattatcattgtgaatcccaattattgccttggtccattgtcttgggacaaggtgcgcattcctggtgtgctgcagcgattgggagtgacatactttgtggttgctgtgttggagctcctctttgctaaacctgtgcctgaacattgtgcctcggagaggagctgcctttctcttcgagacatcacgtccagctggccccagtggctgctcatcctggtgctggaaggcctgtggctgggcttgacattcctcctgccagtccctgggtgccctactggttatcttggtcctgggggcattggagattttggcaagtatccaaattgcactggaggagctgcaggctacatcgaccgcctgctgctgggagacgatcacctttaccagcacccatcttctgctgtactttaccacaccgaggtggcctatgaccccgagggcatcctgggcaccatcaactccatcgtgatggcctttttaggagttcaggcaggaaaaatactattgtattacaaggctcggaccaaagacatcctgattcgattcactgcttggtgttgtattcttgggctcatttctgttgctctgacgaagtttctgaaaatgaaggctttattccagtaaacaaaaatctctggtccctttcgtatgtcactacgctcagttcttttgccttcttcatcctgctggtcctgtacccagttgtggatgtgaaggggctgtggacaggaaccccattcttttatccaggaatgaattccattctggtatacgtcggccacgaggtgtttgagaactacttcccctttcagtggaagctgaaggacaaccagtcccacaaggagcacctgactcagaacatcgtcgccactgccctctgggtgctcattgcctacatcctctatagaaagaagattttttggaaaatctgatggctcccactgagatgtgctgctggaagactctagtaggcctgcagggaggactgaagcagcctttgttaaagggaagcattcattaggaaattgactggctgcgtgtttacagactctgggggaagacactgatgtcctcaaactggttaactgtgacacggctcgccagaactctgcctgtctatttgtgacttacagatttgaaatgtaattgtcttttttcctccatcttctgtggaaatggatgtctttggaacttcattccgaggagataagctttaactttccaaaagggaattgccatgggtgtttttcttctgtggtgagtgaaacaatctgaggtctggttcttgctgaccttgttgccctgcaaacttcctttccacgtgtacgcgcacaccaacacgaaatgccatcactcctactgcggctgctatgaagcttactggttgtgatgtgttataatttagtctgtttttttgattgaatgcagtttaatgtttccagaaagccaaagtaattttcttttcagatatgcaaggctttggtgggtccaaaaaatgtctatcacaagccattttttccttttcctctctcgaaaagttaaaatatctatgtgttattcccaaaccctcttacctatgtatctgcctgtctgtccatcatcttccttcctccctatctctgtgtatctggatggcagccgctgcccaggggagtggctgtggggagggcaggtactgtctttgcctgtgggtnnnnnnnnnnnnnnnnnnnnnnnnnnnnnnnnnnnnnnnnnnnnnnnnnnnnnnnnnnnnnnnnnnnnnnnnnnnnnnnnnncgggaagatgactctcagttccttccacctcttagacatggtgaggtaacagacatcaaaagcttttctgaaatcttcagaagaaatagttccattacagaaaactcttcaaaataaatagtagtgaaaacttttaaaaactctcattggagtaagtcttttcaagatgatcctccacaatggaggcagcgttcctacttgtcatcacacagctgaagacattgtttcttagtgtgaatcggggacaaaggacaaacagagacacacgcattgttcatggagcatcgtcaccctcctggtgttctg

SEQ ID NO: 186523 - DNA, 1172 bp, Homo Sapiens
  misc_feature (918)..(972): n is a, c, g, or t
tttgtacaaaaaagttggcttagacatggtccatttgaaaaacagacatcaaaagcttttctgaaatcttcagaagaaatagttccattacagaaaactcttcaaaataaatagtagtgaaaacttttaaaaactctcattggagtaagtcttttcaagatgatcctccacaatggaggcagcgttcctacttgtcatcacacagctgaagacattgtttcttaggtgtgaaatcggggacaaaggacaaacagagacacacggcattgttcatgggaggcatcgtcaccctcctgggtgttctgtgggaatttcctgtgtgaggaaaacgtggccacagggttgtgctgtacccacccttccccggcgagatggccctcggcctgtgccgctgcttccaccctcgccactccatggcagcttttggtctgtttccggctctgccctctgccctgaactctcatccggcttgtacctgcctgctggacccctccacctggaggccagcccatgtctcaggcccagccctagcctcttctcctcaaattctaagtgttttctctttaggtttccctggctttgtgaatggatcatgtgtctctaggtataaacctgacatcatctttccacccggcttacctccaccagatctccccagttctgtctccatcttctacctgcagctgctctgttctcatggtcactgctgcatcactgagtctggacccttgttatcattttcaaactggcctccttccctcgttccccacttcttaaagtcacctgtccattgccaccagattaagctttctccagccagatcacctctctctgagaaacctccattgacatggaaacaccattgtctggcacacatactcacatactcaccttcccgtcttgatccccacacatctnnnnnnnnnnnnnnnnnnnnnnnnnnnnnnnnnnnnnnnnnnnnnnnnnnnnnnnttgtctcccctcccctctgaatccagcccagcggggcttctcctgcctccatcacatcacagaagtacctcctgcttctggttttaattagagccttccccgattacattttcctctgaattttttcctatctacatttgatctgtcatgtttaaaccccctacttctaaggaacttctctaatctcttatcctcatccc

SEQ ID NO: 186524 - DNA, 2330 bp, Homo Sapiens
  misc_feature (499)..(580): n is a, c, g, or t
  misc_feature (1505)..(1577): n is a, c, g, or t
  misc_feature (1924)..(1998): n is a, c, g, or t
acaaaaaagttggaagctttaactttccaaaagggaattgccatgggtgtttttcttctgtggtgagtgaaacaatctgaggtctggttcttgctgaccttgttgccctgcaaacttcctttccacgtgtacgcgcacaccaacacgaaatgccatcactcctactgcggctgctatgaagcttactggttgtgatgtgttataatttagtctgtttttttgattgaatgcagtttaatgtttccagaaagccaaagtaattttcttttcagatatgcaaggctttggtgggtccaaaaaatgtctatcacaagccattttttccttttcctctctcgaaaagttaaaatatctatgtgttattcccaaaccctcttacctatgtatctgcctgtctgtccatcatcttccttcctccctatctctgtgtatctggatggcagccgctgcccaggggagtggctgtggggagggcaggtactgtctttgcctgtgggtnnnnnnnnnnnnnnnnnnnnnnnnnnnnnnnnnnnnnnnnnnnnnnnnnnnnnnnnnnnnnnnnnnnnnnnnnnnnnnnnnncgggaagatgactctcagttccttccacctcttagacatggtgaggtaacagacatcaaaagcttttctgaaatcttcagaagaaatagttccattacagaaaactcttcaaaataaatagtagtgaaaacttttaaaaactctcattggagtaagtcttttcaagatgatcctccacaatggaggcagcgttcctacttgtcatcacacagctgaagacattgtttcttaggtgtgaaatcggggacaaaggacaaacagagacacacggcattgttcatgggaggcatcgtcaccctcctgggtgttctgtgggaatttcctgtgtgaggaaaacgtggccacagggttgtgctgtacccacccttccccggcgagatggccctcggcctgtgccgctgcttccaccctcgccactccatggcagcttttggtctgtttccggctctgccctctgccctgaactctcatccggcttgtacctgcctgctggacccctccacctggaggccagcccatgtctcaggcccagccctagcctcttctcctcaaattctaagtgttttctctttaggtttccctggctttgtgaatggatcatgtgtctctaggtataaacctgacatcatctttccacccggcttacctccaccagatctccccagttctgtctccatcttctacctgcagctgctctgttctcatggtcactgctgcatcactgagtctggacccttgttatcattttcaaactggcctccttccctcgttccccacttcttaaagtcacctgtccattgccaccagattaagctttctccagccagatcacctctctctgagaaacctccattgacatggaaacaccattgtctggcacacatactcacatactcaccttcccgtcttgatccccacacatctnnnnnnnnnnnnnnnnnnnnnnnnnnnnnnnnnnnnnnnnnnnnnnnnnnnnnnnnnnnnnnnnnnnnnnnnngaatccagcccagcggggcttctcctgcctccatcacatcacagaagtacctcctgcttctggttttaattagagccttccccgattacattttcctctgaattttttcctatctacatttgatctgtcatgtttaaaccccctacttctaagggaacttctctaatctcttatcctcatccccaaatagtgttttcttcctctgggttcttataatgttggtatcaatctcacagcatttagtgcttcctgcctggtgtgacagttacctgtgtgcatgtgcaatttctaatttcccacgctagactgtgagcttcctaaggcaagaatcatgccttgttggtttnnnnnnnnnnnnnnnnnnnnnnnnnnnnnnnnnnnnnnnnnnnnnnnnnnnnnnnnnnnnnnnnnnnnnnnnnnntgtggatttttaaaataaatatttaagtgctggtaagatgagcatgtatccggggtgcccatgaaatgttcttggggccgtgtggggacagtcgtcattcctcctcctgccacccttttctttcagtgagtcactgtggatggtcccagctgtgtcatcccaaagttcagcaaggaaagctgagctgggcctctccaggtgagttttctagaaacatttctcaaactgtgggttacatcaacttgggtgtcttgagctgtaaagaaggaactccggagtcagctgggctacaggggagcttctctaaatcctgcgggaggccagacccagcc

SEQ ID NO: 186525 - DNA, 1525 bp, Homo Sapiens
  misc_feature (869)..(879): n is a, c, g, or t
ttgggtgtattttggaggtacagttgttggcgagcaagctatgaaatctgaagatgaagtgggaagtttaatagagtatgaattcagggtaataaacttaggtaaacctcttacaaacctcggcacagcaaccttgaacattcagtggccaaaagaaattagcaatgggaaatggttgctttatttggtgaaagtagaatccaaaggattggaaaaggtaacttgtgagccacaaaaggagataaactccctgaacctaacggagtctcacaactcaagaaagaaacgggaaattactgaaaaacagatagatgataacagaaaattttctttatttgctgaaagaaaataccagactcttaactgtagcgtgaacgtgaactgtgtgaacatcagatgcccgctgcgggggctggacagcaaggcgtctcttattttgcgctcgaggttatggaacagcacatttctagaggaatattccaaactgaactacttggacattctcatgcgagccttcattgatgtgactgctgctgccgaaaatatcaggctgccaaatgcaggcactcaggttcgagtgactgtgtttccctcaaagactgtagctcagtattcgggagtaccttggtggatcatcctagtggctattctcgctgggatcttgatgcttgctttattagtgtttatactatggaagtgtggattctttaaacgctctaggtacgatgacagtgttccccgataccatgctgtaaggatccggaaagaagagcgagagatcaaagatgaaaagtatattgataaccttgaaaaaaaacagtggatcacaaagtggaacgaaaatgaaagctactcatagcgggggcctnnnnnnnnnnngcttcacagtacccaaactgctttttccaactcagaaattcaatttggatttaaaagcctgctcaatccctgaggactgatttcagagtgactacacacagtacgaacctacagttttaactgtggatattgttacgtagcctaaggctcctgttttgcacagccaaatttaaaactgttggaatggatttttctttaactgccgtaatttaactttctgggttgcctttatttttggcgtggctgacttacatcatgtgttggggaagggcctgcccagttgcactcaggtgacatcctccagatagtgtagctgaggaggcacctacactcacctgcactaacagagtggccgtcctaacctcgggcctgctgcgcagacgtccatcacgttagctgtcccacatcacaagactatgccattggggtagttgtgtttcaacggaaagtgctgtcttaaactaaatgtgcaatagaaggtgatgttgccatcctaccgtcttttcctgtttcctagctgtgtgaatacctgctcacgtcaaatgcatacaagtttcattctccctttcactaaaacacacaggtgcacaagacttgaaatgctagttatacttatttgtatatggtatttattttttcttttctt

SEQ ID NO: 186526 - DNA, 3557 bp, Homo Sapiens
  misc_feature (1622)..(1632): n is a, c, g, or t
ttggatctgcaaagtttcttccagccctgaagttgtatgaacccttcacagctcaatctgccgttctgatcttaatggagggatgtggatattgtcatgtattgtggaacagctgctggatcaaagcctgttttgcaacacttctggaaatggtaacaggttttcctatttaccctttctcatcggtgtcttcaaactccttctaaaagatcagaacgatattgatttagaaataacagtgacaaacgacccttcctccccaaggaatcctgaaaagatggcgatgacgcccatgaggctaaagtgattgcaacgtttccagactctttaccctattctgcctatacagaactgagggctttccctgagaaacagttgatttgtgttgccaaccataatggctcgcaagctgactgtgagctcggaaatccttttaaaagaaattcaaatgtcactttttatttggttttaagtacaactgaagtcacctttgacaccccagatctggatattaatctgaagttagaaacaacaagcaatcaagataatttggctccaattacagctaaagcaaaagtggttattgaactgcttttatcggtctcgggagttgctaaaccttcccaggtgtattttggaggtacagttgttggcgagcaagctatgaaatctgaagatgaagtgggaagtttaatagagtatgaattcagggtaataaacttaggtaaacctcttacaaacctcggcacagcaaccttgaacattcagtggccaaaagaaattagcaatgggaaatggttgctttatttggtgaaagtagaatccaaaggattggaaaaggtaacttgtgagccacaaaaggagataaactccctgaacctaacggagtctcacaactcaagaaagaaacgggaaattactgaaaaacagatagatgataacagaaaattttctttatttgctgaaagaaaataccagactcttaactgtagcgtgaacgtgaactgtgtgaacatcagatgcccgctgcgggggctggacagcaaggcgtctcttattttgcgctcgaggttatggaacagcacatttctagaggaatattccaaactgaactacttggacattctcatgcgagccttcattgatgtgactgctgctgccgaaaatatcaggctgccaaatgcaggcactcaggttcgagtgactgtgtttccctcaaagactgtagctcagtattcgggagtaccttggtggatcatcctagtggctattctcgctgggatcttgatgcttgctttattagtgtttatactatggaagtgtggtttcttcaagagaaataagaaagatcattatgatgccacatatcacaaggctgagatccatgctcagccatctgataaagagaggcttacttctgatgcatagtattgatctacttctgtaattgtgtggattctttaaacgctctaggtacgatgacagtgttccccgataccatgctgtaaggatccggaaagaagagcgagagatcaaagatgaaaagtatattgataaccttgaaaaaaaacagtggatcacaaagtggaacgaaaatgaaagctactcatagcgggggcctnnnnnnnnnnntgcttcacagtacccaaactgctttttccaactcagaaattcaatttggatttaaaagcctgctcaatccctgaggactgatttcagagtgactacacacagtacgaacctacagttttaactgtggatattgttacgtagcctaaggctcctgttttgcacagccaaatttaaaactgttggaatggatttttctttaactgccgtaatttaactttctgggttgcctttgtttttggcgtggctgacttacatcatgtgttggggaagggcctgcccagttgcactcaggtgacatcctccagatagtgtagctgaggaggcacctacactcacctgcactaacagagtggccgtcctaacctcgggcctgctgcgcagacgtccatcacgttagctgtcccacatcacaagactatgccattggggtagttgtgtttcaacggaaagtgctgtcttaaactaaatgtgcaatagaaggtgatgttgccatcctaccgtcttttcctgtttcctagctgtgtgaatacctgctcacgtcaaatgcatacaagtttcattctccctttcactaaaacacacaggtgcaacagacttgaatgctagttatacttatttgtatatggtatttattttttcttttctttacaaaccattttgttattgactaacaggccaaagagtctccagtttacccttcaggttggtttaatcaatcagaattagagcatgggaggtcatcactttgacctaaattatttactgcaaaaagaaaatctttataaatgtaccagagagagttgttttaataacttatctataaactataacctctccttcatgacagcctccaccccacaacccaaaaggtttaagaaatagaattataactgtaaagatgtttatttcaggcattggatattttttactttagaagcctgcataatgtttctggatttcatactgtaacattcaggaattcttggagaaaatgggtttattcactgaactctagtgcggtttactcactgctgcaaatactgtatattcaggacttgaaagaaatggtgaatgcctatggtggatccaaactgatccagtataagactactgaatctgctaccaaaacagttaatcagtgagtcgatgttctattttttgttttgtttcctcccctatctgtattcccaaaaattactttggggctaatttaacaagaactttaaattgtgttttaattgtaaaaatggcagggggtggaattattactctatacattcaacagagactgaatagatatgaaagctgattttttttaattaccatgcttcacaatgttaagttatatggggagcaacagcaaacaggtgctaatttgttttggatatagtataagcagtgtctgtgttttgaaagaatagaacacagtttgtagtgccactgttgttttgggggggcttttttcttttcggaaatcttaaaccttaagatactaaggacgttgttttggttgtactttggaattcttagtcacaaaatatattttgtttacaaaaatttctgtaaaacaggttataacagtgtttaaagtctcagtttcttgcttggggaacttgtgtccctaatgtgtttagattgctagattgctaaggagctgatactttgacagtgtttttagacctgtgttactaaaaaaaagatgaatgtcctgaaaagggtgttgggagggtggttcaacaaagaaacaaagatgttatggtgtttagatttatggttgttaaaaatgtcatctcaagtcaagtcactggtctgtttgcatttgatacatttttgtactaactagcattgtaaaattatttcatgattagaaattacctgtggatatttgtataaaagtgtgaaataaattttttataaaagtgttc

SEQ ID NO: 186527 - DNA, 1309 bp, Homo Sapiens
ttggcctttccagccagagacttccgttccctgctggaacttccgatcccattcttctctcggtgggaatgcttgtggggggaaaaagaaacgcaatagataaagcggggcgcatgcgctcccggcacaggcttcgattgtgaggaaggccggctagtctccgagctcatcccgccttgcgcatgcggagaaggtaaaccagcgccccgagttgaggcgcgggtttggtggcgcgtttcagcgaagtcgcacgtgaaggatagcagtggcctgagaaagacccagtcatggcagcctccagcatcagttcaccatggggaaagcatgtgttcaaagccattctgatggtcctagtggcccttatcctcctccactcagcattggcccagtcccgtcgagactttgcaccaccaggccaacagaagagagaagccccagttgatgtcttgacccagataggtcgatctgtgcgagggacactggatgcctggattgggccagagaccatgcacctggtgtcagagtcttcgtcccaagtgttgtgggccatctcatcagccatttctgtggccttctttgctctgtctgggatcgccgcacagctgctgaatgccttgggactagctggtgattacctcgcccagggcctgaagctcagccctggccaggtccagaccttcctgctgtggggagcaggggccctggtcgtctactggctgctgtctctgctcctcggcttggtcttggccttgctggggcggatcctgtggggcctgaagcttgtcatcttcctggccggcttcgtggccctgatgaggtcggtgcccgacccttccacccgggccctgctactcctggccttgctgatcctctacgccctgctgagccggctcactggctcccgagcctctggggcccaactcgaggccaaggtgcgagggctggaacgccaggtggaggagctgcgctggcgccagaggcgagcggccaagggggcccgcagtgtggaggaggagtgagccggatgccccacacaccgccagtgtcataccaaagagctgagctgcttcggggccatgcagccctcctgccagccccctgcccttttcttgccctgtctctgaaccttcagaacattgatccttgccgcagccccactagccaagagaaacagagaaagaccattccccctgcctgtccttgcggccctgtcttctgaggttctctgtctggggttggctctcttaaccctttctctgctcccagcctgcctcacagggaaggttggaggggccttccctctggcttc

SEQ ID NO: 186528 - DNA, 1642 bp, Homo Sapiens
caactttgtacaaaaaagttggcttcgtcccaccttgtatagtgggccatctcatcagccatttctgtggccttctttgctctgtctgggatcgccgcacagctgctgaatgccttgggactagctggtgattacctcgcccagggcctgaagctcagccctggccaggtccagaccttcctgctgtggggagcaggggccctggtcgtctactggctgctgtctctgctcctcggcttggtcttggccttgctggggcggatcctgtggggcctgaagcttgtcatcttcctggccggcttcgtggccctgatgaggtcggtgcccgactttttccacccgggccctgctactcctggccttgctgatcctctacgccctgctgagccggctcactggctcccgagcctctggggcccaactcgaggccaaggtgcgagggctggaacgccaggtggaggagctgcgctggcgccagaggcgagcggccaagggggcccgcagtgtggaggaggagtgagccggatgccccacacaccgccagtgtcataccaaagagctgagctgcttcggggccatgcagccctcctgccagccccctgcccttttcttgccctgtctctgaaccttcagaacattgatccttgccgcagccccactagccaagagaaacagagaaagaccattccccctgcctgtccttgcggccctgtcttctgaggttctctgtctggggttggctctcttaaccctttctctgctcccagcctgcctcaccagggaaggttggaggggcctccctctggcttctgcatctgcgccagcaaacatcactgccgttggtctctcatgacttaactggcttccctctgctgctgccttggcttcctcctaatgctcgtgctctcctgtccttctgaagttgctccttggccaaatctccagctcccttcttgttttcctcatcctcctaccctgtactcccaccaaaccatggtcctttaaggcacgctcctgtcctcctcattgcccagcagtagggaggggcaggggtaaggggacctgaggataaagggtggggaaacagggtcccctgaggcctgtgggggctgcaggggaggaggatgtaccttgtgtctctttcaagtgccttaatccgagccagcagggccttctgcttgcctgctgccatactgtatgtaggaaagtgttctgtggctgctttgtgtcaagaaaagagcagtcactctcagaatcttgattccccatcagccaaagcaaaagatggctgctgctttgtaggcatgtgcctgcaagtgggaccttgctgggcattatatgccctgtgggggtttcagagaccctgaaagaggagggaggacccgcctccttgtctgcacaactgcatgcacttctctccccatcgctccacaacctgaaaccgagaaggagttgctgaccagtgcccaccccggcagcccgggaggaacacaggcagctcctttcccttcacgtggtctgcagagagcagggtgagctgccagctgcccctctccaccagggtaccctgtcttggtggttaggggccacttttcctttgaggctctagtggaggtggatgtccttctctgccaggcttggc

SEQ ID NO: 186529 - DNA, 1361 bp, Homo Sapiens
  misc_feature (894)..(928): n is a, c, g, or t
aactttgtacaaaaaagttggctcagccatcctgacttcccagatggtgaatattggattgatcctaaccaaggttgctcaggagattccttcaaagtttactgtaatttcacatctggtggtgagacttgcatttatccagacaaaaaatctgagggagtaagaatttcatcatggccaaaggagaaaccaggaagttggtttagtgaatttaagaggggaaaactgctttcatacttagatgttgaaggaaattccatcaatatggtgcaaatgacattcctgaaacttctgactgcctctgctcggcaaaatttcacctaccactgtcatcagtcagcagcctggtatgatgtgtcatcaggaagttatgacaaagcacttcgcttcctgggatcaaatgatgaggagatgtcctatgacaataatccttttatcaaaacactgtatgatggttgtgcgtccagaaaaggctatgaaaagactgtcattgaaatcaatacaccaaaaattgatcaagtacctattgttgatgtcatgatcaatgactttggtgatcagaatcagaagttcggatttgaagttggtcctgtttgttttcttggctaagattaagacaaagaacatatcaaatcaacagaaaatataccttggtgccaccaacccattttgtgccacatgcaagttttgaataaggatggtatagaaaacaacgctgcatatacaggtaccatttaggaaataccgatgcctttgtgggggcagaatcacatggcaaaagctttgaaaatcataaagatataagttggtgtggctaagatggaaacagggctgattcttgattcccaattctcaactctccttttcctatttgaatttctttggtgctgtagnnnnnnnnnnnnnnnnnnnnnnnnnnnnnnnnnnntatggtgctcattctcatccatccaggatgtactaaaacagtgtgtttaataaattgtaattattttgtgtacagttctatactgttatctgtgtccatttccaaaacttgcacgtgtccctgaattccatctgactctaattttatgagaattgcagaactctgatggcaataaatatatgtattatgaaaaaataaagttgtaatttctgatgactctaagtccctttctttggttaataataaaatgcctttgtatatattgatgttgaagagttcaattatttgatgtcgccaacaaaattctcagagggcaaaaatctggaagacttttggaagcacactctgatcaactcttctctgccgacagtcattttgctgaatttcagccaaaaatattatgcattttgatgctttattcaggctatacctc

SEQ ID NO: 186530 - DNA, 1397 bp, Homo Sapiens
ttggccaggtccccctagaaaaaacgaggtcctcctggagctgcaggtgcagagggaagacaaggtgaaaaaggtgctaagggggaagcaggtgcagaaggtcctcctggaaaaaccggcccagtcggtcctcagggacctgcaggaaagcctggtccagaaggtcttcggggcatccctggtcctgtgggagaacaaggtctccctggagctgcaggccaagatggaccacctggtcctatgggacctcctggcttacctggtctcaaaggtgaccctggctccaagggtgaaaagggacatcctggtttaattggcctgattggtcctccaggagaacaaggggaaaaaggtgaccgagggctccctggaactcaaggatctccaggagcaaaaggggatgggggaattcctggtcctgctggtcccttaggtccacctggtcctccaggcttaccaggtcctcaaggcccaaagggtaacaaaggctctactggacccgctggccagaaaggtgacagtggtcttccagggcctcctgggcctccaggtccacctggtgaagtcattcagcctttaccaatcttgtcctccaaaaaaacgagaagacatactgaaggcatgcaagcagatgcagatgataatattcttgattactcggatggaatggaagaaatatttggttccctcaattccctgaaacaagacattgagcatatgaaatttccaatgggtactcagaccaatccagcccgaacttgtaaagacctgcaactcagccatcctgacttcccagatggtgaatattggattgatcctaaccaaggttgctcaggagattccttcaaagtttactgtaatttcacatctggtggtgagacttgcatttatccagacaaaaaatctgagggagtaagaatttcatcatggccaaaggagaaaccaggaagttggtttagtgaatttaagaggggaaaactgctttcatacttagatgttgaaggaaattccatcaatatggtgcaaatgacattcctgaaacttctgactgcctctgctcggcaaaatttcacctaccactgtcatcagtcagcagcctggtatgatgtgtcatcaggaagttatgacaaagcacttcgcttcctgggatcaaatgatgaggagatgtcctatgacaataatccttttatcaaaacactgtatgatggttgtgcgtccagaaaaggctatgaaaagactgtcattgaaatcaatacaccaaaaattgatcaagtacctattgttgatgtcatgatcaatgactttggtgatcagaatcagaagttcggatttgaagttggtcctgtttgttttcttggctaagattaagacaaagaacatatcaaatcaacagaaaa

SEQ ID NO: 186531 - DNA, 1652 bp, Homo Sapiens
  misc_feature (1099)..(1133): n is a, c, g, or t
ccttaaaaaagccaactttgtacaaaaaagttggatcttgtcctccaaaaaaacgagaagacatactgaaggcatgcaagcagatgcagatgataatattcttgattactcggatggaatggaagaaatatttggttccctcaattccctgaaacaagacatcgagcatatgaaatttccaatgggtactcagaccaatccagcccgaacttgtaaagacctgcaactcagccatcctgacttcccagatggtgaatattggattgatcctaaccaaggttgctcaggagattccttcaaagtttactgtaatttcacatctggtggtgagacttgcatttatccagacaaaaaatctgagggagtaggaatttcatcatggccaaaggagaaaccaggaagttggtttagtgaatttaagaggggaaaactgctttcatacttagatgttgaaggaaattccatcaatatggtgcaaatgacattcctgaaacttctgactgcctctgctcggcaaaatttcacctaccactgtcatcagtcagcagcctggtatgatgtgtcatcaggaagttatgacaaagcacttcgcttcctgggatcaaatgatgaggagatgtcctatgacaataatccttttatcaaaacactgtatgatggttgtgcgtccagaaaaggctatgaaaagactgtcattgaaatcaatacaccaaaaattgatcaagtacctattgttgatgtcatgatcaatgactttggtgatcagaatcagaagttcggatttgaagttggtcctgtttgttttcttggctaagattaagacaaagaacatatcaaatcaacagaaaatataccttggtgccaccaacccattttgtgccacatgcaagttttgaataaggatggtatagaaaacaacgctgcatatacaggtaccatttaggaaataccgatgcctttgtgggggcagaatcacatggcaaaagctttgaaaatcataaagatataagttggtgtggctaagatggaaacagggctgattcttgattcccaattctcaactctccttttcctatttgaatttctttggtgctgtagnnnnnnnnnnnnnnnnnnnnnnnnnnnnnnnnnnntatggtgctcattctcatccatccaggatgtactaaaacagtgtgtttaataaattgtaattattttgtgtacagttctatactgttatctgtgtccatttccaaaacttgcacgtgtccctgaattccatctgactctaattttatgagaattgcagaactctgatggcaataaatatatgtattatgaaaaaataaagttgtaatttctgatgactctaagtccctttctttggttaataataaaatgcctttgtatatattgatgttgaagagttcaattatttgatgtcgccaacaaaattctcagagggcaaaaatctggaagacttttggaagcacactctgatcaactcttctctgccgacagtcattttgctgaatttcagccaaaaatattatgcattttgatgctttattcaaggctatacctcaaactttttcttctcagaatccaggatttcacaggatacttgtatatatggaaaacaagcaagtttatatttttggacagggaaa

SEQ ID NO: 186532 - DNA, 1992 bp, Homo Sapiens
tacaaaaaagttgggatcgcgtctctttcgctccgtgtcccgctgctgctcctgtgagcgcccggcgagtccgtcccgtccaccgtccgcagctggtagccagcctgcccctcgcctcgactccctttcaccaacaccgacacccacattgacacctccagtccggccagccgctccactcgttgcctttgcatctccacacatggcgtcctccgcgcagagcggcggctcctccgggggacccgcggtccccaccgtgcagcggggcatcatcaagatggtcctctcagggtgcgccatcattgtccgaggtcagcctcgtggtgggcctcctcctgagcggcagatcaacctcagcaacattcgtgctggaaatcttgctcgccgggcagccgccacacaacctgatgcaaaggatacccctgatgagccctgggcatttccagctcgagagttccttcgaaagaagctgattgggaaggaagtctgtttcacgatagaaaacaagactccccaggggcgagagtatggcatgatctaccttggaaaagataccaatggggaaaacattgcagaatcactggttgcagagggcttagccacccggagagaaggcatgagagctaataatcctgagcagaaccggctttcagaatgtgaagaacaagcaaaggcagccaagaaagggatgtggagtgaggggaacggttcacatactatccgggatctcaagtataccattgaaaacccaaggcactttgtggactcacaccaccagaagcctgttaatgctatcatcgagcatgtgcgggacggcagtgtggtcagggccctgctcctcccagattactacctggttacagtcatgctgtcaggcatcaagtgcccaacttttcgacgggaagcagatggcagtgaaactccagagccttttgctgcagaagccaaatttttcactgagtcgcgactgcttcagagagatgttcagatcattctggagagctgccacaaccagaacattctgggtaccatccttcatccaaatggcaacatcacagagctcctcctgaaggaaggtttcgcacgctgtgtggactggtcgattgcagtttacacccggggcgcagaaaagctgagggcggcagagaggtttgccaaagagcgcaggctgagaatatggagagactatgtggctcccacagctaatttggaccaaaaggacaagcagtttgttgccaaggtgatgcaggttctgaatgctgatgccattgttgtgaagctgaactcaggcgattacaagacgattcacctgtccagcatccgaccaccgaggctggagggggagaacacccaggataagaacaagaaactgcgtcccctgtatgacattccttacatgtttgaggcccgggaatttcttcgaaaaaagcttattgggaagaaggtcaatgtgacggtggactacattagaccagccagcccagccacagagacagtgcctgccttttcagagcgtacctgtgccactgtcaccattggaggaataaacattgctgaggctcttgtcagcaaaggtctagccacagtgatcagataccggcaggatgatgaccagagatcatcacactacgatgaactgcttgctgcagaggccagagctattaagaatggcaaaggattgcatagcaagaaggaagtgcctatccaccgtgttgcagatatatctggggatacccaaaaagcaaagcagttcctgccttttcttcagcgggcaggtcgttctgaagctgtggtggaatacgtcttcagtggttctcgtctcaaactctatttgccaaaggaaacttgccttatcaccttcttgcttgcaggcattgaatgccccagaggagcccgaaacctcccaggcttggtgcacgaaggagagcccttcagcgaggaagctacacttttcaccaaggaactggtgctgcagcgagaggtggaggtgga

SEQ ID NO: 186533 - DNA, 2881 bp, Homo Sapiens
ttggctactcgccaggtggactcggagtccgcgagcgtcgtcggcaagcggccgcctttccacggtactccgagcactatgtcgtccccggcgtcgaccccgagccgccgcggcagccggcgtggaagggccacccccgcccagacgcctcggagtgaggatgccaggtcatctccctctcagagacgtagaggcgaggattccacctccacgggggagttgcagccgatgccaacctcgcctggagtggacctgcagagccctgctgcgcaggacgtgctgttttccagccctccccaaatgcattcttcagctatccctcttgactttgatgttagttcaccactgacatacggcactcccagctctcgggtagagggaaccccaagaagtggtgttaggggcacacctgtgagacagaggcctgacctgggctctgcacagaagggcctgcaagtggatctgcagtctgacggggcagcagcagaagatatagtggcaagtgagcagtctctaggccaaaaacttgtgatctggggaacagatgtaaatgtggcagcatgcaaagaaaactttcagagatttcttcagcgttttattgaccctctggctaaagaagaagaaaatgttggcatagatattactgaacctctatacatgcaacgacttggggagattaatgttattggtgagccatttttaaatgtgaactgtgaacacatcaaatcatttgacaaaaatttgtacagacaactcatctcttacccacaggaagttattccaacttttgacatggctgtcaatgaaatcttctttgaccgttaccctgactcaatcttagaacatcagattcaagtaagaccattcaacgcattgaagactaagaatatgagaaacctgaatccagaagacattgaccagctcatcaccatcagcggcatggtgatcaggacatcccagctgattcccgagatgcaggaggccttcttccagtgccaagtgtgtgcccacacgacccgggtggagatggaccgcggccgcattgcagagcccagtgtgtgcgggcgctgccacaccacccacagcatggcactcatccacaaccgctccctcttctctgacaagcagatgatcaagcttcaggagtctccggaagacatgcctgcagggcagacaccacacacagttatcctgtttgctcacaatgatctcgttgacaaggtccagcctggggacagagtgaatgttacaggcatctatcgagctgtgcctattcgagtcaatccaagagtgagtaatgtgaagtctgtctacaaaacccacattgatgtcattcattatcggaaaacggatgcaaaacgtctgcatggccttgatgaagaagcagaacagaaacttttttcagagaaacgtgtggaattgcttaaggaactttccaggaaaccagacatttatgagaggcttgcttcagccttggctccaagcatttatgaacatgaagatataaagaagctctttggcgggacaaggaaggattttagtcacactggaaggggcaaatttcgggctgagatcaacatcttgctgtgtggcgaccctggtaccagcaagtcccagctgctgcagtacgtgtacaacctcgtccccaggggccagtacacgtctgggaagggctccagtgcagttggcctcactgcgtacgtaatgaaagaccctgagacaaggcagctggtcctgcagacaggtgctcttgtcctgagtgacaacggcatctgctgtatcgatgagttcgacaagatgaatgaaagtacaagatcggtattgcatgaagtcatggaacagcagactctgtccattgcaaaggctgggatcatctgtcagctcaatgcgcgcacctctgtcctggcagcagcaaatcccattgagtctcagtggaatcctaaaaaaacaaccattgaaaacatccagctgcctcatactttattatcaaggtttgatttgatcttcctcatgctggaccctcaggacgaagcctatgacaggcgtctggctcaccacctggtcgcactgtactaccagagcgaggagcaggcagaggaggagctcctggacatggcggtgctaaaggactacattgcctacgcgcacagcaccatcatgccgcggctaagtgaggaagccagccaggctctcatcgaggcttatgtagacatgaggaagattggcagtagccggggaatggtttctgcataccctcgacagctagagtcattaatccgcttagcagaagcccatgctaaagtaagattgtctaacaaagttgaagccattgatgtggaagaggccaaacgcctccatcgggaagctctgaagcagtctgcaactgatccccggactggcatcgtggacatatctattcttactacggggatgagtgccacctctcgtaaacggaaagaagaattagctgaagcattgaaaaagcttattttatctaagggcaaaacaccagctctaaaataccagcaactttttgaagatattcggggacaatctgacatagcaattactaaagatatgtttgaagaagcactgcgtgccctggcagatgatgatttcctgacagtgactgggaagaccgtgcgcttgctctgaagccttgtgagcaaggaaggctccctgcatgtcctgcttgctgcacgccacatgggtgtggtctgcatctcagttggccgccatcagtgtaaatagagcttaaagtcatggtttggctgcataaaaattttctaacttgggttcaatatttgtagtgaagtatctgttttcatttttttcacgttataaataaaatactatgctgagccactgcacccagcctttg

SEQ ID NO: 186534 - DNA, 1673 bp, Homo Sapiens
tgtacaaaaaagttggcattgctgaggctcttgtcagcaaaggtctagccacagtgatcagataccggcaggatgatgaccagagatcatcacactacgatgaactgcttgctgcagaggccagagctattaagaatggcaaaggattgcatagcaagaaggaagtgcctatccaccgtgttgcagatatatctggggatacccaaaaagcaaagcagttcctgccttttcttcagcgggcaggtcgttctgaagctgtggtggaatacgtcttcagtggttctcgtctcaaactctatttgccaaaggaaacttgccttatcaccttcttgcttgcaggcattgaatgccccagaggagcccgaaacctcccaggcttggtgcaggaaggagagcccttcagcgaggaagctacacttttcaccaaggaactggtgctgcagcgagaggtggaggtggaggtggagagcatggacaaggccggcaactttatcggctggctgcacatcgacggtgccaacctgtccgtcctgctggtggagcacgcgctctccaaggtccacttcaccgccgaacgcagctcctactacaagtccctgctgtctgccgaggaggccgcaaagcagaagaaagagaaggtctgggcccactatgaggagcagcccgtggaggaggtgatgccagtgctggaggagaaggagcgatctgctagctacaagcccgtgtttgtgactgagatcactgatgacctgcacttctacgtgcaggatgtggagaccggcacccagttggagaagctgatggagaacatgcgcaatgacattgccagtcacccccctgtagagggctcctatgccccccgcaggggagagttctgcattgccaaatttgtagatggagaatggtaccgtgcccgagtagagaaagtcgagtctcctgccaaaatacatgtcttctacattgactacggcaacagagaggtcctgccatccacccgcctgggtaccctatcacctgccttcagcactcgggtgctgccagctcaagccacggagtatgccttcgccttcatccaggtgccccaagatgatgatgcccgcacggacgccgtggacagcgtagttcgggatatccagaacactcagtgcctgctcaacgtggaacacctgagtgccggctgcccccatgtcaccctgcagtttgcagattccaagggcgatgtggggctgggcttggtgaaggaagggctggtcatggtggaggtgcgcaaggagaaacagttccagaaagtgatcacagaatacctgaatgcccaagagtcagccaagagcgccaggctgaacctgtggcgctatggagactttcgagctgatgatgcagacgaatttggctacagccgctaaggaggggatcgggtttggcccccagccccgctcacgccagtccctcttcctctgccgggagggtgttttcaactccaaaccccagagaggggttgtagattgggtccagctttgcttcattgtgtggaaatgtctcgtggggtggcatcggggctgcggggtggggaccccaaggctttctggggcagacccttgtcctctgggatgatgggcactgctatccacagtctctgccagttggttttatttggaggtttgtgggcttttttt

SEQ ID NO: 186535 - DNA, 2601 bp, Homo Sapiens
ttggggattccgctctttctccatcagtttcatagccctggaattgtagaaaagctctggtttcaagaccattgatatccatttctgtcagggtgtcagacaaagagaaaattgaccaacttcaggaagaacttctgcacactcagttgaagtatcagagaatcttggaacgattagaaaaggagaacaaagaattgagaaaattagtattgcagaaagatgacaaaggcattcatcatagaaagcttaagaaatctttgattgacatgtattctgaagttcttgatgttctctctgattatgatgccagttataatacgcaagatcatctgccacgggttgttgtggttggagatcagagtgctggaaagactagtgtgttggaaatgattgcccaagctcgaatattcccaagaggatctggggagatgatgacacgttctccagttaaggtgactctgagtgaaggtcctcaccatgtggccctatttaaagatagttctcgggagtttgatcttaccaaagaagaagatcttgcagcattaagacatgaaatagaacttcgaatgaggaaaaatgtgaaagaaggctgtaccgttagccctgagaccatatccttaaatgtaaaaggccctggactacagaggatggtgcttgttgacttaccaggtgtgattaatactgtgacatcaggcatggctcctgacacaaaggaaactattttcagtatcagcaaagcttacatgcagaatcctaatgccatcatactgtgtattcaagatggatctgtggatgctgaacgcagtattgttacagacttggtcagtcaaatggaccctcatggaaggagaaccatattcgttttgaccaaagtagacctggcagagaaaaatgtagccagtccaagcaggattcagcagataattgaaggaaagctcttcccaatgaaagctttaggttattttgctgttgtaacaggaaaagggaacagctctgaaagcattgaagctataagagaatatgaagaagagttttttcagaattcaaagctcctaaagacaagcatgctaaaggcacaccaagtgactacaagaaatttaagccttgcagtatcagactgcttttggaaaatggtacgagagtctgttgaacaacaggctgatagtttcaaagcaacacgttttaaccttgaaactgaatggaagaataactatcctcgcctgcgggaacttgaccggaatgaactatttgaaaaagctaaaaatgaaatccttgatgaagttatcagtctgagccaggttacaccaaaacattgggaggaaatccttcaacaatctttgtgggaaagagtatcaactcatgtgattgaaaacatctaccttccagctgcgcagaccatgaattcaggaacttttaacaccacagtggatatcaagcttaaacagtggactgataaacaacttcctaataaagcagtagaggttgcttgggagaccctacaagaagaattttcccgctttatgacagaaccgaaagggaaagagcatgatgacatatttgataaacttaaagaggctgttaaggaagaaagtattaaacgacacaagtggaatgactttgcggaggacagcttgagggttattcaacacaatgctttggaagaccgatccatatctgataaacagcaatgggatgcagctatttattttatggaagaggctctgcaggctcgtctcaaggatactgaaaatgcaattgaaaacatggtgggtccagactggaaaaagaggtggttatactggaagaatcggacccaagaacagtgtgttcacaatgaaaccaagaatgaattggagaagatgttgaaatgtaatgaggagcacccagcttatcttgcaagtgatgaaataaccacagtccggaagaaccttgaatcccgaggagtagaagtagatccaagcttgattaaggatacttggcatcaagtttatagaagacattttttaaaaacagctctaaaccattgtaacctttgtcgaagaggtttttattactaccaaaggcattttgtagattctgagttggaatgcaatgatgtggtcttgttttggcgtatacagcgcatgcttgctatcaccgcaaatactttaaggcaacaacttacaaatactgaagttaggcgattagagaaaaatgttaaagaggtattggaagattttgctgaagatggtgagaagaagattaaattgcttactggtaaacgcgttcaactggcggaagacctcaagaaagttagagaaattcaagaaaaacttgatgctttcattgaagctcttcatcaggagaaataaattaaaatcgtactcataatcagctctgcatacatctgaagaacaaaaacatcaacgtcttttgtccagcctctttttcttctgctgttccacctttctaaacatacaataaagtcatgggataaaaataatcgatgtatgttacgggcgctttaaccatcagctgcctctcgaatggaagaacagtggtaatggattaacatcctattttgttgtactaaagtgacaaatcggaataatataattggta

SEQ ID NO: 186536 - DNA, 1526 bp, Homo Sapiens
ttggagaagtctagacggcccagtgccaagagtaccatgcctactagcctccctaaccttgccaaggaggcaaaggatgccaagggtagtaggaggaagaagtctctgagtgagaaggtccaactgtctgagagttcagtaactttatcccctgttgattccctagaatctcctcacacgtatgtttccgacaccacatcctctccaatgattacatcccctgggatcttacaggcctcacccaaccctatgttggccactgccgcccctcctgccccagtccatgcccagcatgcactatctttttctaaccttcatgaaatgcagcctttggcacatggggccagcactgtgcttccctcagtgagccagttgctatcccaccaccacattgtgtctccaggcagtggcagtgctggaagcttgagtaggctccatccagtcccagtcccagcagattggatgaaccgcatggaggtgaatgagacccagtacaatgagatgtttggtatggtcctggctccagctgagggcacccatcctggcatagctccccagagcaggccacctgaagggaagcacataaccacccctcgggagcccttgccccccattgtgactttccagctcatccctaaaggcagtattgcccaaccagcgggggctccccagcctcagtccacctgccctccagctgttgcgggccccctgcccaccatgtaccagattccagaaatggcccgtttgcccagtgtggctttccccactgccatgatgccccagcaggacgggcaggtagctcagaccattctcccagcctatcatcctttcccagcctctgtgggcaagtaccccacacccccttcacagcacagttatgcttcctcaaatgctgctgagcgaacacccagtcacagtggtcacctccagggtgagcatccctacctgacaccatccccagagtctcctgaccagtggtcaagttcatcaccccactctgcttctgactggtcagatgtgaccaccagccctacccctgggggtgctggaggaggtcagcggggacctgggacacacatgtctgagccaccacacaacaacatgcaggtttatgcgtgagagagtccacctccagtgtagagacataactgacttttgtaaatgctgctgaggaacaaatgaaggtcatccgggagagaaatgaagaaatctctggagccagcttctagaggtaggaaagagaagatgttcttattcagataatgcaagagaagcaattcgtcagtttcactgggtatctgcaaggcttattgattattctaatctaataagacaagtttgtggaaatgcaagatgaatacaagccttgggtccatgtttactctcttctatttggagaataagatggatgcttattgaagcccagacattcttgcagcttggactgcattttaagccctgcagggcttctgccatatccatgagaagattctacactagcgtcctgttgggaattatgccctgga

SEQ ID NO: 186537 - DNA, 1878 bp, Homo Sapiens
  misc_feature (438)..(458): n is a, c, g, or t
caaagattaaattaagacacggtaaattgactaaatatttggtttttatataaataaaggtcataaccacaccgttgacatgtaatactgttataatacaacagttaaacttgtgagtctacaacagaagtcatctgtagttaaacaggaaacaaagttgaaaaagaccatgttaaaacaaaactactgggactaacaggtcgggattgtaagtagcaacaaacatattcactcagctcctgagtatttcaagttttacagtacacattaaaaatgatttcttccatcaacactataaattcaaactgtcggatgtttatgcattttgcaagttacactgattgaatgcttatatgggagtgggggtcggaacatctcccaatttgaagtttacatcacccacatgctaacacaaacacaacttgttccatttccttnnnnnnnnnnnnnnnnnnnnnacaaagaaggcaggatttttggtttcttttaggtaattgttttaaaggatttgtgatgatcaatttgaacgtctgaaattcagtaatatttaactcttagacaactaagaggttaaagatggaaaataatttctcctaacactaagttagaaaatcatttgcatcatgctgtaaactaggaagcaatgtaaagcgacaaaaacctgtccccagtacataatttaaaaaatctaaatttcaaatcagcagagctggtctacttccatgttgactatatgccacaatataagtgtgagctcttgaaatgcatagctatgtaggtagtcttccactgtggcaaatgcgcaggatccaattctgatcgagccatcagtatagacattgtgtggcctgtcccattgctagggcaagtggaggttgcttggcagattgtgggtttctaatattgcactgttaagagctgagcacacaggttctctctgaatcgggtcaagctgatttccaactgggctgttccagggatctgaatatgctagtagactgaatgcatccttcaacatttttttgtttgcagtgttcttgccacagtctctccttagctgttcactcattgcttgcagctctcgtccaaagtggatcattctttctatggcggcctgacttcctccacacaactggcgtctcaactgacttgaatcaacttccatttcggtgtcacaatcttccatttcgtggtcatgtttagagctaccatttaggaaaccattggatgaagtttctccaactccattggagtagtgatctgtttccatgtctacatcattactggtgaagttattaacttgctgtgatcttgacatatttatactgtttagttctggtacattcaagttggatgactggtgtttattactatggcaatatgattgatgtgctttatttgatattacaccattactacaactttcaaaacctgaaaaatgtgcggtgcttcctttgcctgatgctaaattgtggatattcattccatggctggggctcatacttggactactaaaaggtcgaggactaacaggataactgtcttgagactttggacttcggcctcccaaacatcgtacttcactatctgtaccattcaccatttctataaactgacgcacttttaatgtgaaaaggagattaggatttctttcaagtaaacttgggtataactgttgtgttgtttcaatggcttctcccattcttcctgctaataccaatttctgaattctttgtctattcttaatggaagctaattcttctagaacggtctggtctgtagatctggcaaaggcctctgctgtggcacagtacccatggtggactaaataagccaacttttttgtacaaagttggcattatgaaaaaagcattgctc

SEQ ID NO: 186538 - DNA, 3529 bp, Homo Sapiens
  misc_feature (3355)..(3363): n is a, c, g, or t
ttggctgaaaattctattagcaaccttctgggttggttagattgattttaatgtatatattagacatttgtatgtatgctctgacattgtgatttgtacagcctacgctggggtaaggaaatgggtatccaaggtcctacttttttaatagctcgaatatttctagagtacttgagccacatgtatttctgtatttaaagaattgctgactaactttcaggtaaccagacccatctcaaagaaccaagaaaaggctttagcatgaaatatctttctgagctggcgagttagaagaatggaaggtaaggggaaggtctgtcatctacccaggacattcccatgatgagtacaggtcagattgtgccacaaggtgggcctccacgtccctgccctggccctctttcttctgtcactaaccctggttatcattttacaggcttgtaactggatattctaccagagctctcactatattgtcaagcctaagattgaaaaactggaggctttattagtgtttttatatagaaaacagttattacatatgtgttaagtcatttcttaagaattttctaaaatgccaactatcacaggattatttcaagctagtcattgaggtatatgacaaaatgtaaataacaaaaaactgaaatctaccaaaagagcatggagatttttcttaaataataatattgtgctctccacctcacccttgtgtaaaccctcaggtcaggttggttcccctgggtcacaaaatggtaaatgttccatactgacatgccggaggcagcctgacccgttatttggaaagaatttgtgaattatttctgggtttgtgttttgcctaagagctgatcttatttctgatttgtgtgtgtgtggtttataaattttactacgtgtaacaaaagtctgcttttccagcatgagcacactggagccctctgctcactggcacttcctgactcaaaggcactaacagtgctcatgtgccttccagacggttcaaggcagaggccactgtgctcagtgtagtctgtgatgaatagtttaagtgttcagaaattggtaaaccaacacacgggatacaataactctctgttaaccagaacaccgtcatttgaccaagccctacaagagtttaccacactagatgttctgtgaatcctcgagtcagttccattgagaggggcctgtctccagggccaggctatttacttgggaaagtatttttcttacagttcttggccacagtttttttgctgagggtttctgtctgggcctatcaggtccatacttagaccctgagcatcttcttcattcagatttgaatggcttattaaattagcaccaaatatcagtgggactgtagaaggtaaccgaacactagtaccattgactctcgttgaataactttatatttccataatcctgaattgtgtagatagttttctagctctcgggtccctttattgctttttaaaatagggtttgaaacatgccacaggaaggttgctctccaaaaatacacagtgcagtgcaagaaaatgctatctcattggcctactctcctatgaattgctaaagtgcccacttcacatatgtgtttaaacctttataaaccagtatttcacttttaaaaagacaaggcatctctacccattaactctgcaagccactccacttgcaccattccgcttgaccctcctctctcctggcttgggtcaccagccaggcacctgtgacacgagtgctgctctccaggatctccactacatgttccaggttggagtgaggacgcgctatgtgctcacactcatgtgacatgaccaaagatgatactctgtaaacaaggcccttctgaccggactcagtgcgtgtgatggtgagtgcaatgaggaagggtggatattgactaaagactggttgttgttgttgtttaggttagtgtcacagccattacagcacaagtcaaagtcgccagttgaattttcattatgcacgtgtgtggtttaagcagtggtactgttgtatatcatattgtaaagtatcatactgccaagaaaataactcctagaaaggcattatctcacatccccatcttactttcctacatgttctcaaaacacagtagtaccagccttacctttctgctgtatgtagatagtcagatcatcctactgggggtgggatgaatttaaaagttataccaaaatttctgtaaagtctttgaaagtctaggagtaggtggtcatcttgtacatttcagcaaagcatccactaggaaacctcataggacagtgttagtggttcacgttctagtgtttttcctgaaatgtgcaatctactgtatagtattgccacataattgtacatagatgtattctgaatttgtggaatttcttgcttagatactattgtgtttgtttcatatgaatatttttgtaattctaaaagagatcttatttaaatttcctttttaaaagccgcatggttctgtgatccatgtaactgacactttttggctttcagtgctgtttagaaacagtggcaaaggcagggtggtgctgcctgcaagctgctgcctatggaaggcaaagtcatagtaatgagatagcacctctgaactgtgcagtcagcataccctgagtgatggctcaggggcgcactacctattttgtcaccagagctgactcaggcttcctggaccctcaaccccagatcattccaggcagcatagctttcttcacagtcctttcagaattcccaggctgaaatcagccatagcagttgacaaaacagctatccccacaagtgatgagatagtccctttactgtcctcaaatggacttggccttagagacgtggtaaagcactttggcagggtttaaaatatttgtgagaagcccacatttcagtatacatcctcactggcttccatgcacccacctgacggtagcctcacagaagtcctggctgtcactcaggtggggagctcatggtgccgctggggactttttagagaaatgtaaagagaatagctattcagtgtctactagcagagcaacatgtgtcaatttaaccaaattcacaaataaccctccatttttcaatatctgctactgtaaacatgaatattgaatactgacaagagaatacccatacaaatcgtcccaccgccctagaggccacagaattagcccaaaattatcaaagaacattaactggaaggtcaggtttttcaaggaacatagcttacaaatgcatcagtgtgtatctggagagcatcctaactgcatttcaactcatcttttaagtgatttcagtcaaaactggaaaacaactaagatgtagtaannnnnnnnncctggttcaaaccttcaataacttgctcattcagcagtctctctgagctacatttttatttgtaaagtgactctgtctgcatggcaatgagcacgtgcgtgttttttccacattcgccctttcttgcagtatccagggaaacacatcattacaaagggtttctacc

SEQ ID NO: 186539 - DNA, 1652 bp, Homo Sapiens
ttggaggaattgttcggacagatgaagaggaggaagaagagcaagatgccagttccaatgataacttttctgtgtgtccttctaacagtgtgaatcataactcctacaatggaaaggaaactaaaaataggtggaagaacaattgccctttttcggcagatgaaaattatcgtcctttagccaagacaaggcaacagaatatcagcatgcaacggcaagaaaaccttcgttgggtgtcagagctctcttacgtagaagagaaagaacaatggcaagaacaaatcaatcagctaaagaaacagcttgattttagtgtcagtatttgtcagactttgatgcaagaccagcagactctatcttgtctgctacaaactcttctcacgggtccttacagtgttatgcccagcaatgttgcatctcctcaagtacacttcataatgcaccagttgaaccagtgctatactcagctaacatggcaacagaataatgttcagaggttgaaacaaatgctaaatgaacttatgcgccagcaaaatcagcatccagaaaaacctggaggcaaggaaagaggcagtagtgcatcgcaccctccttctcccagtttattttgtcctttcagctttccaacacagcctgtaaatctcttcaatatacctggatttactaacttttcatcatttgcaccaggtatgaatttcagccctttatttccttctaattttggagatttttctcagaatatctctacacccagtgaacagcagcaacccttagcccagaattcttcaggaaaaacagaatatatggcttttccaaaaccttttgaaagcagttcctctattggagcagagaaaccaaggaataaaaaactgcctgaagaggaggtggaaagcagtaggacaccatggttatatgaacaagaaggtgaagtagagaaaccatttatcaagactggattttcagtgtctgtagaaaaatctacaagtagtaaccgcaaaaatcaattagatacaaacggaagaagacgccagtttgatgaagaatcactggaaagctttagcagtatgcctgatccagtagatccaacaacagtgactaaaacattcaagacaagaaaagcgtctgcacaggccagcctggcatctaaagataaaactcccaagtcaaaaagtaagaagaggaattctactcagctgaaaagcagagttaaaaacatcaggtatgaaagtgccagtatgtctagcacatgtgaaccttgcaaaagtaggaacagacattcagcccagactgaagagcctgttcaagcaaaagtattcagcagaaagaatcatgagcaactggaaaaaataataaaatgtaataggtctacagaaatatcttcagaaactgggagtgatttttccatgtttgaagctttgcgagatactatttattctgaagtagctacattaatttctcaaaatgaatctcgtccacattttcttattgaactcttccatgagctgcagctactaaacacagactacttgagacagagggctttatatgcatttgcaggacatagtatccagacatatttctgagagccatgaaaaaggagaaaatgtaaagtcaagtaaactctggtacttgggatagcatcaaactcagaa

SEQ ID NO: 186540 - DNA, 2122 bp, Homo Sapiens
  misc_feature (93)..(122): n is a, c, g, or t
  misc_feature (443)..(457): n is a, c, g, or t
ttggcacagtgttccctcctggcagcaattaagggtcttcatgttcttattttaggagaggccaaattgttttttgtcattggcgtgcacacnnnnnnnnnnnnnnnnnnnnnnnnnnnnnnaaggtgtcttataatcttttacctatttcttacaattgcaagatgactggctttactatttgaaaactggtttgtgtatcatatcatatatcatttaagcagtttgaaggcatacttttgcatagaaataaaaaaaatactgatttggggcaatgaggaatatttgacaattaagttaatcttcacgtttttgcaaactttgatttttatttcatctgaacttgtttcaaagatttatattaaatatttggcatacaagagatatgaattcttatatgtgtgcatgtgtgttttcttctgagattcatcttggtggtgggnnnnnnnnnnnnnnnaattcagtgcctgatctttaatgcttccataaggcagtgttcccatttaggaactttgacagcatttgttaggcagaatattttggatttggaggcatttgcatggtagtctttgaacagtaaaatgatgtgttgactatactgatacacatattaaactataccttatagtaaaccagtatcccaagctgcttttagttccaaaaatagtttcttttccaaaggttgttgctctactttgtaggaagtctttgcatatggccctcccaactttaaagtcataccagagtggccaagagtgtttatcccaacccttccatttaacaggatttcactcacatttctggaactagctatttttcagaagacaataatcagggcttaattagaacaggctgtatttcctcccagcaaacagttgtggccacactaaaaacaatcatagcattttacccctggattatagcacatctcatgttttatcatttggatggagtaatttaaaatgaattaaattccagagaacaatggaagcattgcctggcagatgtcacaacagaataaccacttgtttggagcctggcacagtcctccagcctgatcaaaaattattctgcatagttttcagtgtgctttctgggagctatgtacttcttcaatttggaaacttttctctctcatttatagtgaaaatacttggaagttactttaagaaaaccagtgtggcctttttccctctagctttaaaagggccgcttttgctggaatgctctaggttatagataaacaattaggtataatagcaaaaatgaaaattggaagaatgcaaaatggatcagaatcatgccttccaataaaggcctttacacatgttttatcaatatgattatcaaatcacagcatatacagaaaagacttggacttattgtatgtttttattttatggctctcggcctaagcacttctttctaaatgtatcggagaaaaaatcaaatggactacaagcacgtgtttgctgtgcttgcaccccaggtaaacctgcattgtagcaatttgtaaggatattcagatggagcactgtcacttagacattctctgggggattttctgcttgtctttcttgagctttttggaaggataattctgataaggcactcaagaaacgtacaaccacagtgctttcttcaaatcatatgagaaatactatgcatagcaaggagatgcagagccgccaggaaaattctgagttccagcacaattttctttggaatctaacaggaatctagcctgaggaagaagggaggtctccatttctatgtctggtatttgggggttttgtttgtttttgctttagcttggtgaaaaaaagttcactgaacaccaagaccagaatggatttttttaaaaaaatagatgttccttttgtgaagcaccttgattccttgattttgattttttgcaaagttagacaatggcacaaagtcaaaatgaaatcaatgtttagttcacaagtagatgtaatttactaaagaatgatacacccatatgctatatacagcttaactcacagaactgtaaaagaaaattataaaataattcaacatgtccatctttttagtgataataaaagaaagcatggtattaaactatcatagaagtagacag

SEQ ID NO: 186541 - DNA, 995 bp, Homo Sapiens
ttggatgaaattgaggaattcatggtaacttctgaaaatttaaccgaaggaataaaattaagagcctcaaaatcagtttccaatggaacagctaagcctgccacttctgagaactttgatgaagatttgaagtgggtagaagaaaatattccctcttcattcacagatgtagctcttccagtgttagtggattcagatgaggaaatcatgaccagatctgaaatggctgaaaaaatgttctcttcagaaaagataatgtgattggaacccgtataagaaatgtagttaagcctgaaggactatccttcatcaagactgaaagtgagctttgatttgatattgcctaaaaatttttattgtgttatcttggaagtctgtgtatcaaaatgaagaattcagatggtaggaggttctatagtccttttaaagctgactcttgagtgtcagttgaatatccattaaattggatttggaaataacctgaggaaagtattatgataaagatctgcacagatgcctcttagctgataggtggcaggcctgtgggtttgggttctccctcttttctctggaacatatgacaattccagattaaagaaaaatgttttttaataaatacccttggtctttcttctagtcacctttgaggtagatattgtgattttctggagtatagtatatccgtgtctctgtgtcttaggtttactagatgcaataatacttctctttgacatttgtactgaagtgatttgatattaagtaaaacagttaatgtttgaatataggcatatttataggttttttccgctcccccccaacccacccttttaaaaatctatacaaagcccttgtttgagtctcatcatgcacatcaaatcatggagttaggtcttctctgagctcacgggaacacaagtgcacagagagagatgtcttgagggtcactaccaaagaattaccctcattgtccctcactcagccatgtgtacatgcga

SEQ ID NO: 186542 - DNA, 1434 bp, Homo Sapiens
  misc_feature (1207)..(1224): n is a, c, g, or t
gccaactttgtacaaaaaagttggggaagtctgtgtatcaaaatgaagaattcagatggtaggaggttctatagtccttttaaagctgactcttgagtgtcagttgaatatccattaaattggatttggaaataacctgaggaaagtattatgataaagatctgcacagatgcctcttagctgataggtggcaggcctgtgggtttgggttctccctcttttctctggaacatatgacaattccagattaaagaaaaatgttttttaataaatacccttggtctttcttctagtcacctttgaggtagatattgtgattttctggagtatagtatatccgtgtctctgtgtcttaggtttactagatgcaataatacttctctttgacatttgtactgaagtgatttgatattaagtaaaacagttaatgtttgaatataggcatatttataggttttttccgctcccccccaacccaccctttttaaaaaatctatacaaagcccttgtttgagtctcatcatgcacatcaaatcatggagttaggtcttctctgagctcaggggaacacaagtgcacagagagagatgtcttgagggtcactaccaaagaattaccctcattgtccctcactcaggccatgtgtacatgcgatgctgctgagtgtgctggggtgggtggtggccacgtggctcccccagagcacttcctaactggcaagctgggagacccattactggtgaactttgtggaaattagaactgtatcttttacataatcttggcatattacatttcataataaaaacatacatttagttgcatgctacatcactattgattttataattaatttcttaagcttcaaccatgttttataccttatttcgttacatcatatatttgtaatgtgtaatatgaaatcttttgctttaatgtctttttttaaaatgtagaatgttctaaacttgaaaggcaattgaatgtagtatgatgaaaatgtgaatgttttgctgctttcatgaccaaagatacagggctagtggacatttagaataataattaaagctagagtcttgtatgtcttttctttgaaggagttctaaccttgtaaattgagaatgacttcagagaattttgattaagaaaacattaaaatcttaaccggcacaaacactccaatttttcactgtgaagccgcaagcaannnnnnnnnnnnnnnnnncaaaagcctaccttctgaatttatttcttgtttactcatttcagagagggtagtaaagaagatctatttctggtagtcatatcgcttgaaaggtattggtaaatgtgttttcagtcgtgaccatgtggaaagtgaacagtgttggcaaacattaccgagaaaatcatgcttttcagatgcccgttgctttggggatatccttcctaggga

SEQ ID NO: 186543 - DNA, 1392 bp, Homo Sapiens
gcccaggatagtgtttatcaaatgtgacacaggttcatttacaaactggggctctggaaggtctacttctgtggctctaagagacttgtctctcatggcttctctcggagctaccggaagttggacctggataacgctgtgtaggttggttggtttatttgtaaggaatgtgtaaggcattttggtaagttgaacagtaacttctttttccaaagaggaaactcagacagaggtgccctcctttgagctgctgccgtcctctgccttttccagctgttcctgcagcttcttcaccgtgtccttctcccttgccagctgctcctgggtcgtcttcagaagctcctgcagtctcgtggcggcgcgccccaggtcacttgttaacttcttctctttttctagtctctccttcagctgtgaggcctcctctgtttctgaagactctagggggccggctgtgcggagcttctccaattcttcttgtaacagacatgccgaggtctgagcctcctcaaactcggccgtgagcttctgccgctgtgtctgctcatcctccaggatggcttctgtccactccagctgcgtcttcagctgaacggggtcctgctcggctgggggcgcctctggggaggaagctggggccccagctatgtcaccatcctctacgtggctcttcatttcactcaactgctgcctgaccagggcaagctcatcgctctgtttctgggcttcgctcttggcggcatcgagctgagattgagattctaggagaagttgcctcagccctgccacctccttggcgtagttctggcactcggcgctggcggccgccatgtgcttttccagctctgcctccaaatgcaacgtgtgctccctcacctggtccgaactttcaagttctccttttagcttctctacaatctcttcgagatgcttcactgtgacccgggacttctggagctcctcctctgcggcgcccaccttggccctccacacctgctcctcctcctccacgctcttctgcaggtctctgagcatgccctccgtctccgccaggatgctgcggtactggtcacactcggcctgcagtgtgctctgcgtctcctcggcctccctcaacttggaggccaggtccgaggagggctccgcgggagctggcgggtgcttcagcagcgtggggcctttctctttgagatcctgcagccactcggtgtaattctgttgtgccaagacagagagttctgggagcagagccagcagggcctccatggtctgcgcctcaatcagacagagctgcttctccgattcctccttggcctgggtcagggagtgcagcttctccttgcaggcctgctcggccgtggccagtgcctccatggccttccagttctccaa

SEQ ID NO: 186544 - DNA, 2016 bp, Homo Sapiens
ttggcatcgtccaggatctgcaaatctggttcctgggaaccccagactcctcagcagatctggctgtacatggatcagaaccacttcttcccccgcttaagctgtggtttgacccaagggtcagcatataggactgcctgctgcatttaatgaaggtgtttccttttggaagtctgtgctaccctctgcgcctagttgggaggagacatccatctggtctgggatttcgggagttagaatggaaagctctttgctaaagactggagtcatcctggcctgccaactggtggttcagagccggacgggcttgttttggacatcactgttgccttcactcagcagccacgggagagtgctccccatgcaactccaccttagaaaccacgtcagatactgagtagcttgctgactcctggaaacttctggtttttgttagtatcataatgaaggcaaagagaactaggctgtcatctttcagcctcttggacttactctagatgttgggagcagtggttgccaggtgaaacctgggccctttgtctttttcaccatgctttgggcagtttctgtatccagagagtccgcaggttcagataagctgaagaagagtaatagaacagcaaaggaagtggcttgaaggatgtgctagtaagccctgtggtttgtgcttaggtctctgctctgctacccaaggaactggtggttcagctggagataaaaagaagaatttgccaagtcagagaagaaaccccaaccccggaaaatcctctgtctccagtctctggaggtgaagcagggacaataagctaaggtagtatcttggccatcccaggaaacttgtggcattaggacgatgaaggccatgcttcagtgttttcgtttctatttcatgagactttttgtcttcctgcttacaagtgggaagatgattgacagtgactctactatgcagggctgttggtaccaacctgagccctataggtggcagtccctggagaagtggtcacagaagatggagctctgatcccctgcttacctcttcacaacacttgtgtgcaaagatagttttagatttggtttagaagctatcctccagaacaggctcccatacttagaatgtttctagttaaggtaataaattaggcaacccaagtgtgactccactcaagtgtccttttctgtaggcaggaagggcccacaacatggcttaaaatgtagtccatggttctggcccacagtacagtgtgtatctataccaggtcacctgtgttcaatctgggagccttcctggccagtctgagtggcagccagaagggagctcatagtgtctaggagtctcaggcaaggtaggtcagggtactgtgggcaggggggatgtgtgtgataggagagggtaccctaaaccccataccttccctccctgacctgaaaagctgatctcaacagggattcacacagaattaggctgtgtttttgcattagctggtaggtgactttctcaaaattcttaaattcagaaagtatttagtaaacttgaggaaggtatgaaatctggaggaggcatccaggacccaggggtttgatagctttacaggtaggatcataccacaccaaaagagcagtggacaataagactatatgagctatatgaagcttttaggaatcatttaggacagacagagccctaaacaacccattcatgacttaagttgttggctcagtgtatgctggggacaaagaaaaactaacaagccgacctgcctttatgataaattctagtgtgcttacaagggatgacttcctgaggtgtgatctgtccaccttgaagaactccacaactgaagaaggggagctgtgagaacgtggattgttctacaacttgcacagggtaacagaggaagtggctgaggcctagagtcacgttttccattttcccttcgcaaactatatttcttggaacgcgaaaggaagctttacctatttcatagaagacctgggaatcatacctcagaaggc

SEQ ID NO: 186545 - DNA, 1602 bp, Homo Sapiens
ttgggtgcctttcaattgtccacagcaagacccacaacaatataatgtctttacagacttacatgggatcagtcaagagttcccctacaaatctgaaatggattctatgccttatacacagaactttatttcctgtaatcagcctgtattaccacaacattccaaatgtacagagctggactaccctatggggagttttgaaccatccccataccccactacttctagtttagaagattttgtcacttgtttacaacttcctgaaaaccaaaagcatggattaaatccacagtcagccataataactcctcagacatgttatgctggggccgtgtcgatgtatcagtgccagccagaacctcagcacacccacgtgggtcagatgcagtacaatccagtactgccaggccaacaggcatttttaaacaagtttcagaatggagttttaaatgaaacatatccagctgaattaaataacataaataacactcagactaccacacatcttcagccacttcatcatccgtcagaagccagaccttttcctgatttgacatccagtggattcctgtaattccaagcccaattttgaccctggtttttggattaaattagtttgtgaaggattatggaaaaataaaactgtcactgttggacgtcagcaagttcacatggaggcattgatgcatgctattcacaattattccaaaccaaattttaatttttgcttttagaaaagggagtttaaaaatggtatcaaaattacatatactacagtcaagatagaaagggtgctgccacggagtggtgaggtaccgtctacatttcacattattctgggcaccacaaaatatacaaaactttatcagggaaactaagattcttttaaattagaaaatattctctatttgaattatttctgtcacagtaaaaataaaatactttgagttttgagctactggattcttattagttccccaaatacaaagttagagaactaaactagtttttcctatcatgttaacctctgcttttatctcagatgttaaaataaatggtttggtgctttttataaaaagataatctcagtgctttcctccttcactgtttcatctaagtgcctcacatttttttctacctataacactctaggatgtatattttatataaagtattctttttcttttttaaattaatatctttctgcacacaaatattatttgtgtttcctaaatccaaccattttcattaattcaggcatattttaactccactgcttacctactttcttcaggtaaagggcaaataatgatcgaaaaaataattatttattacataatttagttgtttctagactataaatgttgctatgtgccttatgttgaaaaaatttaaaagtaaaatgtctttccaaattatttcttaattattataaaaatattaagacaatagcacttaaattcctcaacagtgtttttcagaagaaataaatataccactctttacctttattgatatctccatgatgatagttgaatgttgcaatgtgaaaaatctgctgttaactgcaacttgtttattaaattgcagaagctttatttc

SEQ ID NO: 186546 - DNA, 1124 bp, Homo Sapiens
tcatgactttgatgcgcatgtcctcaattttgctctgcaatcgggtcaggaaggcatcacgaatggcagccgcatcattgcccagacaagcatacactgacattggggccaccgtggccagacgtttcagcagctgaatggcaagacgtggcaaagcagggtcatgtttgtggtagatgtatttggctagaacagcaatgaggttgtttccatgagcaccatgttgtgagagagcctgttccaggggggacaccacattagaaggaggtttcagccgaataacattgttggtgacggagaatgccagtttcactgtcttgatcagcagctggccctgcccctggccctctgccccatcacttcgaggctgagcagccatcaccatgtcaatggtgtccacgccaatgcccatgatattgataactgtctgtcctgcttctgtgtatgccaggctgcagatgcagagaaactgcaggctgggagtatgactgctgtgcaggtctgtctcgtggcacaggttcagtatcgcatgaatcagctccaagatcaggcaaccaatctgttccctcactccatgagagttgtagcgccacttatggtagctgggaagcatctccttcagcacaaacattacacagggtacaagtccttggctctgggtactaccaagttgccccttgacaagggtggtgatcaagcgcagaaaggcaatagtaaccccatactcgccctgaggctgttcactgttcatcaagaggtttccgtaccctccagcattcatcccttccgcactaatcatctgactcaggctggagacaggatgggccacaaatggtaaaaaacctgtgtgacgaagatcagtccagacctttgctggattgcgggcagccaaaacagttaagcagttgacacaagaagcaatgacatccacaggtggggagatcactgtcgttaaccgctgcagcagcatgtagatgcgagatgtgatgggcaggagacagtctgctatcgacaggtctgtactgatgaccttatggacgagatcaatgatgggtttgactcgctggcagtgctgaatcacatctgcagttgaaacaacatgaagcccaacatttcaatcccaa

SEQ ID NO: 186547 - DNA, 1622 bp, Homo Sapiens
aagccaactttgtacaaaaaagttggcaccatgggggcccagctcagcacgttgggccatatggtgctcttcccagtctggttcctgtacagtctgctcatgaagctgttccagcgctccacgccagccatcaccctcgagagcccggacatcaagtacccgctgcggctcatcgaccgggagatcatcagccatgacacccggcgcttccgctttgccctgccgtcaccccagcacatcctgggcctccctgtcggccagcacatctacctctcggctcgaattgatggaaacctggtcgtccggccctatacacccatctccagcgatgatgacaagggcttcgtggacctggtcatcaaggtttacttcaaggacacccatcccaagtttcccgctggagggaagatgtctcagtacctggagagcatgcagattggagacaccattgagttccggggccccagtgggctgctggtctaccagggcaaagggaagttcgccatccgacctgacaaaaagtccaaccctatcatcaggacagtgaagtctgtgggcatgatcgcgggagggacaggcatcaccccgatgctgcaggtgatccgcgccatcatgaaggaccctgatgaccacactgtgtgccacctgctctttgccaaccagaccgagaaggacatcctgctgcgacctgagctggaggaactcaggaacaaacattctgcacgcttcaagctctggtacacgctggacagagcccctgaagcctgggactacggccagggcttcgtgaatgaggagatgatccgggaccaccttccacccccagaggaggagccgctggtgctgatgtgtggccccccacccatgatccagtacgcctgccttcccaacctggaccacgtgggccaccccacggagcgctgcttcgtcttctgagggccgggcacggtcacacggccacccgccccgcgcaccccacgccctgttcacgctcacccagtcacctccccacatcgcacactggggccccgggttcagcctggcctgcccgtgccctggtgaatcacctggctgagcagttcccctggagccccttcgggagcagggctgtgtcccagatgggccacggctgagccttcagagtacgtcctgcctggcacttactggtccttaccagagacgcccagccccatccctgtcctcatgacccctcgtccaccccccacacacactataaggctgagggctgccagcagccccgtctgcccaccattcccggccgtggaccatagtcgggatgtcagcagacacacatgggcagcccaaagctgcaggtgccagggcccaccccagcctcgcctgtcacccccactcccgcctcagggccaggcccaggcctcaccacctgacgctgcatgagacattgacaccagaagccctcttgggggcactgctccctaccccagggccctggccagccgggagcttggctctcctctggctagagtgggaagagggggctggccatggggcccttcccacaacctcagctttccttccagcccatccaacactgaggcagccttggggaaccccgagctggggggtgggcagcccactgc

SEQ ID NO: 186548 - DNA, 3410 bp, Homo Sapiens
  misc_feature (2407)..(2552): n is a, c, g, or t
ttgggtctcagtgtctagggaagcttggggttctgctccttttacttcaggcgaacctgaactttaatgcaattttgaagcatgccctgaatagattcagtcattatcaagtcaaactaaaaacggtgaaaggttgcgactattaccaaataggaaaaacctgaagacataagaactacacatgaggaatatgtcatttagcactttcactttttgatctccacagaagacaatgagaagtcataccataacaatgacgacaacttcagtcagcagctggccttactcctcccacagaatgcgctttataaccaatcatagcgaccaaccgccacaaaacttctcagcaacaccaaatgttactacctgtcccatggatgaaaaattgctatctactgtgttaaccacatcctactctgttattttcatcgtgggactggttgggaacataatcgccctctatgtatttctgggtattcaccgtaaaagaaattccattcaaatttatctacttaacgtagccattgcagacctcctactcatcttctgcctccctttccgaataatgtatcatattaaccaaaacaagtggacactaggtgtgattctgtgcaaggttgtgggaacactgttttatatgaacatgtacattagcattattttgcttggattcatcagtttggatcgctatataaaaattaatcggtctatacagcaacggaaggcaataacaaccaaacaaagtatttatgtctgttgtatagtatggatgcttgctcttggtggattcctaactatgattattttaacacttaagaaaggagggcataattccacaatgtgtttccattacagagataagcataacgcaaaaggagaagccatttttaacttcattcttgtggtaatgttctggctaattttcttactaataatcctttcatatattaagattgggaagaatctattggaggatttctaaaaggaggtcaaaatttcctaattctggtaaatatgccactacagctcgtaactcctttattgtacttatcatttttactatatgttttgttccctatcatgcctttcgattcatctacatttcttcacagctaaatgtatcatcttgctactggaaagaaattgttcacaaaaccaatgagatcatgctggttctctcatctttcaatagttgcttagatccagtcatgtatttcctgatgtccagtaacattcgcaaaataatgtgccaacttctttttagacgatttcaaggtgaaccaagtaggagtgaaagcacttcagaatttaaaccaggatactccctgcatgatacatctgtggcagtgaaaatacagtctagttctaaaagtacttgaggtaaacatactaaaatgaattatataatgcagcctcttaattctttgaagaactaaaaaattaggaaacaaagttctagcatttacaaaactcagatctcaaagctctgcttgtatttgtgatatttcatttgcttaactgtaaaccatttcaaggtactatcttttaaatctgtatgtaaaatcttttcaaaatacatttttaagctaatactcttaacatagattatgaagttaagtgaaatttatggctctaacagcaaaataattaaagtgccatagtttctcaagtgactaaagtagttattaaaatcaagcacttgatactaatttgaagtgtgtttaaaagtaaatgatttgggaactgacaatgtgtcagaaaatatatgttcatttatcattttaaaatcttgtataatttgccactgtattcatttatgcctaaatctctataacagatgaaaagataattaataaaatcctaattaaaaaatgagatcacccactatctatcactgcttagataaaaagggaaagaatttaaatactgtatagtaaaaattaacagataagctaacgattcaatagcctagcaataggtcttaaaaccacaccttacttaaaacaggtttataaacaatagggtcatttcagccacagtttgataaagtaacattgaacatgcatattctgtgatccagcaagtcatctacaaggtatacatcttacagaatcattcaaatacgtacacaagaaacatgtaatgatgctcagtgaactaacattcataatacgaaacaactggaaataaggacataacagcaaaggcatggagaagtgaactggtttactcacgaaatggaatatcatgtagcgatgcaatgaaatgaactacactcacatgcatcaacatgggtatatctcaaatataatgttgagtaaaaaaaaccccacaaaattgcaaaagggtatgtactgcatgaaatcatttatgtaaaatataaaaacataaaacaataccacattcnnnnnnnnnnnnnnnnnnnnnnnnnnnnnnnnnnnnnnnnnnnnnnnnnnnnnnnnnnnnnnnnnnnnnnnnnnnnnnnnnnnnnnnnnnnnnnnnnnnnnnnnnnnnnnnnnnnnnnnnnnnnnnnnnnnnnnnnnnnnnnnnnntagaaaacaataccacattcttatggatcaatacatataaaataaagatacaaaacatgtatgataatatatacaagatacataccaacttaatggttatatctggagaaatttgaagcaaatatggcaaaatgttaatgtcttaaatctaggtagtaggcacgtgattatattatttttggtaaactcctgggtatttgaaatactttacaacaataaaaacctgcaaattagaattaaaaggagcaaactctgcaattttcatgtacattaaaaaataacaggacagcaagctctgaaagaaagcggtcttagtcttgttcgtcattgcctccctggagcttagtatgtttcttggctataggagatcaatacacatttattgaataattaagaagaatggacggatgaataagatagggagaaagggaaggaaggggtgcttacaagaaaaaaagttgggagtaattagcttttttcctagtccatttgaatatagctgtatagaacaccatacagttgcaatctagggggtgtcattaggcaaacattcttgaaagtttggccagcatttgtccagttctttggtcatacacagaacctgaatgttattgactgaatttatgtaaaagcatcttaggacaaactccaaggactcatctgaaagtttctatcatggtgtataaaatttttttagagtcagaatacttcttaaaacttaaggtaggccattggctgagaaatcaatgtgaatgaccatgaagattttgatcagaactgagtttattttaatgagatttggcttgtatacagtgctcagttaactatatatagatatattttttgagatggagccaa

SEQ ID NO: 186549 - DNA, 1117 bp, Homo Sapiens
  misc_feature (346)..(406): n is a, c, g, or t
  misc_feature (410)..(564): n is a, c, g, or t
ttggatctggctccctgacatggaaaattaccggctggagagcgcctatgagaagcacctcatcatcaaagttgtcctgttccagtttgtcaactcgtacctgagcctcttctacatcggtttctacctcaaggacatggagcgcttgaaagagatgctggccacgctgctgatcacccgccagttcctccagaacgtgcgcgaggtcctgcagccgcacctgtaccggcgcctgggccgcggcgagctgggcctgcgggccgtctgggagctggcccgagccctgcttggcctcctgagcctccggcgccttgctccccgccgcctcgaaccccaggcggatgannnnnnnnnnnnnnnnnnnnnnnnnnnnnnnnnnnnnnnnnnnnnnnnnnnnnnnnnnnnnccgnnnnnnnnnnnnnnnnnnnnnnnnnnnnnnnnnnnnnnnnnnnnnnnnnnnnnnnnnnnnnnnnnnnnnnnnnnnnnnnnnnnnnnnnnnnnnnnnnnnnnnnnnnnnnnnnnnnnnnnnnnnnnnnnnnnnnnnnnnnnnnnnnnnnnnnnnnngggcctcctggactgcgggctccggctgaagaaggtcagcttcgctgagcgcggcgcggggcggcgtcggcccggcccaagcccggaggccctcctggaggaagggagccccactatggtggagaaggggctggagccgggagtgttcaccctggccgaggaggacgacgaggcggagggggctcccggcagccctgaacgggagcccccggccatcttgttccgccgggccgggggcgagggccgagaccaggggccttattgtggcccggacccggaacccggctccaacagcgattccacccgtaggcagagacggcagaaccggtcgtcttggattgacccgccggaggaggaacactcgccccagctcacccaggcagagctggagagctgtatgaagaagtacgaggacacgtttccaggactaccaggagatgttcgtgcagttcggctacgtcgtgctcttctcgtccgccttcaccctggcggcgctgtgcgccctgggcaacaacctcatttgaaatccgcaacgacccccttcaagctgtgc

SEQ ID NO: 186550 - DNA, 955 bp, Homo Sapiens
tttgctctttcaaagccgtagccaaccaccagaacaccatgatccaggtttttgctgctgcagtctggttcaaaataaatgctgatttgtagaactggaaggacgaatggcctgcatcccatagcaacggagatgggccccacagttgcgactgctttcatcagggccttctcctttccaggtgcgaccactgtgaagccagtgtcattagcaacagaattctcaggtctgtacttacagatttcatccactgctacatatggataggattcctcagagtccaggcctccgttctccttgacatactggaaggccctagccatgaagccaccattgcagccctgattgccttgaggacgcgaacagtccaccagattctgctcgctcagtgagacaagtttcccagttttccggaacatctgtccttcaagagcaccagtcgcactaaaagcccaacaagaaccacactgtttctgattcttcactggcgtcacgtagcctttctttctccaatccacagatttgggaagatcaagaaacagaggctcacggaacactttccccttcctgaatttctggtttcgaaagcaacccatcatctgcctgaattcttcattggtcatgtcaccaaaagcattcatggccattgtgaagccatgtttcccttggctgtattccccattgtgcagttcaatcattttcatattcttttcccacactgctctcctccatccttcttcattcgcgccatataatcttctgtgtgttgccttccactggtaccactttgtatccaaattttggtcaaattttggaacagcggaggctattcccaagcaaaaggcagccaggacgagcgaaagattcatgtttcaaaaccagcagccgtcgcagctgcgcaggcaccctcagcaaacaagcctctgagattacagccaacttttttgtacaaagt

SEQ ID NO: 186551 - DNA, 1513 bp, Homo Sapiens
tacaaaaaagttgggaaggcttcgggctcgcgccgctgaagtcggcttacccgctggccgcctcctgacaagcgggagggatccgcggtggacccagggaagcggaggagcctggcggccaccccctcttcctcacttccctgtactctcatcgctctcggcctccgacacgttccaagatgagatgggattctccaacatggaagatgatggcccagaagaggaggagcgtgtggctgagcctcaagctaactttaacacccctcaagctctacggtttgaggaactactggccaacctactaaatgaacaacatcagatagcgaaggaactatttgaacagctgaagatgaagaaaccttcagccaaacagcagaaggaggtagagaaggttaaaccccagtgtaaggaagttcatcagaccctgattctggacccagcacaaaggaagagactccagcagcagatgcagcagcatgttcagctcttgacacaaatccaccttcttgccacctgcaaccccaatctcaatccggaggccagtagcaccaggatatgtcttaaagagctgggaacctttgctcaaagctccatcgcccttcaccatcagtacaaccccaagtttcagaccctgttccaaccctgtaacttgatgggagctatgcagctgattgaagacttcagcacacatgtcagcattgactgcagccctcataaaactgtcaagaagactgccaatgaatttccctgtttgccaaagcaagtggcttggatcctggccacaagcaaggttttcatgtatccagagttacttccagtgtgttccctgaaggcaaagaatccccaggataagatcctcttcaccaaggctgaggacaatttgttagctttaggactgaagcattttgaagggactgagtttcttaaccctctaatcagcaagtaccttctaacctgcaagactgcccgccaactgacagtgagaatcaagaacctcaacatgaacagagctcctgacaacatcattaaattttataagaagaccaaacagctgccagtcctaggaaaatgctgtgaagagatccagccacatcagtggaagccacctatagagagagaagaacaccggctcccattctggttaaaggccagtctgccatccatccaggaagaactgcggcacatggctgatggtgctagagaggtaggaaatatgactggaaccactgagatcaactcagatcaaggcctagaaaaagacaactcagagttggggagtgaaactcggtacccactgctattgcctaagggtgtagtcctgaaactgaagccagttgccgaccgtttccccaagaaggcttggagacagaagcgttcatcagtcctgaaacccctccttatccaacccagcccctctctccagcccagcttcaaccctgggaaacaccagcccaatcaactcattcagaagcccctccgagcaaatggtgctccggattcctcacccaataca

SEQ ID NO: 186552 - DNA, 1447 bp, Homo Sapiens
tttgtacaaaaaagttggcaaacagctgccagtcctaggaaaatgctgtgaagagatccagccacatcagtggaagccacctatagagagagaagaacaccggctcccattctggttaaaggtacagccctcttcctcgaagtctgtaggaggcagaaggtcactgaaagttctgagagaatatcaaggacttccttaatcgtctaatgctttagttgtagaactaggacttcaggaatcttcctgattcacctttcttcccttacttttctgcccttctccgggtgattctacaacattttcaaaataatgggtaaaatggtaatttgctaaaggaaattcagagaagagtttctaaagtgtataattggactgtggtctttgtagaaatttcatatgcagagtcccttggaaagatgccttgagcttgtctcaggtccctaaacttagaaagtcctattctttttcccaaattctgacatgtgctggatcagagtgttctcatttccaataggccagtctgccatccatccaggaagaactgcggcacatggctgatggtgctagagaggtaggaaatatgactggaaccactgagatcaactcagatcaaggcctagaaaaagacaactcagagttggggagtgaaactcggtacccactgctattgcctaagggtgtagtcctgaaactgaagccagttgccgaccgtttccccaagaaggcttggagacagaagcgttcatcagtcctgaaacccctccttatccaacccagcccctctctccagcccagcttcaaccctgggaaaacaccagcccaatcaactcattcagaagcccctccgagcaaaatggtgctccggattcctcacccaatacagccagccactgttttacagacagttccaggtgtccctccactgggggtcagtggaggtgagagttttgagtctcctgcagcactgcctgctatgccccctgaggccaggacaagcttccctctgtctgagtcccagactttgctctcttctgcccctgtgcccaaggtaatgatgccctcccctgcctcttccatgtttcgaaagccatatgtgagacggagaccctcaaaaagaaggggagccagggcctttcgctgtatcaaacctgcccctgttatccaccctgcatctgttatcttcactgttcctgctaccactgtgaagattgtgagccttggcggtggctgtaacatgatccagcctgtcaatgcggctgtggcccagagtccccagactattcccatcgccaccctcttggttaaccctactttccttcccctgtccattgaaccagccccttgtggcctcctctgtctcacccttaattgtttctggcaattctgtgaatcttccctataccatccacccctgaagattaagcccacatgaatgtggaacattgct

SEQ ID NO: 186553 - DNA, 1397 bp, Homo Sapiens
actttgtacaaaaaagttggctttgcgaggggagacgatcccagtgtcggttgcgggatccgcctcctctcagtttgcccctttagccctccacctttcccttctcctctctcgcacttccgccagtcggcttacccgctggccgcctcctgacaagcgggagggatccgcggtggacccagggaagcggaggagcctggcggccaccccctcttcctcacttccctgtactctcatcgctctcggcctccgacacgaaaaggaagcaaatgagctgatggaagatctgtttgaaactttccaagatgagatgggattctccaacatggaagatgatggcccagaagaggaggagcgtgtggctgagcctcaagctaactttaacacccctcaagctctacggtttgaggaactactggccaacctactaaatgaacaacatcagatagcgaaggaactatttgaacagctgaagatgaagaaaccttcagccaaacagcagaaggaggtagagaaggttaaaccccagtgtaaggaagttcatcagaccctgattctggacccagcacaaaggaagagactccagcagcagatgcagcagcatgttcagctcttgacacaaatccaccttcttgccacctgcaaccccaatctcaatccggaggccagtagcaccaggatatgtcttaaagagctgggaacctttgctcaaagctccatcgcccttcaccatcagtacaaccccaagtttcagaccctgttccaaccctgtaacttgatgggagctatgcagctgattgaagacttcagcacacatgtcagcattgactgcagccctcataaaactgtcaagaagactgccaatgaatttccctgtttgccaaagcaagtggcttggatcctggccacaagcaaggttttcatgtatccagagttacttccagtgtgttccctgaaggcaaagaatccccaggataagatcctcttcaccaaggctgaggacaacaagtaccttctaacctgcaagactgcccgccaactgacagtgagaatcaagaacctcaacatgaacagagctcctgacaacatcattaaattttataagaagaccaaacagctgccagtcctaggaaaatgctgtgaagagatccagccacatcagtggaagccacctatagagagagaagaacaccggctcctattctggttaaaggccagtctgccatccatccaggaagaactgcggcacatggctgatggtgctagagaggtaggaaatatgactggaaccactgagatcaactcagatcaaggcctagaaaaagacaactcagagttggggagtgaaactcggtacccactgctattgcctaaggtgtagtcctgaaactgaagcc

SEQ ID NO: 186554 - DNA, 2079 bp, Homo Sapiens
  misc_feature (1781)..(1789): n is a, c, g, or t
  misc_feature (1865)..(1886): n is a, c, g, or t
  misc_feature (1908)..(1918): n is a, c, g, or t
ttgggtaaaatccgaaactggacacaagtcagttctttcaccacactcaaatgtatataccaaaacaaaaggttgcaacttcatagtttactatgaaaagcaaattgtactttttaatgttgccttttaaattcatgaccaaatacttagctatttgtgaatcttctgcactctagcatgaaagtgcctttggtttgagattccagcttagaaaagtgctgccataataacgataatttgtagagagaccaaaaatattttgagatcaccgtaatgcctttggtttaccgggatgagtaaccaaccacaggcctctgttcacaagagcacgacgtggtccccgcctgctgctagtctgtctgccactgggggcctcccaacatccatagcacacttcagcggaaggaccccagaaactgttgtgtttgtgtgtgctgatgacctagtgtgtcatttcacctcgtcacccagccctgcgtccggatgaggggacttctgcacaaatgacagaatctcggctggtggacagatactacagctttctcctcctccttgtgttcgtgttcagtctctgtggagactttcttttccattcaaatgacagtgcgcacttatctggtttacacaatgataccattttgaaagttggaagcctcaaactgagacgacagtgcagaacaaaacaaaagtgagttagggtcgttaaaattgaagtgttcttcttagggcaaacatgttgactccgagtattgtgtatgaatgtgctacgagaaacttccaaagagcaccattcacaatttggcattttcaaagaatgttccagccctcaaaggggcaactctttaaagtccttgttggcttttatccaaaccttgtagaaattgggaaagctgatagaggtaaggaagacgagtgaaaaggacaagaaggccaaacaccagccaaaaagaaactaggaaaaaaagattttctttgctaatatagatgtaaaaataacatcagacatctttgaaaattagcctctaaactcttaatacatacgttctgtgtgtctctacctggcgtctttaagaatatcctctctgggctctgaaattttaggagtgattcttatccactccaagttgtaagtatttgtagaaatttgtgcaaacaaacaaaaactatcaaatgaaaagaaaatgtactcaacctaacttatagttagcagctggaattctcaactcttccctgccagcactataccacagtgtggaagaaattagtcaaatgcttgttttcctgcttctcttttcaactgttactgtgctttgtttgaaagtagttttctctctcaaagccgttgcttatatcgttaagaatgaaggtttgtgtttaaaatttattgcattgcaaagggtagtttcactgaagtcatgcaccattaaataagatgaaatatttgtatttattgtcctacttcctaagccgtaacttcttttcctctgtgaatttgcattgagtcactcatgctacactacatcgctttagtatttgagatggcatttatgtttcctctcgtttatcatgaaatggggtcagattccatcagattccacctctgtcaggtggactcttgtctgccttccatgatgagattttttttctccttcccctttctttaagagaggctgacagatctaggtgtcaatcaattggaaaccagtctctgattttttttcattagttattttctatcattagtttcactgtgtaaattagatatcaactgcacttctttnnnnnnnnntacatctccctattacctccttgaaagatttacttctgtaggcctttttcaataggctcatgactgcagacaaggnnnnnnnnnnnnnnnnnnnnnncagtatgtgcctgaaaatgacnnnnnnnnnnntttgtaacatttaaaaaagaaaccctgaatagcctttaattctttaataatacacttaaaattttatgtaaatcggttttcgccacgtgtgtttgtttcacattctaaatgacttaatggggattctcacgggtctgtgtctttgtgtcacgtgtataaaa

SEQ ID NO: 186555 - DNA, 1607 bp, Homo Sapiens
ttggcgcgctttgcagttcggtctcctggtgtacggccaacgccaagtaggggattgcgttccctccagtcgcagaccctatcagatttggatatgtccttcatatttgattggatttacagtggtttcagcagtgtgctacagtttttaggattatataagaaaactggtaaactggtatttcttggattggataatgcaggaaaaacaacattgctacacatgctaaaagatgacagacttggacaacatgtcccaacattacatcccacttccgaagaactgaccattgctggcatgacgtttacaacttttgatctgggtggacatgttcaagctcgaagagtgtggaaaaactaccttcctgctatcaatggcattgtatttctggtggattgtgcagaccacgaaaggctgttagagtcaaaagaagaacttgattcactaatgacagatgaaaccattgctaatgtgcctatactgattcttgggaataagatcgacagacctgaagccatcagtgaagagaggttgcgagagatgtttggtttatatggtcagacaacaggaaaggggagtatatctctgaaagaactgaatgcccgacccttagaagttttcatgtgtagtgtgctcaaaagacaaggttacggagaaggcttccgctggatggcacagtacattgattaacacaaactcacattggttccaggtctcaacgttcaggcttactcagagatttgattgctcaacatgcataacttgaattcaatagacttttgctggttataaaacagatgttttttagattattaatattaaatcaacttaatttgaatgagaattgaaaactgattcaagtaagtttgagtatcacaatgttagctttctaattccataaaagtacttggtttttacagtttataatctgacatcaccccagcgccatttgtaaagagcaactttccagcagtacatttgaagcactttttaacaacatgaaactataaaccatatttaaaagctcatcatgttaaattttttatgtacttttctggaactagtttttaaattttagattatatgtccacctatcttaagtgtacagttaataattagcttattcaatgattgcatgatgccttacagttttcaataactttttttcttatgcaaacgtcatgcaataaaacaaactctaatgtttggcatccttgttgggcaaatgtttcatttaaatgtgtcttatctagctagtatactctgaaaatttgagtatttaatattaggcatatgaagtggttgttgggaaaggagattccttcagaatatttagaatagcgtttaaggctctcaaggcttaggtatttaccatgagatggttgtggtcagttgcacctgataccatgtatccctgaatcatgtgtatttttattagtaatgcagccactaccattgctgatggggtctgtgtcctagtccctgtgggattggcctttctgaagaaaagcacatttatggtacacaaggttgattcccagtttggtaggctctatagttccatcccagctgtctaattctgaagtgctccagtcttattggtgccc

SEQ ID NO: 186556 - DNA, 723 bp, Homo Sapiens
  misc_feature (529)..(567): n is a, c, g, or t
ttggattaattcaactgcacttaacactaatgtccgtgttggtatagaaatgtctaaatcctatactctagttgaggaagatcttccataattttatggtattacacagggaaagctatgactgcaggatcagtctaactatactattaggtgcatgtattctcttttcactaacttatacttgtctatctagaatacaggtcttccagtcagctggtcatttaccaggtgtggacttaagttgctgggcttgcagtaagaattgccagccactcattgtgcgggtctgcgtggagctttaatcagaaaaagcctccactttctgtattatgttaacattggctcatgcatataactatctgctgctgatgtagttctccatcttcaagatttagagtgggttaaccaggtcattacatcttaatttaataacaagcattactgtagagtgattgtgtatagatctgttagctgtcagggtgtgttttttttaacctgttgtgtgcgtgtgggggttaggattagtaannnnnnnnnnnnnnnnnnnnnnnnnnnnnnnnnnnnnnnagaacagataactagcgctgctctggcattaatcccaggaaccactagcagtagtggggcgccgccaatctaacatgagcacaggtgcttcatgacaaacattactagcatggtcaactgcaccatggtctggcactgtattttgaatgacattaa

SEQ ID NO: 186557 - DNA, 1092 bp, Homo Sapiens
  misc_feature (125)..(140): n is a, c, g, or t
  misc_feature (678)..(686): n is a, c, g, or t
tgctaaatatggttgtctttattttctttttccttgcccagccctatctaaacataaaataaaactacaggactgaaattaacaatccattaaaatcagcaataagttatgaaaatcataaagcnnnnnnnnnnnnnnnnaagtaattaagggtagttaaattatttaaagtatacaaagtccaaacagccaggggtaaggtctccaagaggccttcccagggtaagggagagggccacaagggaaccttggagtttgaaagacaaagggaacacatgacatcaaagtgcaggctagaaatttcacttagaagaaaataacattactgaaaatattcgtaagagtaacaatagcacctgcacagtgggactgtgaggaagagagagactgcctgtaggaaaatggaagcaaatctttacattaaaatgagacaagtgctgaacttactatgttaactatgatagtgtgtctactatagatatcagatggttaaaagctggtaaaaggtaatgattctaaaaacaaaaatagcattgaccctttttctacctagcccagacctcattcattttgtgcactataaagagtgaggtgtgaggtgttttatcattatcaaatgctgcatcaaaatagatgatttttttccccatgtgtttttccactataaaagacatctannnnnnnnnatggataagctttaaaaagatgtcattttggttttcaacacatataaacagttatcaaaatctgaaataaaaatgctgctgtggctcagaccttggcctgctaatctgcgtgcacaactcttctgacccacgcagacaaagaggcacatggagctttttccttttggcccccccaatccatactcataggccttgtaggatagaggctgtcatgcatggactgctcccatgtggcctaagggcagcaggatggagaggtggcagctgggtgcctagtgctaacaatgcaggataaggttagcttgcttagcatggaatccaacagaaagttgagctgcatgatgatccctttcaaaaggcttcatgggagtctctccttttgcagagcatgaaatgagcttttttc

SEQ ID NO: 186558 - DNA, 1278 bp, Homo Sapiens
  misc_feature (227)..(235): n is a, c, g, or t
ttggcactggtatacaatgtgctgaaaaccctaatggaaatgaatggcaagcttttcgatgaccttactagctcatacaaagctgaaagacagagagagaaaaagaaggaattggaacgtgaagaattatggaaaaaattagaggagctaaagctaaagaaagctctagaaaaacagaatagtgcttacaacatgcacagtattctcagcaatacaagtgccgaatnnnnnnnnngcctcccacctctgccggataggcagagttttgtatgcttttttgaaatatgtaaaaattacaaaacaaacctcatcattataatataattaaaaggccaattttttctggcaactgtaaatggaaaaatatatggactaaacgtagccctgtgctgtatcatggccatagtatattgtaacctttgtctaatcattggatttattgtgtcacttctgaagtttcacagaaatgaatgaattttatcatctatgatatgagtgagataattatgggagtggtaagaattatgacttgaattcttctttgattgtgttgcacatagatatggtagtctgctctgtatatttttcccttttataatgtgcttttcacactgctgcaaaccttagttacatcctaggaaaaaatacttcctaaaataaaactaaggtatcatccttacccttctctttgtctcacccagaaatatgatggggggaattacctgccctaacccctccctcaataaatacattactgtactctggaatttaggcaaaaccttaaatctccaggctttttaaagcacaaaatataaataaaagctgggaaagtaaaccaaaattcttcagattgttcctcatgaatatcccccttcctctgcaattctccagagtggtaacagatgggtagaggcagctcaggtgaattacccagcttgcctctcaattcattcctcctcttcctctcaaaggctgaaggcagggcctttccagtcctcacaacctgtccttcacctagtccctcctgacccagggatggaggctttgagtcccacagtgtggtgatacagagcactagttgtcactgcctggctttatttaaaggaactgcagtaggcttcctctgtagagctctgaaaaggttgactatatagaggtcttgtatgtttttactttggtcaagtatttctcacatcttttgttatcagagtaccattccaatctctttacttgcaattgtgtggaaaactgttttgtaatgaaagatcttccttgggg

SEQ ID NO: 186559 - DNA, 1658 bp, Homo Sapiens
  misc_feature (1287)..(1295): n is a, c, g, or t
ttggctcaggtaagtttcagaaacatttcagatgaaatgaatattatttcaaaggccaatataaaggcagagaaattgagaaatactgagatgacagttttaagtataattaagcaatttgcttacaaaattacccaaagcaaatttttcttattttaaagtatttagttgttaagtaagaccaattatttaatttctatatctacacttacagtttaagatacacactttcctcatattatagtccaggtcttgacctaattatgtgactttgaataaatcccacatatctacagaatgtttcttccagctgcaataacctagacctagttagagagattttggtctcttctattaatatttagagaataatatatcagcataggtgtacatgtagaaacatgctgaaaaactaaattgttagctctagtcttatttcagttaactttatagtcagaaattactactaaaaatgttttttaaacttgaagttactttcaaggctaaaaagttacacaattgtgagtatagtttcacgattgaggtatttcacaatttcattcacagttgtgagtatatttttatatattggaataatttatcaaaatgaggtagtctaaaaaatattggctaaatataaaaatcctacattattaaatgttatctcactaatatttataaactgtcccttaccttttagctagcatattgtgttgtacagttcctggagaaagatacaacactaacagagccagtgatcagaggactgctgaaattttggccaaaaacctgcagtcagaaagaggtgatgtttttaggagaaattgaagaaatcttagatgtcattgaaccaacacagttcaaaaaaattgaagagccacttttcaagcagatatccaagtgtgtatccagttctcattttcaggttgcagaaagggcattgtacttctggaataacgaatatattcttagtttgattgaggagaacattgataaaattctgccaattatgtttgccagtttgtacaaaatttccaaagaacactggaatccgaccattgtagcactggtatacaatgtgctgaaaaccctaatggaaatgaatggcaagcttttcgatgaccttactagctcatacaaagctgaaagacagagagagaaaaagaaggaattggaacgtgaagaattatggaaaaaattagaggagctaaagctaaagaaagctctagaaaaacagaatagtgcttacaacatgcacagtattctcagcaatacaagtgccgaatnnnnnnnnngcctcccacctctgccggataggcagagttttgtatgcttttttgaaatatgtaaaaattacaaaacaaacctcatcagtataatataattaaaaggccaattttttctggcaactgtaaatggaaaaatatatggactaaacgtagccctgtgctgtatcatggccatagtatattgtaacctttgtctaatcattgggatttattgtgtcacttctgaagtttcacagaaatgaatgaattttatcatctatgatatgagtgagataattatgggagtggtaagaattatgacttgaattcttctttgattgtgttgcacatagatatggtagtctgctctgtatattttttcccttttat

SEQ ID NO: 186560 - DNA, 2157 bp, Homo Sapiens
  misc_feature (1566)..(1601): n is a, c, g, or t
  misc_feature (1910)..(1978): n is a, c, g, or t
ttgggtgaaaatgctgaaagagggggccacggccagcgagtacaaagctctgatgactgagctaaaaatcttgacccacattggccaccatctgaacgtggttaacctgctgggagcctgcaccaagcaaggagggcctctgatggtgattgttgaatactgcaaatatggaaatctctccaactacctcaagagcaaacgtgacttattttttctcaacaaggatgcagcactacacatggagcctaagaaagaaaaaatggagccaggcctggaacaaggcaagaaaccaagactagatagcgtcaccagcagcgaaagctttgcgagctccggctttcaggaagataaaagtctgagtgatgttgaggaagaggaggattctgacggtttctacaaggagcccatcactatggaagatctgatttcttacagttttcaagtggccagaggcatggagttcctgtcttccagaaagtgcattcatcgggacctggcagcgagaaacattcttttatctgagaacaacgtggtgaagatttgtgattttggccttgcccgggatatttataagaaccccgattatgtgagaaaaggagatactcgacttcctctgaaatggatggctcccgaatctatctttgacaaaatctacagcaccaagagcgacgtgtggtcttacggagtattgctgtgggaaatcttctccttaggtgggtctccatacccaggagtacaaatggatgaggacttttgcagtcgcctgagggaaggcatgaggatgagagctcctgagtactctactcctgaaatctatcagatcatgctggactgctggcacagagacccaaaagaaaggccaagatttgcagaacttgtggaaaaactaggtgatttgcttcaagcaaatgtacaacaggatggtaaagactacatcccaatcaatgccatactgacaggaaatagtgggtttacatactcaactcctgccttctctgaggacttcttcaaggaaagtatttcagctccgaagtttaattcaggaagctctgatgatgtcagatatgtaaatgctttcaagttcatgagcctggaaagaatcaaaacctttgaagaacttttaccgaatgccacctccatgtttgatgactaccagggcgacagcagcactctgttggcctctcccatgctgaagcgcttcacctggactgacagcaaacccaaggcctcgctcaagattgacttgagagtaaccagtaaaagtaaggagtcggggctgtctgatgtcagcaggcccagtttctgccattccagctgtgggcacgtcagcgaaggcaagcgcaggttcacctacgaccacgctgagctggaaaggaaaatcgcgtgctgctccccgcccccagactacaactcggtggtcctgtactccaccccacccatctagagtttgacacgaagccttatttctagaagcacatgtgtatttatacccccaggaaactagcttttgccagtattatgcatatataagtttacacctttatctttccatgggagccagctgcnnnnnnnnnnnnnnnnnnnnnnnnnnnnnnnnnnnngactaacaagaatgtaactccagatagagaaatagtgacaagtgaagaacactactgctaaatcctcatgttactcagtgttagagaaatccttcctaaacccaatgacttccctgctccaacccccgccacctcagggcacgcaggaccagtttgattgaggagctgcactgatcacccaatgcatcacgtaccccactgggccagccctgcagcccaaaacccagggcaacaagcccgttagccccagggatcactggctggcctgagcaacatctcgggagtcctctagcaggcctaagacatgtnnnnnnnnnnnnnnnnnnnnnnnnnnnnnnnnnnnnnnnnnnnnnnnnnnnnnnnnnnnnnnnnnnnnntttgagacgcaccatgtgggcacggagggggacggggctcagcaatgccatttcagtggcttcccagctctgacccttctacatttgagggcccagccaggagcagatggacagcgatgaggggacattttctggattctgggagcaagaaaagacaaatatctttttggaactaaagc

SEQ ID NO: 186561 - DNA, 1328 bp, Homo Sapiens
caggatagccagggccccttccttactcgtggctgtgcaccccccaccctcccgcccgctgccagccccttgtgtgggcactgacctgtgttcccgcccgcaagcctggcttcacaacagtgctcgccccctctgcctcctctgttgcctgcgtgccagggggccaggcttgcaccgtgtctcttttggtcttcaccagaatcttctggaattagaacagataccgtattcccagggcagttgggcggtgtgctgggcagcgtccaggctgctggcagggcctggcccctttttccagaacctgccggcctgctgacctcctgtgcaggttgggggtcccctccccggctgtgcctcacgctcatctccccttctctctgaagtctaacttctccctggccatcctgaatgtgggggccccggcggctggcatgaatgcggccgtgcgctcggcggtgcggaccggcatctcccatggacacacagtatacgtggtgcacgatggcttcgaaggcctagccaagggtcaggtgcaagaagtaggctggcacgacgtggccggctggttggggcgtggtggctccatgctggggaccaagaggaccctgcccaagggccagctggagtccattgtggagaacatccgcatctatggtattcacgccctgctggtggtcggtgggtttgaggcctatgaaggggtgctgcagctggtggaggctcgcgggcgctacgaggagctctgcatcgtcatgtgtgtcatcccagccaccatcagcaacaacgtccctggcaccgacttcagcctgggctccgacactgctgtaaatgccgccatggagagctgtgaccgcatcaaacagtctgcctcggggaccaagcgccgtgtgttcatcgtggagaccatggggggttactgtggctacctggccaccgtgactggcattgctgtgggggccgacgccgcctacgtcttcgaggaccctttcaacatccacgacttaaaggtcaacgtggagcacatgacggagaagatgaagacagacattcagaggggcctggtgctgcggaacgagaagtgccatgactactacaccacggagttcctgtacaacctgtactcatcagagggcaagggcgtcttcgactgcaggaccaatgtcctgggccacctgcagcagggtggcgctccaaccccctttgaccggaactatgggaccaagctgggggtgaaggccatgctgtggttgtcggagaagctgcgcgaggtttaccgcaggggacggggtgttccccaatgccccagactcggcctgcgtgatcggcct

SEQ ID NO: 186562 - DNA, 2162 bp, Homo Sapiens
  misc_feature (1978)..(2010): n is a, c, g, or t
ttgggtcttccctaaggatcctctaccggcttttcgagtcagtgctgccgccgctgcccgcggctttgcagagcaggatgaatgtgatagaccacgtgcgggacatggcggccgcggggctgcactccaacgtgcggctcctcagcagcttgttacttacaatgagtaataacaaccctgagttattctccccacctcagaagtaccagcttttggtgtatcatgcagattctctctttcatgataaggaatatcggaatgctgtgagtaagtataccatggctttacagcagaagaaagcgctaagtaaaacttcaaaagtgagaccttcaactggaaattctgcatctactccacaaagtcagtgtcttccatctgaaattgaagtgaaatacaaaatggctgaatgttatacaatgctaaaacaagataaagatgccattgctatacttgatgggatcccttcaagacaaagaactcccaaaataaacatgatgctggcaaacctgtacaagaaggctggtcaggagcgcccttcagtcaccagctataaggaggtgctgaggcagtgcccattagcccttgatgccattctaggcttgttgtccctttctgtaaaaggggcagaggtggcatccatgacaatgaatgtgatccaaaccgtgcctaacttggactggctctctgtgtggatcaaagcgtatgcttttgtgcacactggtgacaactcaagagcaatcagtaccatctgttcactagagaaaaaatccttattgcgagataacgtggacctattgggaagcttggcagatctgtacttcagagctggagacaataaaaactctgtcctcaagtttgaacaggcacagatgttggatccttatctgataaaaggaatggatgtatatggctacctactggcacgagaagggcggctagaggatgttgagaaccttggatgccgccttttcaatatctctgatcagcatgcagaaccgtgggtggtttctggctgtcacagcttctatagcaaacgctactcccgggccctctatttaggagccaaggccattcagctgaacagtaatagtgttcaagctctgctacttaagggagcagcacttaggaacatgggcagagtccaagaagcaataatccactttcgggaggccatacggctcgcaccttgtcgcttagattgttatgaaggtcttatcgaatgttacttagcctccaacagtattcgagaagcaatggtaatggctaacaacgtttacaaaactctgggagcaaatgcacagacccttacccttttagccaccgtttgtcttgaagacccagtgacacaggagaaagccaaaacattattagataaagccctgacccaaaggccagattacattaaggctgtggtgaaaaaagcagaactacttagcagagaacagaaatatgaagatggaattgctttgctgaggaacgcactggctaatcagagtgactgtgtcctgcatcggatcctaggagatttccttgtagctgtcaatgagtatcaggaggcaatggaccagtatagtatagcactaagtttggaccccaatgaccagaagtctctagaggggatgcagaagatggagaaggaggagagtcccacggatgccactcaggaggaggatgtggacgacatggaagggagtggggaagaaggggacctggagggcagcgacagtgaggcggcccagtgggctgaccaggagcagtggttcggcatgcagtgagggggcggcagctccatggccgcagtggcctgccctgctctgagcacttccgtggactgaaggaaccgtaggagcctgctctcagaaggacaatgattcagcatgtgattgcagcaggggtctctgccccctcgctcccaattcctagtcgtgacttcatttctaaaacagagcctgaccaccttccatgtatctccatcctnnnnnnnnnnnnnnnnnnnnnnnnnnnnnnnnnccccgagacccacgcacatgttggggcttctgggccaagagtactttttatataactaatttctaaatccaaaagctcaaggaatagacagtgttctgtgacatggattggtttgaagagttacccaccatcccagcacgataatgtcatct

SEQ ID NO: 186563 - DNA, 920 bp, Homo Sapiens
ctttgtacaaaaaagttggctcaggaggactcttgaaactaaagaagaccctttccaaagcagttctgataatatattctatccacagatggctacagaaccaaagaaagctgcagcccagaactctccagaggatgaaggacttctgatagtgaagatagaagaggaagaatttatccatgggcaggacacttgcttacagagaagtgaactccttaagcaggagctctgcaggcagctttttaggcagttctgctaccaggattctcctggacctcgcgaggcactgagccgcctccgggagctctgctgtcagtggctgaagccagagatccataccaaggaacagattctggaactgctggtgctagagcagttcctgaccatcctgccaggagatttgcaggcctgggtacatgaacattacccagagagtggagaggaggcagtgaccatactagaagatttggagagaggcactgatgaagcagtactccaggttcaagcccatgaacatggacaagaaatattccagaaaaaagtgtcacctcctggaccagcacttaatgtcaagttacagccagtggagaccaaggcccattttgattcatcagaaccccagctcctatgggactgtgataatgagagtgaaaacagtagatccatgccaaagctggaaatttttgaaaaaattgaatcacagagaattatatctggaagaatctcaggatacatatcagaagcatctggtgagtctcaagacatctgtaagtctgcaggcagggtaaagagacaatgggaaaaagaatcaggggagtctcagagactctcgtctgcccaggatgaaagttttggtaaaatcctcaccccccaaaatacagtcagaggtgaaataataagccacgatggatgtgagagga

SEQ ID NO: 186564 - DNA, 2780 bp, Homo Sapiens
  misc_feature (1781)..(1831): n is a, c, g, or t
  misc_feature (2173)..(2232): n is a, c, g, or t
ttggcattgaggcagacaccaagccccgggacacggggccagaagacagctactccagcagtgccatccaccgcaagctgaaaacctgcagctcaatgaccagtcatggcagctcccacacctcaggggtggagagtggcggcaaagaccggctggaagaggacttacaggacgatgaaatagagatgttggttgatgacccccgggatctggagcagatgaatgaagagtctctggaagtcagcccagacatgtgcatctacatcacagaggacatgctcatgtcgcggaagctgaatggacactctgggttgattgtgaaagaaattgggtcttccacctcgagctcttcagaaacagttgggttaagcttcgtggccagagtactgattctcttccacagactatatgtcggaaaccaaagacctccactgatcgacacagcttgagcctcgatgacatcagactttaccagaaagacttcctgcgcattgcaggtctgtgtcaggacactgctcagagttacacctttggatgtggccatgaactggatgaggaaggcctctattgcaacagttgcttggcccagcagtgcatcaacatccaagatgcttttccagtcaaaagaaccagcaaatacttttctctggatctcactcatgatgaagttccagagtttgttgtgtaaagtccgtctgtgtgcagctgtacaggcagcttactgtttgctagaggatgcgaaagtcataagttctttacatattacttgtgccatatcttcttcaccctaaacatagctctttctttataatatttgtgatgatggaaacaaaagccttggaacaattgcactttaagtattacacagaagtaaaagaactacagaaaatgtacagcaagacaagtgcccggaagttcactgatccttcagaaggaaatgcgctttactgattgcaaagccttcagaatattggagtgtggtgtgtttgctcatctgatgctttttagttcagttacatgtaacatcacatttttttatcacgtgaaagatgttagatttgtttgcttataaattttttaccactcccacataaaatgctcatagtttgggagaggaaagagggaagattctctcttcttttaacagagagatgattgctctgtatacccattgcttcctccctgaggctgtcccaaagtgaacactgatggagtggtcaaaatcataaggttgtagcaagccaaagatacgtatgtgacagaagcacataagcaataagcagaaaaccagaagtgcatgctgtgatgcctgtgactccttcatcccgctcagtgccatgtcctcttttgtgatcttccagaaagctccaggattcatttgagttccacatccaagtaacagatgaattatattcatgttgtaatgcattttgtggagtttacaaaaccagtgtctgttaaaactttggaaaatgtcttagaaaacgttggtgcttggtgatgctttatttgtttaattatcaagaacaaattatggcaatgctagtttctgcttaaccaaaatactctgtgtatatattatacatatataaatacatgggattgtgtatgtctatatgtgtttaaagcttactatgtcttcattttggcttccatgactatcttttatacatggaattccttaagattgagaatatgtcactgagtgaatgatacctgcagacagtcagttgatatatgtagagttcagaatgactgttttctcatgtgcctttggccannnnnnnnnnnnnnnnnnnnnnnnnnnnnnnnnnnnnnnnnnnnnnnnnnnataatgactgagtctcccaccagaccgattacatcattctcttgtggcgggacccaagtagaattgccttttcttttaaagttctccagatggagctaatatgcaacaaagttgaaaaccactgatcctgggggtgtcttgttaattttgaagtaaaagtgtacagaagacgtagtgtatgagaaagggccatttttaagacagttacctgttgtgctgctgttacaatatataatgaaaccaagtcaggggagtgaatttatcaatcttttgatgtaaagtaaaaacgtagttcacacttcaggagagaacttcatagcacaatgtctttctataagatannnnnnnnnnnnnnnnnnnnnnnnnnnnnnnnnnnnnnnnnnnnnnnnnnnnnnnnnnnnctatctgcccagttttattaaaaaaactatatattattttctaaagaaacaatcatatttttatacaaaattatgttttcaggtaacgaaatagatgtagggtacagtggaacataagcagtgttacccctggctgggagtcagtattatacaacaaatggtgagctggaacatgccctgtctgtgctgtccctcctgtgctgggtcgcggatgtgtaggcaacattgccttatcacgctaggttcacctgacactttaaaaggaaaaaaagttccatagagttctgtggtcacaaaattgttttgcttttatcaaatactttaatagaaccaaagttgcagatattggaatgtatggaagtatctcagtctctgcataagaggattaaagtatgaaaggatcatttaatgactgttttacttataagtcattaagtaatccaccatttcttatggatgatgcttaagcctggtgaggtttgtactctaaggagcccagatcataatgcagtgcatttccttagcccttagagtttcttgcaaacatt

SEQ ID NO: 186565 - DNA, 2124 bp, Homo Sapiens
  misc_feature (1299)..(1352): n is a, c, g, or t
actttgtacaaaaaagttggacgaagatgaagcagctgctcagccagggccctcccacccactccccaatgcggcctcacctggggcagaagcccctagctcctctgagcctcatggggccagaggaagcagtagttcgggcggcaagaaatgctacaagctggagaatgagaagctgttcgaagagttccttgaactttgtaagatgcagacagcagaccaccctgaggtggtcccattcctctataaccggcagcaacgtgcccactctctgtttttggcctcggcggagttctgcaacatcctctctagggtcctgtctcgggcccggagccggccagccaagctctatgtctacatcaatgagctctgcactgttctcaaggcccactcagccaaaaagaagctgaacttggcccctgccgccaccacctccaatgagccctctgggaataaccctcccacacacctctccttggaccccacaaatgctgaaaacactgcctctcagtctccaaggacccgtggttcccggcggcagatccagcgtttggagcagctgctggcgctctatgtggcagagatccggcggctgcaggaaaaggagttggatctctcagaattggatgacccagactccgcatacctgcaggaggcacggttgaagcgtaagctgatccgcctctttgggcgactatgtgagctgaaagactgctcttcactgaccggccgtgtcatagagcagcgcatcccctaccgtggcacccgctacccagaggttaacaggcgcattgagcggctcatcaacaagccagggcctgataccttccctgactatggggatgtgcttcgggctgtagagaaggcagctgcccgacacagccttggcctcccccgacagcagctccagctcatggctcaggatgccttccgagatgtgggcatcaggttacaggagcgacgtcacctcgatctcatctacaactttggctgccacctcacagatgactataggccaggcgttgaccctgcactatcagatcctgtgttggcccggcgccttcgggaaaaccggagtttggccatgagtcggctggatgaggtcatctccaaatacgcaatgttgcaagacaaaagtgaggagggcgagagaaaaaagagaagagctcggctccaaggcacctcttcccactctgcagacacccccgaagcctccttggattctggtgagggccctagtggaatggcatcccaggggtgcccttctgcctccagagctgagacagatgacgaagacgnnnnnnnnnnnnnnnnnnnnnnnnnnnnnnnnnnnnnnnnnnnnnnnnnnnnnnccacagattctgaagaggaggaggatctggaacagatgcaggagggtcaggaggatgatgaagaggaggacgaagaggaagaagcagcagcaggtaaagatggagacaagagccccatgtcctcactacagatctccaatgaaaagaacctggaacctggcaaacagatcagcagatcttcaggggagcagcaaaacaaaggacgcatagtgtcaccatcgttactgtcagaagaacccctggccccctccagcatagatgctgaaagcaatggagaacagcctgaggagctgaccctggaggaagaaagccctgtgtctcagctctttgagctagagattgaagctttgcccctggataccccttcctctgtggagacggacatttcctcttccaggaagcaatcagaggagcccttcaccactgtcttagagaatggagcaggcatggtctcttctacttccttcaatggaggcgtctctcctcacaactggggagattctggtcccccctgcaaaaaatctcggaaggagaagaagcaaacaggatcagggccattaggaaacagctatgtggaaaggcaaaggtcagtgcatgagaagaatgggaaaaagatatgtaccctgcccagcccaccttccccttggcttccttggccccagttgctgattcctccacgagggtggactctcccagccatggccctggtgaccagctccctctgcatcccttctccagcccggctgtcccaaacccccccattcacagcctc

SEQ ID NO: 186566 - DNA, 1013 bp, Homo Sapiens
catggagacacatggtggcgctacaggataagacgaaaacagtacataggctggcacggtgagcttcgctattcaggagaacagaaagcatccaacccactgaaaagacaggcattaaaggagcttcgcctacagagctgctggaggatacactctccagggggttcctgttaaaaaccagagcttcagcttccaaaattacggctgagcttcagttttttccacaagagattgcctaaaggaaccatggagatcagaggggcactcgatctgcgaaaaaggcaagttctaatattccttgttttgctgggattgtctcgggcaggtactgaatctgcacactattctgtggcagaggaaacagaaattggctcttttgtggctaatctagcgagggacctagggctgggggtggaggagctgtcttcacgtgaagcccgggtagtgtctgatgataataaaaagtatttgcaccttgatttgctgactgggaatttgctcctaaatgagaaactagaccgagacgagctgtgtggctccaccgagccctgtgtgctgcattttcaggtggttttggaaaaccctttacagttttttcggtttgagctgtgtgtcaaagacataaatgatcactcccctacatttctagacaaggaaatacttattaaaatatcagaaggtaccactgttggagctacctttctaatggagagtgctcaagatttggatgtcggaagcaacagtctccaaaactacacaattagccccaattctcacttctacattaaaattcccgacagtagtgacagaaagatatacccagagctggtcctagatagagctttagattatgaacaggaagctgaactcagattaacactcacagcagtggatggtggatccccgcccaagtctgggacaactttggttctcatcaagtgttggacatcaatgataatgcccctgagtttcctcagagtctctatgagtgcaagtccccgaggacagacccc

SEQ ID NO: 186567 - DNA, 980 bp, Homo Sapiens
ttggccgagtgtttcctggcgcattcccggccagcccgagtgactcactcggccaaggaaactcccagggcccgcccaggacccccaagccgccgcggacgcagcccaggatggcggcccaggtgactctggaggacgcgctgtccaacgtggacctcctggaggagctgcccctgcccgaccagcagccctgcatcgagcccccgccatcctcgctgctctaccagccaaatttcaacactaactttgaagacagaaatgcatttgttactggcatcgcaagatacattgaacaagccaccgtccactctagcatgaacgagatgctggaggagggccaagaatatgctgtcatgctgtacacctggaggagctgctcccgggccatcccacaggtgaaatgtaacgagcagcctaacagagtggaaatctacgagaaaaccgtggaggttctggagcctgaggtcacaaaactgatgaatttcatgtacttccagagaaatgccattgagcgtttctgcggggaagtgaggcgcctgtgccatgccgagaggaggaaggacttcgtgtcagaagcctacctgatcacactgggcaaattcatcaacatgttcgctgtgctggacgagctgaagaacatgaagtgcagtgtgaagaacgaccactcagcgtacaagagggccgctcagtttttacgtaaaatggcagatccacagtccatccaggaatcgcagaatctgtccatgttcctggccaatcataacaagatcacacagtctctgcagcagcagctcgaagtgatttctggctacgaagagctcctggcagatattgtgaatctgtgtgtggattactacgagaacaggatgtatttgacgcccagtgagaaacacatgcttctcaaagtcatgggatttggtctgtacctgatggatgggagtgtcagtaacatctataagttggatgccagaaaagaataa

SEQ ID NO: 186568 - DNA, 675 bp, Homo Sapiens
ttggcgcccgaccgtgctctttatttttcggtggagcagctctgctttctcaggtctctacttacttatataagatggcatcaagaagaaggacctgaccactggcccctgactacatggtctttggaacccgtggcattggaagatgtcagagacatggcacatggatgtgatcttcaaaaactgttacagcctcatctcattggattggtctacacatcaaggtgctggaagtgtcgcatgcccagagatgatgtggaagctctatacccctttcccttctgcccaccttgccctgtgcatctcttcctgaatggcttctcctgaattgtatcctttataataaactggtaaataggaaagagataatatcttctacttaatcctggatactatatctgaagtcagagcatccactccaaagcagagaatttctgaaaaacaaaataatgtcatcatatgatgttagaattttttttcaaatgatggttcctaatacttcacattagaagaactcgaatttgatgaccagtttgagaaacaccagtatatccagattacaagaaaaagcgagtcaaaaggatgatcatgaatataacaacttcgaggaaacatttaaccaaagaccaaagctttttaaacaactgagagtttttataagaaaaagacctcata

SEQ ID NO: 186569 - DNA, 1718 bp, Homo Sapiens
  misc_feature (1557)..(1570): n is a, c, g, or t
ttgggtgttgtcgtccctgctagtactccgggctgtgggggtcggtgcggatattcagtcatgaaatcagggtagggacttctcccgcagcgacgcggctggcaagactgtttgtgttgcgggggccggacttcaaggtgattttacaacgagatgctgctctccatagggatgctcatgctgtcagccacacaagtctacaccatcttgactgtccagctctttgcattcttaaacctactgcctgtagaagcagacattttagcatataactttgaaaatgcatctcagacatttgatgacctccctgcaagatttggttatagacttccagctgaaggtttaaagggttttttgattaactcaaaaccagagaatgcctgtgaacccatagtgcctccaccagtaaaagacaattcatctggcactttcatcgtgttaattagaagacttgattgtaattttgatataaaggttttaaatgcacagagagcaggatacaaggcagccatagttcacaatgttgattctgatgacctcattagcatgggatccaacgacattgaggtactaaagaaaattgacattccatctgtctttattggtgaatcatcagctaattctctgaaagatgaattcacatatgaaaaagggggccaccttatcttagttccagaatttagtcttcctttggaatactacctaattcccttccttatcatagtgggcatctgtctcatcttgatagtcattttcatgatcacaaaatttgtccaggatagacatagagctagaagaaacagacttcgtaaagatcaacttaagaaacttcctgtacataaattcaagaaaggagatgagtatgatgtatgtgccatttgtttggatgagtatgaagatggagacaaactcagaatccttccctgttcccatgcttatcattgcaagtgtgtagacccttggctaactaaaaccaaaaaaacctgtccagtgtgcaagcaaaaagttgttccttctcaaggcgattcagactctgacacagacagtagtcaagaagaaaatgaagtgacagaacatacccctttactgagacctttagcttctgtcagtgcccagtcatttggggctttatcggaatcccgctcacatcagaacatgacagaatcttcagactatgaggaagacgacaatgaagatactgacagtagtgatgcagaaaatgaaattaatgaacatgatgtcgtggtccagttgcagcctaatggtgaacgggattacaacatagcaaatactgtttgactttcagaagatgattggtttatttccctttaaaatgattaggtatatactgtaatttgattttttgctcccttcaaagatttctgtagaaataacttattttttagtattctacagtttaatcaaattactgaaacaggacttttgatctggtatttatctgccaagaatatacttcattcactaataatagactggtgctgtaactcaagcatcaattcagctcttcttttggaatgaaagtatagccaaaacatnnnnnnnnnnnnnntcctcagtatagcttgcaattaagacctagatcacagtatttaagtgttttgcgttttatacatgaggtcagtgctacagccacctagcatgaactaacccagcttccacctccataaagttacctagagttgttgagttggaatatg

SEQ ID NO: 186570 - DNA, 1308 bp, Homo Sapiens
  misc_feature (227)..(239): n is a, c, g, or t
ttggctaaaagggccgtgactcaaggtgcaaggcccctccctgccctgcccacccttcctgctctctggggaaccccatggggtcaccatgcccacccagctgtcccctcctcttccctagcaaaccactgatgaccgcctggcaggggccagcctgtcggtgctctgggccttgcagctgtttctgtagggttagcggtggtgccggggtcactttctgaatctcnnnnnnnnnnnnncaaaaaggaaagtttttaatggaaagttgagccagaactaaaccagggagctgtctgaaatcatagcaccccatccgggtggcggggagatcaactccgagctgtttttccgaggcagtgaggaacggtgccggctctgcacggagctgaggacaggacagaccttgctttgagaaggagctgccggccggggccacgctccacagccgccgcgcgacagtggagccaagggttagggcaccaggaggggccaggtggcgtcggcagcatctgtccccagaatcaggcagaatccacttcccaaacagagccccacgcaggttcaccatgaacctcagggtcagggaatgagccaggcacgggggcatgggcagagagggccacggggcagggcccactgagggaacatcagtggccctccagtcaggttctgtgggtttggaagcccatcgtgaaaggggctgacctttgcccctttttacttggcattggttttgaaaccagctgtttcccaaactctgcttcccaagggcaaccgttgctgttcacacgctcagcctgtctgggggagcgggcctctagcttcagccagggcgggtacacaccctgggcacagggtcctcagcccccgggaaatgagctcccagggctggcgtcccaccttccaggtgggggctggcacatcacagactgtcgagagcgccatgtcccagggcatgcagaggatgcacctagagacgttgcagcaagtggacaagtggccgctgtgcgggcccctcgcttgtagtgagctgttgcagcttacggtccgttccctggaggggtggaggaaggaggtgttgggcagcatcaaaggtgctgggacatcccagggtggtgagatccatccacgatccagctccggtggagaaagggcccatgtcaagccttgttctgcaccccaagcattggtggtaggactgggtcctggctgatcgtccttgttcccagtggggtacatgtgagcccctgccagggccaagtccttctcccgaacccagggtcctgggaactgcagatcccgggggga

SEQ ID NO: 186571 - DNA, 2500 bp, Homo Sapiens
  misc_feature (1841)..(1850): n is a, c, g, or t
tttgtacaaaaaagttggcccagggaacagcccctcttggcaatgcactgggtggagaggccagccaaggcacccagggaacagcacgtcttggcaatgcactgggcatgattggggttgctggaggactggcagccaccttcggagtcctaaaaccgggcccagaattactagctcagatgtctggagcgatggctttgggtggtaccattggattgacaattgccaaacgcatccagatttctgatttacctcaattagttgctgcttttcacagtttagtgggtttggcagctgtacttacttgcatagctgagtacattatagaatatccacattttgctacggatgcagcagcaaatctcaccaagattgtggcctacctcggcacttacattggtggcgtcacctttagtgggtctctcattgcctatggaaaattgcagggtctcctgaaatctgcccctctcctactgcctggaaggcacttactcaatgcaggcttactggctgctagtgtgggcgggataatcccattcatggtggacccaagctttactactggcatcacctgtctgggttcagtgtctgctctctctgctgtcatgggtgtgactttgacagctgctattgggggtgctgacatgcccgtcgttatcactgtgctgaacagctactcaggctgggccctgtgtgcagagggcttcctgctcaacaacaatctgctgaccatcgtgggtgcactcataggctcgtctggtgctatcctgtcatacatcatgtgtgtggcaatgaatcgctccctggctaatgtgattcttggaggctatggcaccacttcaacagctggtggaaaacccatggaaatttctggcacacatacggaaatcaaccttgacaatgcaattgacatgattcgagaagctaatagcattattattacaccaggctatggtctctgtgcagccaaagctcaataccccattgctgatttggtaaagatgctcactgagcaaggcaaaaaagtcaggtttggaattcacccagttgcaggccgaatgcctggtcagcttaatgtgctgctggctgaggctggtgtgccatatgacattgtgttggaaatggatgagatcaaccatgattttccagatactgatttggtccttgtaattggagctaatgacactgttaattcagcagctcaagaagatcccaactctattattgcaggcatgccagtccttgaggtctggaaatcaaagcaggtgattgttatgaagaggtctttgggtgttggctatgctgcagtggacaatccaatcttctacaaacctaacacggccatgcttctaggtgatgccaagaaaacatgtgacgcgctccaggcgaaagttagagaatcctatcagaagtaaatattaaggatcaagctgttagctaataatgccacctctgcagttttggaaacaggcaaataaagtatcagtatacatggtgatgtacatctgtagcaaagctcttggagaaaatgaagactgaagaaagcaaagcaaaaactgtatagagagatttttcaaaagcagtaatccctcaattttaaaaaaaggattgaaaattctaaatgtctttctgtgcatattttttgtgttaggaatcaaaagtattttataaaaggagaaagaacagcctcattttagatgtagtcctgttggattttttatgcctcctcagtaaccagaaatgttttaaaaaactaagtgtttaggatttcaagacaacattatacatggctctgaaatatctgacacaatgtaaacattgcaggcacctgcattttatgnnnnnnnnnncaacaaatgtgactaatttgaaacttttatgaacttctgagctgtccccttgcaattcaaccgcagtttgaattaatcatatcaaatcagttttaattttttaaattgtacttcagagtctatatttcaagggcacattttctcactactattttaatacattaaagggctaaataatctttcagagatgctggaaacaaatcatttgctttatatgtttcattagaataccaatgaaacatacaacttgaaaattagtaatagtatttttgaagatcccatttctaattggagatctctttaatttcgatcaacttataatgtgtagtactatattaagtgcacttgagtggaattcaacatttgactaataaaatgagttcatcatgttggcaagtgatgtggcaattatctctggtgacaaaagagtaaaatcaaatatttctgcctgttacaaatatcaaggaagacctgctactatgaaatagatgacattaatctgtcttcactgtttataatacggatggattttttttcaaatcagtgtgtgttttgaggtcttatgtaattgatgacatttgagagaaatggtggctttttttagctacctctttgttcatttaagcaccagtaaagatcatgtcttttta

SEQ ID NO: 186572 - DNA, 1289 bp, Homo Sapiens
  misc_feature (178)..(189): n is a, c, g, or t
ttggctaaaattggcacatgtaagtattgaagaaaatggttatataattcagttgaaactcttggttattagatgttaggcatctcctgtatgtaagacacaaggccaaccacaacacagaacgatgttgacctgttaagtattctctgaaacatggccaaaatgcattttatgagcnnnnnnnnnnnngctattgtaaatattagtggtttacaatgcgctttagacatatttctttaaaatgcaagcagtgagaaataagacctctctgaattagtagctctaaactgttaacatagaatgttacttggaaaaagtctggaatatgtggtgtacacaagcagtgcttcgtgaatgagtttcttagcttttatagtgcgccatgtttctcaaagtttgtttttgttgacaaaacattttataatatatatcttatgtttattttttttctcaactaattgtgtactgcactgtaaggtgaaaattagccatccattatttatcttctgtggcaatgcatttatatggttgattgggtggggaattttttgcagaaagatgcaaagtgattgggttttcgacttcctatcgcagggagcttttaagaaatattaatttcctatacatttttccaatccccatgcaaactgttcctgtttacataccttctctgttgtatcagtactttgagtgagaagacagtttatttaaaacttgagcaggctgttcagcattgtttctgcttctgaaatctgtatagtacactggtttgtaatcattatgtcttcattgaaatccttgctacttctcttcctcctcaatgaaatacattatatattatctttatgtactcttaagaaaaacgagcaaggaagagtatcttcattattctcattttctctgagttggaaacaaaaacatgaaggactccaactagaagacagatatttacatttaaatagattagtgggaaaactttaagagtttccacatattagttttcattttttgagtcaagagactgctccttgtactgggagacactagtagtatatgtttgtaatgttactttaaaattatctttttattttataaggcccataaatactggttaaactctgttaaaagtgggccttctatcttggatggtttcactgccatcagccatgctgatatattagaaatggcatccctatctacttactttaatgcttaaaattatacataaaatgctttatttagaaaacctacatgatacagtggtgtcagccttgccatgtatcagtttc

SEQ ID NO: 186573 - DNA, 1500 bp, Homo Sapiens
  misc_feature (1233)..(1265): n is a, c, g, or t
ctttgtacaaaaaagttggattgtgtactgcactgtaaggtgaaaattagccatccattatttatcttctgtggcaatgcatttatatggttgattgggtggggaattttttgcagaaagatgcaaagtgattgggttttcgacttcctatcgcagggagcttttaagaaatattaatttcctatacatttttccaatccccatgcaaactgttcctgtttacataccttctctgttgtatcagtactttgagtgagaagacagtttatttaaaacttgagcaggctgttcagcattttttctgcttctgaaatctgtatagtacactggtttgtaatcattatgtcttcattgaaatccttgctacttctcttcctcctcaatgaaatacattatatattatctttatgtactcttaagaaaaacgagcaaggaagagtatcttcattattctcattttctctgagttggaaacaaaaacatgaaggactccaactagaagacagatatttacatttaaatagattagtgggaaaactttaagagtttccacatattagttttcattttttgagtcaagagactgctccttgtactgggagacactagtagtatatgtttgtaatgttactttaaaattatctttttattttataaggcccataaatactggttaaactctgttaaaagtgggccttctatcttggatggtttcactgccatcagccatgctgatatattagaaatggcatccctatctacttactttaatgcttaaaattatacataaaatgctttatttagaaaacctacatgatacagtggtgtcagccttgccatgtatcagtttcacttgaaatttgagaccaattaaatttcaactgtttagggtggagaaagaggtactggaaaacatgcagatgaggatatcttttatgtgcaacagtatcctttgcatgggaggagagttactcttgaaaggcaggcagcttaagtggacaatgttttgtatatagttgagaattttacgacacttttaaaaattgtgtaattgttaaatgtccagttttgctctgttttgcctgaagttttagtatttgttttctaggtggacctctgaaaaccaaaccagtacctggggaggttagatgtgtgtttcaggcttggagtgtatgagtggttttgcttgtattttcctccagagattttgaactttaataattgcgtgtgtgnnnnnnnnnnnnnnnnnnnnnnnnnnnnnnnnnctcaagtaaaattgtgaacatatttcctttataggggcagggcatgagttagggagactgaagagtattgtagactgtacatgtgcccttcttaatgtgtttctcgacacattttttttcagtaacttgaaaattcaaaaagggacatttggtttaggttactgtacatcaatctatgcataaatggcagcttgttttcttgaaccacggtctaaatttgtttttatagaaattt

SEQ ID NO: 186574 - DNA, 388 bp, Homo Sapiens
  misc_feature (90)..(142): n is a, c, g, or t
ttgggtgcaaataaaagcactgctactataagacattctggaatggttgtttaataagggtattatccatttgatctatagcaatgtgannnnnnnnnnnnnnnnnnnnnnnnnnnnnnnnnnnnnnnnnnnnnnnnnnnnngcttaagcacttcatcaattgctttattctgtatctgcgaagtaatctgcaatctcttttgttctttttaaaatttgatttgttataaaattgccaaatagaagtgtttcagatacatagtttgtacctgtatttttattttattgcctcatgttcttgtaagtcattcttaattgaccaatgattgtagaccttgcttgagtattttttctaataaaacaaagcaaatcacatttaaaaaatttt

SEQ ID NO: 186575 - DNA, 2093 bp, Homo Sapiens
  misc_feature (237)..(256): n is a, c, g, or t
  misc_feature (457)..(471): n is a, c, g, or t
  misc_feature (1984)..(2010): n is a, c, g, or t
ttggggaagggacacagtgttgtttttcatagtactgtaatagctaagagaaaagaagattctgggaagatcaaacttttgcttcattggatgcctgaagacataacaatgccgcagaagaggttgaagaggtaaaaaataaataaatacataaaaagcaaacaagcggggacacctgcagtcttagtcactgacaatgggtttagggaaagttgcacattagagtcaaccccttcnnnnnnnnnnnnnnnnnnnnaaatccagtatttaggataatatttatgcttagtgtaaacattctgtgaatgaagtaaactcttcggtggaatatattaatatattactgtatatccacattttcatggaatggtactgtgggagactgagcaaacactcttttggcaacttagtaaaacagcttcttaaaggctttgcatgcttgctgctttaagctgcnnnnnnnnnnnnnnncttccctttagtgatttcagtagtttatattggaaagaaaaacaattacaacatgtgcccttacaaataccaaaagcactgtaaggatatttgtcttgacagtgtttattgatttgaagtcatattaggaaatatttagacaatgaaaattatcaagagataatttacctttcaattatgataaatagatgtgattggttgccatttgtgttcttttgcagaactctgataagaaaagtgttcaatttgtatttaagcaaacagtgaacgacgtttgcaatcaactaaaaattcgtctatcgaattagggctgaaaattactgttaaagagtgttgcagtatgtctggtggctcccttttcaggactagggctttctcatggagtacagtatgttaatatttacctatataactaatctgttaacggtttttgaaaaacctttcaaattatttgaataatcttcatattttcatttaacctatatgactctaattttttttctgaggaaatcatttggtttttgagttgttttttcttaatgtaagaaaaattgtattttttttacaagtatcttcaaactgaatcttttatgcaccaaagttggtcttgaaaaggaaaataaaatcactttcttgcttggtaagcaagaagccatatcgattttttttaacttacagaaatggaaatatgtgtaacttgttagtattgtattaaacaaatgttgcatagagataatagaacattgcttgtaaataattcagcagatttgtaatatatttttatattttgaaatgtactgtagatgttttctagaggcatgaaagttaaatgtatatattatggtagaaataatattgaaggatattgtacttcactagtgctgccagaggaattgttaataaaagcaccttctttaacaataaatgtctttcacagacttaagggactatgtactactgttaatatctctaagaacaaaacacattgaacatccttccagaaagtctttgagggaggacctatacccataatagaattatggcactcatttctgacagtgatcaagaaatcagttatttccttactgttggaaggacattgtaaagtatgtggttatatgcagtgaaactgcagaaaatactcctggttgaggagttttcactttactacagtgatataaaaaccagcagtttttacactaaattttttaaagaaatattagacaaaaatatagaattaaaacctttggttccaaaatgggaaaggttccacgatacataaatcatttctcatttgctttaaaaaatttaaaagtgtaaaaattatgagagactttattcgttaacaatgggggtaaagagctatatacatgaaaatgagtcttataaaattaagtgaagtgcaaataaaagcactgctactataagacattctggaatggttgtttaataaagggtattatccatttgatctatagcaatgtgattttatttttaaaaagaaaagcagtgnnnnnnnnnnnnnnnnnnnnnnnnnnngcttaagcacttcatcaattgctttattctgtatctgcgaagtaatctgcaatctcttttgttctttttaaaatttgatttgt

SEQ ID NO: 186576 - DNA, 1774 bp, Homo Sapiens
  misc_feature (251)..(301): n is a, c, g, or t
  misc_feature (955)..(970): n is a, c, g, or t
ttggggaaatgcagctattgaggtcttcgaatgctgcggagctggaggcggaggcagctggggaggtccgagcgatgtgaccaggccgccatcgctcgtctcttcctctctcctgccgcctcctgtctcgaaaataacttttttagtctaaagaaagaaagacaaaagtagtcgttcgcccctcacgccctctcttcctctcagccttccgcccggtgaggaagcccggggtggctgctccgccgtcgggnnnnnnnnnnnnnnnnnnnnnnnnnnnnnnnnnnnnnnnnnnnnnnnnnnnatgcatcccttctacacccgggccgccaccatgataggcgagatcgccgccgccgtgtccttcatctccaagtttctccgcaccaaggggctcacgagcgagcgacagctgcagaccttcagccagagcctgcaggagctgctggcagaacattataaacatcactggttcccagaaaagccatgcaagggatcgggttaccgttgtattcgcatcaaccataaaatggatcctctgattggacaggcagcacagcggattggactgagcagtcaggagctgttcaggcttctcccaagtgaactcacactctgggttgacccctatgaagtgtcctacagaattggagaggatggctccatctgtgtgctgtatgaagcctcaccagcaggaggtagcactcaaaacagcaccaacgtgcaaatggtagacagccgaatcagctgtaaggaggaacttctcttgggcagaaacgagctcttccaaaaactacaatatgatgactgtatcaggttaagatatagtctgtgggatggatcatctgatgatgatggataaatttgatttttgctttgggtgggctcctcttggggatggattatggaatttaaaccatgtcacagctgtgaagatctggcacaagatagaatggtnnnnnnnnnnnnnnnnttttaagtgacagtgccatagtttggacagtacctttcaatgattaattttaatagcctgtgagtccaagtaaatgatcactttatttgctagggagggaagtcctagggtggtttcagtttctcccagacatacctaaatttttacatcaatccttttaaagaaaatctgtatttcaaagaatctttctctgcagtaaatctcgcaggggaatttgcactattacacttgaaagttgttattgttaaccttttcggcagcttttaataggaaagttaaacgttttaaacatggtagtactggaaattttacaagacttttacctagcacttaaatatgtataaatgtacataaagacaaactagtaagcatgacctggggaaatggtcagaccttgtattgtgtttttggccttgaaagtagcaagtgaccagaatctgccatggcaacaggctttaaaaaagacccttaaaaagacactgtctcaactgtggtgttagcaccagccagctctctgtacatttgctagcttgtagttttctaagactgagtaaacttcttatttttagaaagtggaggtctggtttgtaactttccttgtacttaattgggtaaaagtcttttccacaaaccaccatctattttgtgaactttgttagtcatcttttatttggtaaattatgaactggtgtaaatttgtacagttcatgtatattgattgtggcaaagttgtacagatttctatattttggatgagaaatttttcttctctctataataaatcgtttcttatcttggcatttt

SEQ ID NO: 186577 - DNA, 1374 bp, Homo Sapiens
  misc_feature (476)..(490): n is a, c, g, or t
  misc_feature (1081)..(1142): n is a, c, g, or t
tttttaagtgttttttataaagcctgttgccatgacagattctggtcccttagtactttcaaggccaaaaacacaatacaaggtctgaccatttccccaggtcatgcttactagtttgtctttatgtacatttatacatatttaagtggtaggtaaaagtcttgtaaaatttccagtactaccatgtttaaaacgtttaactttcctattaaaaggggccgaaaaggttaacaataacaactttcaagtgtaatagtgcaaattcccctgcgagatttactgcagagaaagattctttgaaatacagattttctttaaaaggattgatgtaaaaatttaggtatgtctgggagaaactgaaaccaccctaggacttccctccctagcaaataaagtgatcatttacttggactcacaggctattaaaattaatcattgaaaggtactgtccaaaatatggcactgtcacttaaaannnnnnnnnnnnnnnaccattctatcttgtgccagatcttcacagctgtgacatggtttaaattccataatccatcccacagactatatcttaacctgatacagtcatcatattgtagtttttggaagggctcgttctgcccaagagaagttcctcttacagctgattcggctgtctaccatttgcacgttggtgctgttttgagtgctacctcctgctggtgaggcttcatacagcacacagatggagccatcctctccaattctgtaggacacttcataggggtcaacccagagtgtgagttcacttgggagaagcctgaacagctcctgactgctcagtccaatccgctgtgctgcctgtccaatcagaggatccattttatggttgatgcgaatacaacggtaacccgatcccttgcatggcttttctgggaaccagtgatgtttataatgttctgccagcagctcctgcaggctctggctgaaggtctgcagctgtcgctcgctcgtgagccccttggtgcggagaaacttggagatgaaggacacggcggcggcgatctcgcctatcatggtggcggcccgggtgtagaagggatgcatnnnnnnnnnnnnnnnnnnnnnnnnnnnnnnnnnnnnnnnnnnnnnnnnnnnnnnnnnnnnnnagcagccaccccgggcttcctcaccgggcggaaggctgagaggaagagagggcgtgaggggcggacgactacttttgtctttctttctttagactaaaaaagttattttcgagacaggaggcggcaggagagaggaagagacgagcgatggcggcctggtcacatcgctcggacctccccagctgcctccgcctccagctccgcagcattcgaagatctcaatagctgccaa

SEQ ID NO: 186578 - DNA, 1726 bp, Homo Sapiens
  misc_feature (217)..(296): n is a, c, g, or t
  misc_feature (948)..(962): n is a, c, g, or t
ttggtgcagctattgaggtcttcgaatgctgcggagctggaggcggaggcagctggggaggtccgagcgatgtgaccaggccgccatcgctcgtctcttcctctctcctgccgcctcctgtctcgaaaataacttttttagtctaaagaaagaaagacaaaagtagtcgtccgcccctcacgccctctcttcctctcagccttccgcccggtgaggnnnnnnnnnnnnnnnnnnnnnnnnnnnnnnnnnnnnnnnnnnnnnnnnnnnnnnnnnnnnnnnnnnnnnnnnnnnnnnnnatgcatcccttctacacccgggccgccaccatgataggcgagatcgccgccgccgtgtccttcatctccaagtttctccgcaccaaggggctcacgagcgagcgacagctgcagaccttcagccagagcctgcaggagctgctggcagaacattataaacatcactggttcccagaaaagccatgcaagggatcgggttaccgttgtattcgcatcaaccataaaatggatcctctgattggacaggcagcacagcggattggactgagcagtcaggagctgttcaggcttctcccaagtgaactcacactctgggttgacccctatgaagtgtcctacagaattggagaggatggctccatctgtgtgctgtatgaagcctcaccagcaggaggtagcactcaaaacagcaccaacgtgcaaatggtagacagccgaatcagctgtaaggaggaacttctcttgggcagaacgagcccttccaaaaactacaatatgatgactgtatcaagttaagatatagtctgtggatggatcatctgatgatgatggataaatttgatttttgctttgggtgggctcctcttggggatggattatggaatttaaaccatgtcacagctgtgaagatctggcacaagatagaatggtnnnnnnnnnnnnnnnttttaagtgacagtgccatagtttggacagtacctttcaatgattaattttaatagcctgtgagtccaagtaaatgatcactttatttgctagggagggaagtcctagggtggtttcagtttctcccagacatacctaaatttttacatcaatccttttaaagaaaatctgtatttcaaagaatctttctctgcagtaaatctcgcaggggaatttgcactattacacttgaaagttgttattgttaaccttttcggcagcttttaataggaaagttaaacgttttaaacatggtagtactggaaattttacaagacttttacctagcacttaaatatgtataaatgtacataaagacaaactagtaagcatgacctggggaaatggtcagaccttgtattgtgtttttggccttgaaagtagcaagtgaccagaatctgccatggcaacaggctttaaaaaagacccttaaaaagacactgtctcaactgtggtgttagcaccagccagctctctgtacatttgctagcttgtagttttctaagactgagtaaacttcttatttttagaaagtggaggtctggttttgtaactttccttgtactaatttgggtaaaagtcttttccacaaaccaccatctattttgtgaactttgttaatcatcttttatttggtaaattatgaactggtgtaatttgtacagtcatgtatattgattgtggcaaagttgtaaaattctatattttggatgaaaaatttttct

SEQ ID NO: 186579 - DNA, 1548 bp, Homo Sapiens
  misc_feature (1192)..(1264): n is a, c, g, or t
aaatagccatatcaggtagctagtgacataataccagttgtgaaattcagacaaaatgagtcgacaaatccccaaaaatggcaaattaagccctgtgacaaaataagttattggatcatacagaaatagcccaaatctggaaattttgaattaaaattgtaatcctgtaaaacaagttttggggtgaatggatttctttaataccaataatatttttaattcccaccacagatggatttgctgaatatgctaatgctgtgaatgagaaaacaatttggggtaggtatacccacaagtaatctgatgacaaaataaaccacagactgatgtcaaatggacaaaaaactgaaaatatgctgtgagaaatagacaaccaaaataatatagggggttgtggggtgtggcacagttaaggcatctaaacaaaaattccacatggctttggcttattaaaatattttacactatttttttaaaaaaagatttgaaagcatctgaaaaacatgcaaattgtttgaaaaccttgcatggcaaattcagacagtttgcaagcgtcaatcagatgtttgacgaggaaacgaaagaagcctctccccatgagactgcacatggtgggagaggcctacccagttctctctatcttacactagatggcaacccagaggtctgtgcagcggttacaaacaaggcattattatccggaagggaagggactgtagaatttccattggctggggaacaacccagctttagcttttccagatactctgcatgtacaggtttatgacactggagaactttgatagcatcttctactttgaaccactctctcttccttccaatattaacagaatcttcccaatcttctaatatttcagtgactgttagaacataaacatatgttctgtgctttcggtcttggttctcaaatatgcccagaagtctgcctagttttcctttgactccagcctcctcataaacttccctcacggcagcaccgccaggttcctcctcgggttccattcctcctcctgggacaatccactggtctgggtaccggctgctactcaccagcagcacctcgtcctcctgctcgctccggaagcacaggcacgccgcccgcttcttgaagccctcgcggtcgtaggtccgcgtctggttgggcttgaacttcatcatagaggcgggctcnnnnnnnnnnnnnnnnnnnnnnnnnnnnnnnnnnnnnnnnnnnnnnnnnnnnnnnnnnnnnnnnnnnnnnnnngagggcgagtcgggcgcaggagcgcccgggagcgctagtcggtgcgggaggtgcggcgaggccggtcagtcccggggccggcggccgctccgacgcgggcgggacgggacgctagcgcgggtcactggaaccagggtgccgagatgaaagctccgcctctgcccagttgtccgccgctctccatggagcccgactcccgctcgcctccgctccctccggccgtagccgccaggggaagggcggctagaggcgcgcgccacgcggagacagttgcgaagacccaa

SEQ ID NO: 186580 - DNA, 1064 bp, Homo Sapiens
gagataacactcaaatagtgttctcttcttttgaaaattttatttttatctgaaaataacagttgatctgaaataaaaaggggagacctattagaatgagagtagccaaggaaagagttactaggtaataagcttcactttttgtgttctaattgtttttgagatataaagaccctgaaaaagcccattttagaacctgtttaataagagcaaatataggggaaaatctttgaaatgaaagctacaaatacatgtgagaagaaaaaaatggatttttttagcaaataattaactaagcttctaaattcctagctccctcccccaaaggcgctttcccccgatggaggcacaggcttctgtctcggatgtttggcgcacgtgagtttgtatgagtttgtgccggagtgaccccggcagccactgcccacctcccctctacccaggggcctgaaaagaggggctgccctcctgcgccaaggcagacacaagctgcgggctgtgcggtcctagtagtgtgacgtttcagttaatagtggtggtcttattttcaactatgctttcattcagtcagtctctgttgactaaatacgacgaaaattcatactttatgcaggagatttctaaaaatttaatgtttattaatagtttatgaatatcaagatacctcattgaatccctaaatttaaaagcagtccagtaaaaggttaactgtataaagaatctatgactttttgagggaagtgtgatatattaacaaatataaccaattctaaatttgttttagctctaacctcatcaaaccaaaggcacagatttgtgtacaatatacccattgaatgtatatcctgagaaaaattggggccaaagaagcaggaaaatctcaaagctctaatggcagcataaatcaaagaatttcacaggctagtgtttttatccatagccattgctcccttgtcaagtgtctcacaaggacatggaagaatgtgttatgttcatcttgtaatcatagcaaaaagtctgcaaccccagggtcaagcctgctctgccacagggttggatggtga

SEQ ID NO: 186581 - DNA, 2774 bp, Homo Sapiens
ttgggaaaggtgtttgacttgctaaacaggaaaacaaaattaagagttctagaagatggaaaacagcaggttcaagtggtgggattacaggaacgggaggtcaaatgtgttgaagatgtactgaaactcattgacataggcaacagttgcagaacatccggtcaaacatctgcaaatgcacattcatctcggagccatgcagtgtttcagattattcttagaaggaaaggaaaactacatggcaaattttctctcattgatttggctggaaatgaaagaggagctgatacttccagtgcggacaggcaaactaggcttgaaggtgctgaaattaataaaagccttttagcactcaaggagtgcatcagagccttaggtagaaataaacctcatactcctttccgtgcaagtaaactcactcaggtgttaagagattctttcataggtgaaaactctcgtacctgcatgattgccacaatctctccagggatggcatcctgtgaaaatactcttaatacattaagatatgcaaatagggtcaaagaattgactgtagatccaactgctgctggtgatgttcgtccaataatgcaccatccaccaaaccagattgatgacttagagacacagtggggtgtggggagttcccctcagagagatgatctaaaacttctttgtgaacaaaatgaagaagaagtctctccacagttgtttactttccacgaagctgtttcacaaatggtagaaatggaagaacaagttgtagaagatcacagggcagtgttccaggaatctattcggtggttagaagatgaaaaggccctcttagagatgactgaagaagtagattatgatgtcgattcatatgctacacaacttgaagctattcttgagcaaaaaatagacattttaactgaactgcgggataaagtgaaatctttccgtgcagctctacaagaggaggaacaagccagcaagcaaatcaacccgaagagaccccgtgccctttaaaccggcatttgctgctaaaggatacccagaaccctcactactgtaacatacaacggttcagctgtaagggccatttgaaagtttggaattttaagtgtctgtggaaaatgttttgtccttcacctgaattacatttcaattttgtgaaacactcttttgtctacaaaatgcttctagtccaggaggcacaaccaagaactgggattaatgaagcattttgtttcatttacacaaatagtgatttacttttggagatccttgtcagttttattttctatttgatgaagtaagactgtggactcaatccagagccagatagtagggggaagccacagcatttccttttaactcagttcaatttttgtagtgagactgagcagttttaaatcctttgcgtgcatgcatacctcatcagtgattgtacataccttgcccactcctagagacagctgtgctcaccttttcctgctttgtgccttgattaaggctactgaccctaaatttctgaagcacagccaagaaaaattacattccttgtcattgtaaattacctttgtgtgtacatttttactgtatttgagacattttttgtgtgtgactagttaattttgcaggatgtgccatatcattgaacggaactaaagtctgtgacagtggatatagctgctggaccattccatcttatatgtaaagaaatctggaattattattttaaaaccatataacatgtgattataatttttcttagcattttctttgtaaagaactacaatataaactagttggtgtataataaaaagtaatgaaattctgagaagagttttatcttaggaaaatacatatatatgcagtgtgtgtgccagtgtggtattaacaagactaatagtgcagtttgatccttaccaatatcattacttaatttgaagtgttcattagcaccccaaaatataccttttctatgtactgttaaaagaaattggcttctgatgcatgaacatttacatgtacattgaaagtagtccataatagaagttagtttaagccaagtgtagacagtacattactcccttgaaaaagaattaagttgaaagagttgactttgccttaaaaggcagatctaacccaagctccatccagtaccaaatgtgaaacttcattgttgtttggtgagaatcgccaaattctcactaatacattggtatggtgtagggcatgctactttttaaacagcagcacttatttttacagattgctactccaaggaagaaaactggccacttttcatgtaaatattttgttcaaagatttgtatatctctctaggagttttccctcagttcccaggatggggtccaggagtagattaacagctaaaaatctcccaaggatatcttgttttgatttatttactccagggaactatcagctccttcacaggagccaaaggggagctatgaatagagggtcacatgagccagattctttactgttcataaaacccagagagtagttgtgaaagatcctaatacaattgtgaaaagctctgtaaacatgaaatctaaaacaaatgtagattttcacaatatgcttattaataaatgaagtctatggaataaagttttagagataatttacttcagtcacctttgttttggaaaggactcaggttttcttgcagctgtaagatatattctatttgtgtttatttcaaagggaagaggaaggatggacaactgttacaatttgaccttgcaaaggatattt

SEQ ID NO: 186582 - DNA, 812 bp, Homo Sapiens
  misc_feature (293)..(301): n is a, c, g, or t
ttggcatcaagtatggtatgataaccctcagagtatttctttaaaggcaacatatatacaaaactatcgcttacggggcattggcatgtggaatgcaaactgtcttgactactctggagatgctgtagccaaacagcaaactgaagaaatgtgggaagtcttaaagccaaagctgttacagagatgaacatcttttgtcaaaccattaagagttagaaagatgatctgtatcaacagatctagtttcttgcatttttattatgttgctatatacttttgttatccgtatactnnnnnnnnngaataaataaatgttttgattgtttgaatttgaaaaatacacacgaatgtcctcagtatccaggaacataaaggcaagaagcaagtcaacttacctattaaatattcctctattagatgtttcaacactataatttaattgggaaaaattgctttcagaattttattatgccatatttcccttcattatagtaaaatatatgctcacgaatcaatgctgatttttaaaatatgtataatctgaagtggaaattgtttgcttagagtttttaaaaacctagtctttgaaaagcagtttgtgctatacttttcccccaaccctccaataaatcttaaatttaaaaacctacaatgtagtgtctcccctttaggttcatcaaactgatgaaaaataatttttctgcttcctgactccatatagtatttatgttctctgaggtacttgaactaaatcttttggacagtgagtgagacttaaaaagaatccagaagattaaatgtattcacaaaat

SEQ ID NO: 186583 - DNA, 1499 bp, Homo Sapiens
  misc_feature (1132)..(1143): n is a, c, g, or t
tgtacaaataggcgtgacaatggttggagaaggtatccttagtctgttggagcatggagaagagtacacattttctctaccctgtgcatatgctcggtcaattttgactgttccttgggtagaactgggtggcaaagtcagtgtcaactgtgcaaaaactggatattcagccagcatcacttttcataccaagccattttatggtggcaaactgcatcgggttacagctgaagtaaagcacaacatcaccaacactgtggtatgcagagtgcaaggggaatggaatagtgttcttgagttcacatatagcaatggagagacaaagtatgtggacttgactaaattggcagtgacgaagaaaagagtgagacctctggagaagcaggatccatttgaatccaggcgattgtggaaaaatgtgacagactcgctgagagaatctgaaattgataaggccacagagcataagcataccctggaagaacgtcagaggactgaagaaaggcatcgtactgaaacaggcacaccttggaaaaccaaatattttattaaagagggagatggctgggtttatcataaaccactttggaaaataattccaacaacacaaccagcagagtgacacatactatctaaaactcgaccaaatgaggttcttctctgtttaccctaaatcctcccagaatggagtcattgcactgagtgacctgcttcctgattgcgcagactgaaactagctaaacctgaatgtacctactagggcaccataatactgcagcaagaccaaagtggtaaagaaacacagtggaccttttaccaacctgttcatgtgatgtgagcaataccatcttaaaacttgttacctgaatcagtagatgaatcttttatccagttcttgctcctaaagttaagtttgaatcccctatttttgcacaggggcagcagatacacacaacaatgagaactcagtgactttgatttctttgtagtgaaaagtgaagtctccgtttcagagtttgtgtctttctttctgtccataactgaagtattcactactcttgtaaaccaaccaagaggaggagaaagatgacccagaagtggattcagccattgtgcctgaaatcagtgtttnnnnnnnnnnnntcaaccaggttgtggtaacaaggcattctatttcttcaaaaagactgtatgcctgtgtctgaggaacttacctattatccacctctgttggaactctcttttaaaaagtacatttatagattgatcagaattataaccatggagaattttttcttctgagcattttaatatacttgagaacaacattgacttgaaaatttcagaacatttttcagtacctagttttattaaatattacacttgagagacactttttaaaaatgtgttaatgtcaatatgatgagattttagcctttctccagactaggcattaaagaaaatagcaaatattaaaaaataaactgttactttttcct

SEQ ID NO: 186584 - DNA, 1858 bp, Homo Sapiens
ttggctttttgactacaattctcaacaacagctgttccaaagacctaatgcgcttgctgtccagcagttgacagctgctcagcagcagcagtatgcactggcagctgctcatcagccgcacatcggtttagctcccgctgcgtttgtccccaatccatacatcatcagcgctgctcccccagggacggacccctacacagctggattggctgcagcagcgacactaggcccagctgtggtccctcaccagtattatggagttactccctggggagtctaccctgccagtcttttccagcagcaagctgccgctgccgctgcagcaactaattcagctaatcaacagaccaccccacaggctcagcaaggacagcagcaggttctccgtggaggagccagccaacgtcctttgaccccaaaccagaaccagcagggacagcaaacggatccccttgtggcagctgcagcagtgaattctgcccttgcatttggacaaggtctggcagcaggcatgccaggttatccggtgttggctcctgctgcttactatgaccaaactggtgcccttgtagtgaatgcaggcgcgagaaatggtcttggagctcctgttcgacttgtagctcctgccccagtcatcattagttcctcagctgcacaagcagctgttgcagcagccgcagcttcagcaaatggagcagctggtggtcttgctggaacaacaaatggaccatttcgccctttaggaacacagcagcctcagccccagccccagcagcagcccaataacaacctggcatccagttctttctacggcaacaactctctgaacagcaattcacagagcagctccctcttctcccagggctctgcccagcctgccaacacatccttgggattcggaagtagcagttctctcggcgccaccctgggatccgcccttggagggtttggaacagcaggaggactcacgaacggcagtggaagatacatctctgctgctccaggcgctgaagccaagtaccgcagtgcaagcagcgcctccagcctcttcagcccgagcagcactcttttctcttcctctcgtttgcgatatggaatgtctgatgtcatgccttctggcaggagcaggcttttggaagattttcgaaacaaccggtaccccaatttacaactgcgggagattgctggacatataatggaattttcccaagaccagcatgggtccagattcattcagctgaaactggagcgtgccacaccagctgagcgccagcttgtcttcaatgaaatcctccaggctgcctaccaactcatggtggatgtgtttggtaattacgtcattcagaagttctttgaatttggcagtcttgaacagaagctggctttggcagaacggattcgaggccacgtcctgtcattggcactacagatgtatggctgccgtgttatccagaaagctcttgagtttattccttcagaccagcaggtaattaatgagatggttcgggaactagatggccatgtcttgaagtgtgtgaaagatcagaatggcaatcacgtggttcagaaatgcattgaatgtgtacagccccagtctttgcaatttatcatcgatgcgtttaagggacaggtatttgccttatccacacatccttatggctgccgagtgattcagagaatcctggagcactgtctccctgaccagacactccctattttagaggagcttcaccagcacacagagcagcttgtacaggatcaatatggaaattatgtaatccaacatgtactggagcacgggtcgtcctgaggataaaagcaaaattgtagcagaaatccgaggcaatgtacttgtatt

SEQ ID NO: 186585 - DNA, 1745 bp, Homo Sapiens
aatctagaaaaatacacttctaagaaaattgattaaaaccaaccttcttcattagcccctaagatcacatctatgttctctttgttgcagcttcacttaaagagaggaaacttcttggtgctcaaagcaaaggagatgggcctcccagttgggacagctgccatcgctcccatcattgctgctgtcaaggacgggaaaagcatcactcatgaaggaagagaggtgagatgcctggttttcttgattcagcagttacaggtagggtctgaaatgctgggcagagtctgtcttcttcaggccctacagacaccacttttgaaggacgtggaacagtttggacatcactcagctaagtgataaaatggcctcttttatctgtgtttgtcccgcatgtcaacacggctgcattcgagcatttttgtagattgtccatttaggatctagtcaccgtcctccttaaagggtgcatgctttccttggtacttgagctcaggacagtgtctaacaacagaccccatatggatgggcctggggtttatggtccagaggaatgccacagtattctatgtcaagatatttcctctgacttctgaggacattaggaccagtggccacagactgaagaaaaccttaatgccaagcctcctttcctggccagtgtaggcctgaagtgcctcaacctgacagttacctgtttaggtatccacaaagagaccagaagggtgttgatggtgatgtgtaaagttggttttgtgctttgtttacctctcagctcactggataggatatgtcatgttagcagttgccttgaaggcagttcagtttggtggctgagctgtgacccccagtgggcgggcttatttggttttgcagattttggctgaagagctgtgtactcctccagatcctggtgctgcttttgtggtggtagaatgtccagatgaaagcttcattcaacccatctgtgagaatgccacctttcagaggtaccaaggaaaggcagatgcccccgtggccttggtggttcacatggccccagcatctgtgcttgtggacagcaggtaccagcagtggatggagaggtttgggcctgacacccagcacttggtcctgaatgagaactgtgcctcagttcacaaccttcgcagccacaagattcaaacccagctcaacctcatccacccggacatcttccccctgctcaccagtttccgctgtaagaaggacggccccaccctcagtgtgcccatggttcagggtgaatgcctcctcaagtaccagctccgtcccaggagggagtggcagagggatgccattattacttgcaatcctgaggaattcatagttgaggcgctgcagcttcccaacttccagcagagcgtgcaggagtacaggaggagtgcgcaggacggcccagccccagcagagaaaagaagtcagtacccaaaatcatcttccttggaacagggtctgccatcccgatgaagattctaaatgtcagtgccacacttgtcaacataagcccctatacttctctgctactggactgtggtgagggcacatttgggcagctgtgccgtccttactgagaccaggtggacagggtcctgggcaccctggctgctgtgtttgtgtcccacctgcacgcagatcaccacacggccttgccaagtatcttgctgcagagagaacgcgccttggcatctttgggaaagccgcttcaccctttgctggtggttgccccc

SEQ ID NO: 186586 - DNA, 967 bp, Homo Sapiens
ccccatcacaaaaactcttccttttgaaagtttctgttaaaggcaaaatatagaagcatcatcgagtggaagttttatttggttggaggtgcttggctgtcccgcggctccgtgctccctgcaggcactgcggagtcagatgtgtaagaggtcctcgtcgctgtcgtcatggaaggacaccagcttggtggagctcactgtcttctgctgtgcagagctggacttccctttcctcgccttctcacccctgaccagccccaccctatcgtcctcacgctcctgaagggcattgctctgtgcgtttctcactgggtgggagctctctgccccagctcccctgcccgagtgaactttcacctctgggatggtcagaacctcatcctcactgtcctggtcatccccatgcagggagctgagggctttcactgacttggtggtaatatggccgttctcctgcccttcctttccctgccgtggaggaggcagctggatctcttccatcagccactctgtttcattctcatctgtctcttcttccttattcacctttgagtatttgtaggacacgttggaacttctcctacagcaagtggtcagcttacttatcactgtttccctcctctccttcttgtagagcaacagggccagcaggcagcaggtgagcgccaccagcagcaggctgagcaccgcgccgactgcctggctccgttctgacagccccttgtgcatctgcccgtcgtccccgggattctcgctgtcaaagcccacccccagaggacacacggctgaggtgtaccaagagaagaggtactggcagtcggcagtctcgtgactgaactcggggatcccgtcctccaccagagggtcacagtggaagaagatggtggaagaaacagacttggtcttatcctttccgcacttagaggaagaggcaaacacgacatcgccaacttttttgtacaaagtt

SEQ ID NO: 186587 - DNA, 1311 bp, Homo Sapiens
  misc_feature (192)..(257): n is a, c, g, or t
ttgggttcccaagtaggcattctaggctctatttaactgagtcacactgcataggaatttagaacctaacttttataggttatcaaaactgttgtcaccattgcacaattttgtcctaatatatacatagaaactttgtggggcatgttaagttacagtttgcacaagttcatctcatttgtattccattgnnnnnnnnnnnnnnnnnnnnnnnnnnnnnnnnnnnnnnnnnnnnnnnnnnnnnnnnnnnnnnnnnnagacagcaaaaactatctgacgatttccatttgtcaaaaagtaatggtttcttgataattgtgtagtaatgttttttagaacccagcagttaccttaaagctgaatttatatttagtaacttctgtgttaatactggatagcatgaattctgcattgagaacctgaatagctgtcataaaatgaaactttctttctaaagaaagatactcacatgagttcttgaagaatagtcataactagattaagatctgtgttttagtttaatagtttgaagtgcctgtttgggataatgataggtaatttagatgaatttaggggaaaaaagttatctgcagaaatgttgagggcccatctctccccccacacccccacagagctaactgggttacagtgttttatccgaaagtttccaattccactgtcttgtgttttcatgttgaaaatacttttgcatttttcctttgagtgccaatttcttactagtactatttcttaatgtaacatgtttacctggaatgtattttaactatttttgtatagtgtaaactgaaacatgcacattttgtacattgtgctttcttttgtgggacatatgcagtgtgatccagttgttttccatcatttggttgcgctgacctaggaatgttggtcatatcaaacattaaaatgaccactcttttaattgaaattaacttttaaatgtttataggagtatgtgctgtgaagtgatctaaaatttgtaatatttttgtcatgaactgtactactcctaattattgtaatgtaataaaaatagttacagtgactatgagtgtgtatttattcatgaaatttgaactgtttgccccgaaatggatatggaatactttataagccatagacactatagtataccagtgaatcttttatgcagcttgttagaagtatcctttatttctaaaaggtgctgtggatattatgtaaaggcgtgtttgcttaaacttaaaaccatatttagaaagtagatgcaaacaaatctgcctttatgacaaaaaatagataacattatttatt

SEQ ID NO: 186588 - DNA, 1114 bp, Homo Sapiens
ttggaggtttcacggcttcctcagcagagactcgggctcgtccgccatgtccgccgcagacgaggttgacgggctgggcgtggcccggccgcactatggctctgtcctggataatgaaagacttactgcagaggagatggatgaaaggagacgtcagaacgtggcttatgagtacctttgtcatttggaagaagcgaagaggtggatggaagcatgcctaggggaagatctgcctcccaccacagaactggaggaggggcttaggaatggggtctaccttgccaaactggggaacttcttctctcccaaagtagtgtccctgaaaaaaatctatgatcgagaacagaccagatacaaggcgactggcctccactttagacacactgataatgtgattcagtggttgaatgccatggatgagattggattgcctaagattttttacccagaaactacagatatctatgatcgaaagaacatgccaagatgtatctactgtatccatgcactcagtttgtacctgttcaagctaggcctggcccctcagattcaagacctatatggaaaggttgacttcacagaagaagaaatcaacaacatgaagactgagttggagaagtatggcatccagatgcctgcctttagcaagattgggggcatcttggctaatgaactgtcagtggatgaagccgcattacatgctgctgttattgctattaatgaagctattgaccgtagaattccagccgacacatttgcagctttgaaaaatccgaatgccatgcttgtaaatcttgaagagcccttggcatccacttaccaggatatactttaccaggctaagcaggacaaaatgacaaatgctaaaaacaggacagaaaactcagagagagaaagagatgtttatgaggagctgctcacgcaagctgaaattcaaggcaatataaacaaagtcaatacattttctgcattagcaaatatcgacctggctttagaacaaggagatgcactggccttgttcagggctctgcagtcaccagccctggggcttcgaggactgcagcaacagaatagcgactgggtacttgaagcagctcctgagtgataaacagca

SEQ ID NO: 186589 - DNA, 2484 bp, Homo Sapiens
cccttaatagccaactttgtacaaaaaagttggcggcttctcccgcgcggggggcgagtaagccagcggcaggaccagcgggcgggggcccacgacaaaagctggcaggctgacagaggcggcctcaggacggaccttctggctactgaccgttttgctgtggttttcccggattgtgtgtaggtgtgagatcaaccatgagttccgttgcagttttgacccaagagagttttgctgaacaccgaagtgggctggttccgcaacaaatcaaagttgccactctaaattcagaagaggagagcgaccctccaacctacaaggatgccttccctccacttcctgagaaagctgcttgcctggaaagtgcccaggaacccgctggagcctgggggaacaagatccgacccatcaaggcttctgtcatcactcaggtgttccatgtacccctggaggagagaaaatacaaggatatgaaccagtttggagaaggtgaacaagcaaaaatctgccttgagatcatgcagagaactggtgctcacttggagctgtctttggccaaagaccaaggcctctccatcatggtgtcaggaaagctggatgctgtcatgaaagctcggaaggacattgttgctagactgcagactcaggcctcagcaactgttgccattcccaaagaacaccatcgctttgttattggcaaaaatggagagaaactgcaagacttggagctaaaaactgcaaccaaaatccagatcccacgcccagatgaccccagcaatcagatcaagatcactggcaccaaagagggcatcgagaaagctcgccatgaagtcttactcatctctgccgagcaggacaaacgtgctgtggagaggctagaagtagaaaaggcattccaccccttcatcgctgggccgtataatagactggttggcgagatcatgcaggagacaggcacgcgcatcaacatccccccacccagcgtgaaccggacagagattgtcttcactggagagaaggaacagttggctcaggctgtggctcgcatcaagaagatttatgaggagaagaaaaagaagactacaaccattgcagtggaagtgaagaaatcccaacacaagtatgtcattgggcccaagggcaattcattgcaggagatccttgagagaactggagtttccgttgagatcccaccctcagacagcatctctgagactgtaatacttcgaggcgaacctgaaaagttaggtcaggcgttgactgaagtctatgccaaggccaatagcttcaccgtctcctctgtcgccgccccttcctggcttcaccgtttcatcattggcaagaaagggcagaacctggccaaaatcactcagcagatgccaaaggttcacatcgagttcacagagggcgaagacaagatcaccctggagggccctacagaggatgtcaatgtggcccaggaacagatagaaggcatggtcaaagatttgattaaccggatggactatgtggagatcaacatcgaccacaagttccacaggcacctcattgggaagagcggtgccaacataaacagaatcaaagaccagtacaaggtgtccgtgcgcatccctcctgacagtgagaagagcaatttgatccgcatcgagggggacccacagggcgtgcagcaggccaagcgagagctgctggagcttgcatctcgcatggaaaatgagcgtaccaaggatctaatcattgagcaaagatttcatcgcacaatcattgggcagaagggtgaacggatccgtgaaattcgtgacaaattcccagaggtcatcattaactttccagacccagcacaaaaaagtgacattgtccagctcagaggacctaagaatgaggtggaaaaatgcacaaaatacatgcagaagatggtggcagatctggtggaaaatagctattcaatttctgttccgatcttcaaacagtttcacaagaatatcattgggaaaggaggcgcaaacattaaaaagattcgtgaagaaagcaacaccaaaatcgaccttccagcagagaatagcaattcagagaccattatcatcacaggcaagcgagccaactgcgaagctgcccggagcaggattctgtctattcagaaagacctggccaacatagccgaggtagaggtctccatccctgccaagctgcacaactccctcattggcaccaagggccgtctgatccgctccatcatggaggagtgcggcggggtccacattcactttcccgtggaaggttcaggaagcgacaccgttgtcatcaggggcccttcctcggatgtggagaaggccaagaagcagctcctgcatctggcggaggagaagcaaaccaagagtttcactgttgacatccgcgccaagccagaataccacaaattcctcatcggcaaggggggcggcaaaattcgcaagtgcgcgacagcactggagcacgtgtcatctt

SEQ ID NO: 186590 - DNA, 1111 bp, Homo Sapiens
ttggagctccggcaagtcatttgattcacccggtgatgaaatgggggtcaaccagtctgtgggctttccacctgtcacaggaccccacctcgtaggctgtggggatgtgatggagggtcagaatctccaggggagcttctttcgactcttctacccctgccaaaaggcagaggagaccatggagcagcccctgtggattccccgctatgagtactgcactggcctggccgagtacctgcagtttaataagcgctgcgggggcttgctgttcaacctggcggtgggatcttgtcgcctgcctgttagctggaatggcccctttaagacaaaggactctggataccccttgatcatcttctcccatggcctaggagccttcaggactttgtattcagccttctgcatggagctggcctcacgtggctttgtggttgctgtgccagagcacagggaccggtcagcggcaaccacctatttctgcaagcaggccccagaagagaaccagcccaccaatgaatcgctgcaggaggaatggatccctttccgtcgagttgaggaaggggagaaggaatttcatgttcggaatccccaggtgcatcagcgggtaagcgagtgtttacgggtgttgaagatcctgcaagaggtcactgctgggcagactgtcttcaacatcttgcctggtggcttggatctgatgactttgaagggcaacattgacatgagccgtgtggctgtgatgggacattcatttggaggggccacagctattctggctttggccaaggagacccaatttcggtgtgcggtggctctggatgcttggatgtttcctctggaacgtgacttttaccccaaggcccgaggacctgtgttctttatcaatactgagaaattccagacaatggagagtgtcaatttgatgaagaagatatgtgcccagcatgaacagtctaggatcataaccgttcttggttctgttcatcggagtcaaactgactttgcttttgtgactggcaacttgattggtaaattcttctccactgaaacccgtgggagcctggacccctatgaagggcagaggttatggtacgggccatgttgaccttcctgc

SEQ ID NO: 186591 - DNA, 573 bp, Homo Sapiens
  misc_feature (158)..(173): n is a, c, g, or t
ttggattaaaagtggattttgtaaaagcatttcattgacacgcgacctatcacagacaatggaattcgtcagtggtggtaagactgaaatcctgatgcttttcacacttcttgtctcttgctatgtatttctgcctctagccttgccatgttttgccnnnnnnnnnnnnnnnnggccaattcctttttatatgtgcccacaacagaggtggggagacacggagcaccctgggtccttcccagcgctgctgggcaggccccgtctccaggccccagctgttgaaactttgaagggcaacaaacaaccatccacactgccggaccctaggctgttcagggaggcagctcatttccaccccggccccaggacacccagcctgtgccccacaaggatctctctaaatgggagggattgaggctacttttctgccaagccctattaagtagtaatgtggggaaacccactgtgtcagtgcaggaagccctagacaaatgttttcaaataaatttcactgcccagcctgcacagatttccatttgaagtacttcccatccaccctgacacccaaagggg

SEQ ID NO: 186592 - DNA, 1499 bp, Homo Sapiens
ttggcgccattttggccggtggccgtgagaacacgctgtgtggctgaaaagtgaaggcaagagctgatttggcctctgtgctcccctccgcaaggggatcgttttctccagaagagctggatattctttcgcccagttatggcagacaagttaacgagaattgctattgtcaaccatgacaaatgtaaacctaagaaatgtcgacaggaatgcaaaaagagttgtcctgtagttcgaatgggaaaattatgcatagaggttacaccccagagcaaaatagcatggatttccgaaactctttgtattggttgtggtatctgtattaagaaatgcccctttggcgccttatcaattgtcaatctaccaagcaacttggaaaaagaaaccacacatcgatattgtgccaatgccttcaaacttcacaggttgcctatccctcgtccaggtgaagttttgggattagttggaactaatggtattggaaagtcaactgctttaaaaattttagcaggaaaacaaaagccaaaccttggaaagtacgatgatcctcctgactggcaggagattttgacttatttccgtggatctgaattacaaaattactttacaaagattctagaagatgacctaaaagccatcatcaaacctcaatatgtagaccagattcctaaggctgcaaaggggacagtgggatctattttggaccgaaaagatgaaacaaagacacaggcaattgtatgtcagcagcttgatttaacccacctaaaagaacgaaatgttgaagatctttcaggaggagagttgcagagatttgcttgtgctgtcgtttgcatacagaaagctgatattttcatgtttgatgagccttctagttacctagatgtcaagcagcgtttaaaggctgctattactatacgatctctaataaatccagatagatatatcattgtggtggaacatgatctaagtgtattagactatctctccgacttcatctgctgtttatatggtgtaccaagcgcctatggagttgtcactatgccttttagtgtaagagaaggcataaacatttttttggatggctatgttccaacagaaaacttgagattcagagatgcatcacttgtttttaaagtggctgagacagcaaatgaagaagaagttaaaaagatgtgtatgtataaatatccaggaatgaagaaaaaaatgggagaatttgagctagcaattgtagctggagagtttacagattctgaaattatggtgatgctgggggaaaatggagaagtaccagttctaaatgtcagttataagccacagaaaattagtcccaaatcaactggaagtgttcgccagttactacatgaaaagataagagatgcttatactcacccacaatttgtgaccgatgtaatgaagcctctgcaaagtgaaaacatcattgatcaagacgtgcagacattatctgagtgctgaactacagcgagtagctttagccc

SEQ ID NO: 186593 - DNA, 2009 bp, Homo Sapiens
  misc_feature (1842)..(1854): n is a, c, g, or t
ttggcgaaatgttgaagatctttcaggaggagagttgcagagatttgcttgtgctgtcgtttgcatacagaaagctgatattttcatgtttgatgagccttctagttacctagatgtcaagcagcgtttaaaggctgctattactatacgatctctaataaatccagatagatatatcattgtggtggaacatgatctaagtgtattagactatctctccgacttcatctgctgtttatatggtgtaccaagcgcctatggagttgtcactatgccttttagtgtaagagaaggcataaacatttttttggatggctatgttccaacagaaaacttgagattcagagatgcatcacttgtttttaaagtggctgagacagcaaatgaagaagaagttaaaaagatgtgtatgtataaatatccaggaatgaagaaaaaaatgggagaatttgagctagcaattgtagctggagagtttacagattctgaaattatggtgatgctgggggaaaatggaacgggtaaaacgacatttatcagaatgcttgctggaagacttaaacctgatgaaggaggagaagtaccagttctaaatgtcagttataagccacagaaaattagtcccaaatcaactggaagtgttcgccagttactacatgaaaagataagagatgcttatactcacccacaatttgtgaccgatgtaatgaagcctctgcaaattgaaaacatcattgatcaagaggtgcagacattatctggtggtgaactacagcgagtagctttagccctttgcttgggcaaacctgctgatgtctatttaattgatgaaccatctgcatatttggattctgagcaaagactgatggcagctcgagttgtcaaacgtttcatactccatgcaaaaaagacagcctttgttgtggaacatgacttcatcatggccacctatctagcggatcgcgtcatcgtttttgatggtgttccatctaagaacacagttgcaaacagtcctcaaacccttttggctggcatgaataaatttttgtctcagcttgaaattacattcagaagagatccaaacaactataggccacgaataaacaaacttaattcaattaaggatgtagaacaaaagaagagtggaaactactttttcttggatgattagactgactctgagaatattgataagccatttattaaaaggagtatttactagaattttttgtcatataaaacttgaatcaggattttatgccccacatactctggaacttgaagtataatatacttaatataacataaaaagccagttgggttctaaattgtagttgaaacacagaaaatgccacttttctgttcctgaagaggctcttttgtgcataatattctaaaatgaagacatttcaagctatacaaattacttccaagttttcatgatgtatgggaagattttcagtaggtgtattatattcacggtaccaaatgctgaccagtgttgctccattttttaaatcttgaaaagggtttctgtacttacctggtttgccaagtatgccagtgtaatgaaactgcccttattttaaaagccagtcaaagattccactgattgacatttgataaataaacatcaggattatgtttattgtttgttttcagtctttgcactatattaccagtatatggtttccgaggaagattatctactgcaaaacaccactgttggaaaaataggtatttttaaattgtttttaatcttttttggtgcttttaaacatgtttagcaaaaaccaattcagttccattccccgcaaaaaacccctaactttactctgaacnnnnnnnnnnnnngcattccatgaggttctgtattcagtcattctctaggtaatgtcatttttgtacacatatatttatataatcactgattgagatttaggaaaaagcatttctaaagaatatttgcttcccttagaactacagactcgaaatctttaaagatggtg

SEQ ID NO: 186594 - DNA, 1889 bp, Homo Sapiens
  misc_feature (789)..(807): n is a, c, g, or t
ttggtgtcttatgtgtgtcctgaaaaaataagagcctgcccaagactttgggcctcttgacagaattaaccacttttatacatctgagttctcttggtaagttctttagcagtgttcaaagtctactagctcgcattagtttctgttgctgccaacagatctgaactaatgctaacagatccccctgagggattcttgatgggctgagcagctggctggagctagtactgactgacattcattgtgatgagggcagctttctggtacaggattctaagctctatgttttatatacattttcatctgtacttgcacctcactttacacaagaggaaactatgcaaagttagctggatcgctcaaggtcacttaggtaagttggcaagtccatgcttcccactcagctcctcaggtcagcaagtctacttctctgcctattttgtatactctctttaatatgtgcctagctttggaaagtctagaatgggtccctggtgcctttttactttgaagaaatcagtttctgcctctttttggaaaagaaaacaaagtgcaattgttttttactggaaagttacccaatagcatgaggtgaacaggacgtagttaggccttcctgtaaacagaaaatcatatcaaaacactatcttcccatctgtttctcaatgcctgctacttcttgtagatatttcatttcaggagagcagcagttaaacccgtggattttgtagttaggaacctgggttcaaaccctcttccactaattggctatgtctctggacaagttannnnnnnnnnnnnnnnnnnaaaccctttctgaactttcactttctatgtctacctcaaagaattgttgtgaggcttgagataatgcatttgtaaagggtctgccagataggaagatgctagttatggatttacaaggttgttaaggctgtaagagtccaaaacctacagtgaatcacaatgcatttacccccactgacttggacataagtgaaaactagccagaagtctctttttcaaattacttacaggttattcaatataaaatttttgtaatggataatcttatttatctaaactaaagcttcctgtttatacacactcctgttattctgggataagataaatgaccacagtaccttaatttctaggtgggtgcctgtgatggttcattgtaggtaaggacattttctctttttcagcagctgtgtaggtccagagcctctgggagaggaggggggtagcatgcacccagcaggggactgaactgggaaactcaaggttctttttactgtggggtagtgagctgcctttctgtgatcggtttccctagggatgttgctgttcccctccttgctattcgcagctacatacaacgtggccaaccccagtaggctgatcctatatatgatcagtgctggtgctgactctcaatagccccacccaagctggctataggtttacagatacattaattaggcaacctaaaatattgatgctggtgttggtgtgacataatgctatggccagaactgaaacttagagttataattcatgtattagggttctccagagggacagaattagtaggatatatgtatatatgaaagggaggttattagggagaactggctcccacagttagaaggcgaagtcgcacaataagccgtctgcaagctgggttagagagaagccagtagtggctcagcctgagttcaaaaacctcaaaactggggaagctgacagtgcagccagccttcagtctgtggccaaaggcccaagagcccctggcaaccaacccactggtgcaagtcctagattccaaaggctgaagaacctggagtctgatgtccaagagcatggaagagtggaagaaagccaaa

SEQ ID NO: 186595 - DNA, 1131 bp, Homo Sapiens
ttgggaccacagtaccttaatttctaggtgggtgcctgtgatggttcattgtaggtaaggacattttctctttttcagcagctgtgtaggtccagagcctccttgctattcgcagctacatacaacgtggccaaccccagtaggctgatcctatatatgatcagtgctggtgctgactctcaatagccccacccaagctggctataggtttacagatacattaattaggcaacctaaaatattgatgctggtgttgggtgacataatgctatggccagaactgaaacttagagttataattcatgtattagggttctccagagggacagaattagtaggatatatgtatatatgaaagggaggttattagggagaactggctcccacagttagaaggcgaagtcgcacaataggccgtctgcaagctgggttagagagaagccagtagtggctcagcctgagttcaaaaacctcaaaactggggaagctgacagtgcagccagccttcagtctgtggccaaaggcccaagagcccctggcaaccaacccactggtgcaagtcctagattccaaaggctgaagaacctggagtctgatgtccaagagcaggaagagtggaagaaagccagaagactcagcaaacaaggtagacagtgtctaccaccatagtggccataccaaagaggctaccgattccttcctgctacctggatccctgaagttgccctggtctctgcaccttctaaacctagttcttaagagctttccattacatgagctgtctcaaagccctccaataaattctcagtgtaagcttctgttgcttgtggacagaaaattctgacagacctaccctataagtgttactgtcaggataacatgagaacgcacaacagtaagtggtcactaagtgttagctacggttattttgcccaaggtagcatggctagttgatgccggttgatggggcttaaacccagctctctcatcttccaggcctctgtactccctattccactaaactacctctcaggtttatttttttaaattcttactctgcaagtacataggaccacatttacctgggaaaacaagaataaaggctgctctgcattttttagaaactttttt

SEQ ID NO: 186596 - DNA, 1343 bp, Homo Sapiens
ttggggtagtcagtttctgctttttactccctctgaattattaattgtttgccaggttcactggtgggaggctgagccggtggaaaagacaccgggaagagactcagaggcgaccataatgtcgttacgtgtacacactctgcccaccctgcttggagccgtcgtcagaccgggctgcagggagctgctgtgtttgctgatgatcacagtgactgtgggccctggtgcctctggggtgtgccccaccgcttgcatctgtgccactgacatcgtcagctgcaccaacaaaaacctgtccaaggtgcctgggaaccttttcagactgattaagagactggacctgagttataacagaattgggcttctggattctgagtggattccagtatcgtttgcaaagctgaacaccctaattcttcgtcataacaacatcaccagcatttccacgggcagtttttccacaactccaaatttgaagtgtcttgacttatcgtccaataagctgaagacggtgaaaaatgctgtattccaagagttgaaggttctggaagtgcttctgctttacaacaatcacatatcctatctcgatccttcagcgtttggagggctctcccagttgcagaaactctacttaagtggaaattttctcacacagtttccgatggatttgtatgttggaaggttcaagctggcagaactgatgtttttagatgtttcttataaccgaattccttccatgccaatgcaccacataaatttagtgccaggaaaacagctgagaggcatctaccttcatggaaacccatttgtctgtgactgttccctgtactccttgctggtcttttggtatcgtaggcactttagctcagtgatggattttaagaacgattacacctgtcgcctgtggtctgactccaggcactcgcgtcaggtacttctgctccaggatagctttatgaattgctctgacagcatcatcaatggttcctttcgtgcgcttggctttattcatgaggctcaggtcggggaaagactgatggtccactgtgacagcaagacaggtaatgcaaatacggatttcatctgggtgggtccagataacagactgctagagccggataaagagatggaaaacttttacgtgtttcacaatggaagtctggttatagaaagccctcgttttgaggatgctggagtgtattcttgtatcgcaatgaataagcaacgcctgttaaatgaaactgtgggacgtcacaataaatgtgagcaatttcactgtaagcagatcccatgctcatgaggcatttaacacagcttttaccactcttgctgcttgcgtggcc

SEQ ID NO: 186597 - DNA, 2655 bp, Homo Sapiens
  misc_feature (709)..(731): n is a, c, g, or t
  misc_feature (2150)..(2195): n is a, c, g, or t
ttggctttttgctgagatcgtcaggcaaatgaactattcatccctgccggagaagcaagatcagtgttgtacaacttgtgtcgtccagtaaagaagataacctcaatcatggccataccgagcagataaaactcagaggaaatttgcacagatgctgctttggagaactttacaacctgggttgcagaactgagccttggtaaacctgtctctattacagcatgttgccatacatctatttaagtgcataaggtctttggccttcaagatccatcgaccttaaacaggaatgcttagcacgtttaccatacgtttaaaatccattctttatcaatcagtccttttatagctttctaagttcttattgatggctaatatacaagggttaatttttaatattttaattgatttctttaatcagtttctcgacttgtatttattaaatactcaaactcagtattacctactcaatgccttttaaaagaaagttataatggagaaaaaattgagccttaaacaaatggttacttctgtatattacctcgtaccagtgcttcatcctatttgtaaaatctttctcctttaaaattattggttaatactttgagactttgtttacgtgtggcagtgttgtaaaaagaaactaaagatcacattttacctgtatggatggaatatcccttttcttcaagtgcagtttgtgatgtgnnnnnnnnnnnnnnnnnnnnnnngtaattaacatgttctgaaggttacaattgatatttgaaattgactgtagagcatttagttgaagagttaagcattcagttccattaggttttcacatgtgttaatctcatttacagcattgaattgcggcagtaacattttcctttctgtgaagttctaaatttagttatgacctatttagcaatgcctttgaaaagggatattgtatccatggtaaattaattgtatacctaaacagagatagctcatctttgcctatcaggcttgtaattgacatctagtagacttctgcacatgtaaaattgaattcaaataaaatcatacacactttctagttcttaatatttgtctttctgaataatagtttaaagcaatatttgttaaagttttcttgcactatcacaattgctttttagttatttctcaagaagcatgttcgtattagagacaaaatctgtgtaacaggagggagaatagcgccaagtctctgggctattttttatttttgcaaatgtgctttctaatagccattgccttccatgttgtttacctaatcagcatatttttgtctgaatacttgaacattttaacagtaacgcaggtgtagaatcagaaaggaaacttatgcagagtaatattttggttcagttttaacatcgtgacaatgagggctttttctagcaatgatttttaaattgtgtaagtttgacagtattttattgttgggtttttatttgattttagttgtgtgcttttcatttgcagaagttagtaactgcagctcacctactgcaccaaagttctcgattttaggagcccagctttagtcatttgaacatgcttctaaataaaataaaacaaaaccaaaactatacttttgatctataataagagctcaataactttgtcaaggaaagctctaatatatgcagtgatggtttatgaaagggtgtggcaattttaaatttatattgtgtgtgatgttcaaataaagtggtatctacattcatgtgatttatgggtcagcatgaccattaattactgagtagaaattgactaaactttgatttcctttttttaaatcgtgttgcatttgattcctgagcaaattccctcaaagtgaactcttgttcttaaattttgaattttatggtgagattgtaaagatagaggcaattgaaacattgttccttatttatgaactgcttgaagtgaatacttaatttaagtttgcactttaataccaaacttaaaaccaaacactcatttaaaagtaggttaagtgatcatggatcattgttattagctttgtggctttgtgaaattctaaaggaatcaaataattcatcatgatttaaattttctagagattttgatttttttataatgtttctttcctgtagattgtgttcttgttnnnnnnnnnnnnnnnnnnnnnnnnnnnnnnnnnnnnnnnnnnnnnnaaaattacagtgttcattgtcattgacctcagcagcaaatttgacttgaattcacttaggatcgcaggaatcaggggaaagtgattttaaaggtggtttctccagcacattttaagaaaagggaccaaaagttattttagcttcctcaatagattgcatgttgcttattaggataataaattaatattaaatgcaatatatgtcttgtctttattatggcatctatttaggagttgttcaaatcactgcagtagggctctgcaaataaaataatgtaacctattatcatggatctaatgtactgtaactttatcagtgaaaggtaaaatctcaaataacaagtacaaacattgaacaattacctataaagatttgtaaaagtaaaatttttccaatagatttcattcttgtcattttgtaagacgaccctgcagtccacctgtttgtaacttttttaata

SEQ ID NO: 186598 - DNA, 1480 bp, Homo Sapiens
ttgggcctattctgaatcagccatcaactcagattgttgccaatgccaaaggcgctgtgactggggcaaaagatgctgtgacgactactgtgactggggccaaggattctgtggccagcacgatcacaggggtgatggacaagaccaaaggggcagtgactggcagtgtggagaagaccaagtctgtggtcagtggcagcattaacacagtcttggggagtcggatgatgcagctcgtgagcagtggcgtagaaaatgcactcaccaaatcagagctgttggtagaacagtacctccctctcactgaggaagaactagaaaaagaagcaaaaaaagttgaaggatttgatctggttcagaagccaagttattatgttagactgggatccctgtctaccaagcttcactcccgtgcctaccagcaggctctcagcagggttaaagaagctaagcaaaaaagccaacagaccatttctcagctccattctactgttcacctgattgaatttgccaggaagaatgtgtatagtgccaatcagaaaattcaggatgctcaggataagctctacctctcatgggtagagtggaaaaggagcattggatatgatgatactgatgagtcccactgtgctgagcacattgagtcacgtactcttgcaattgcccgcaacctgactcagcagctccagaccacgtgccacaccctcctgtccaacatccaaggtgtaccacagaacatccaagatcaagccaagcacatgggggtgatggcaggcgacatctactcagtgttccgcaatgctgcctcctttaaagaagtgtctgacagcctcctcacttctagcaaggggcagctgcagaaaatgaaggaatctttagatgacgtgatggattatcttgttaacaacacgcccctcaactggctggtaggtcccttttatcctcagctgactgagtctcagaatgctcaggaccaaggtgcagagatggacaagagcagccaggagacccagcgatctgagcataaaactcattaaacctgcccctatcactagtgcatgctgtggccagacagatgacaccttttgttatgttgaaattaacttgctaggcaaccctaaattgggaagcaagtagctagtataaaggccctcaattgtagttgtttccagctgaattaagagctttaaagtttctggcattagcagatgatttctgttcacctggtaagaaaagaatgataggcttgtcagagcctatagccagaactcagaaaaaattcaaatgcacttatgttctcattctatggccattgtgttgcctctgttactgtttgtattgaataaaaacatcttcatgtgggctggggtagaaactggtgtctgctctggtgtgatctgaaaaggcgtcttcactgcttttatctcatgatgcttgcttgtaaaacttgattttagtttttcattttctcaaataggaa

SEQ ID NO: 186599 - DNA, 1765 bp, Homo Sapiens
  misc_feature (1234)..(1266): n is a, c, g, or t
ttgggacaagaatgactgtctccctggtggttattgtttttgagcttactggaggcttggaatatattgttccccttatggctgcagtcatgaccagtaaatgggttggagatgcctttggcagggaaggcatttatgaagcacacatccgattaaatggataccctttcttggatgcaaaagaagaattcactcataccaccctggctgctgacgttatgagacctcgaaggaatgatcctcccttagctgtcctgacacaggacaatatgacagtggatgatatagaaaacatgattaatgaaaccagctacaatggatttcctgtcataatgtcaaaagaatctcagagattagtgggatttgccctcagaagagacctgacaattgcaatagaaagtgccaggaaaaaacaagaaggtatcgttggcagttctcgggtgtgttttgcacagcacaccccatctcttccagcagaaagtcctcggccattgaagcttcgaagcattcttgacatgagcccttttacagtgacagaccacaccccaatggagatcgtggtggatattttccgaaagctgggactgaggcagtgccttgtaactcacaatgggcgcctccttggcattataacaaaaaaagatatcctccggcatatggcccagacggcaaaccaagaccccgcttcaataatgttcaactgaatctcacagatgaggagagagaagaaacggaagaggaagtttatttgttgaatagcacaactctttaacctgagggagtcatctacttttttttcctcctttacaaaaaaagaaaggaaatataaaagccgggtttttgcaacatggtttgcaaataatgctggtggaatggaggagttgtttggggagggaaaggagagagaaggaaaggagtgaggtatttcccgtctaacagaaagcagcgtatcaactcctattgttctgcactggatgcattcagctgaggatgtgcctgatagtgcaggcttgcgcctcaacagagatgacagcagagtcctcgagcacctggcctgttgctccaacattgcaaagacacattatcagtccctatttctagagggattactttgaattgagccatctataaaactgcaaggtcttgcccttttttttaatcaaaactgttctgtttaattcatgaattgtatagttaagcattacctttctacattccagaagagcctttattnnnnnnnnnnnnnnnnnnnnnnnnnnnnnnnnnactgagctgtaacaaagcctctttaaatcggtgtatccttttgaagcagtcctttctcatattgagatgtactgtgattttactgaggtttcatcacaagaagggagtgtttcttgtgccattaaccatgtagtttgtaccatcactaaatgcttggaacagtacacatgcaccacaacaaaggctcatcaaacaggtaaagtctcgaaggaagcgagaacgaaatctctcattgtgtgccgtgtggctcaaaaccgaaaacaatgaagcttggttttaaaggataaagttttcttttttgttttcctctcagactttatggataatgtgaccgggtcttatgcaaattttctatttctaaaactactactatgatatacaagtgctgttgagcataattaaataaaatgctgctgctttgacagtaaagagaaggaagtattctgattagctgtatctggtattaatttgcatgttaaacactggaatttttaaaatt

SEQ ID NO: 186600 - DNA, 1673 bp, Homo Sapiens
actttgtacaaaaaagttggggcgtgctgatcctgggtttctagtcatcctttttaagctgcaaagaagcatttgcagacgttgtctcatgggtaccgcttgccaactttggaggatgtgaagccggtagagaaataaagcatcgcccctctgcgcgcccctccccgtctgctagaatgtttctcatgaacgcttctccagtggttgctctccagtccaaatgggaggcctttggcccgccagggagctgtaggttccccaggtgcttctcggaggctgacgagggcgtggagagcgcgtcggtgagcgcccgggtgcagatgcttatcagcactctgcagcgcgacggggctgctcggggcaccagcgatgagcgcgccgcacagaggggccacagggcagagggatgccacgacgccaggccggctgccaagcccaccgtgcacaaggagccacccgcgttggctgtctgtggtctcgttgctgactttgaccccatgggggaggaggaaactacagactttggcccgttggtgctagattcagacagtgatgattccgtggacagggacattgaggaggccatccaggagtacctgaaggcaaagagtggagccgcacagcccggggccggcggggcccagccaggtgcagcccagccttccagggccgcaggcggaggcagtagatgtaagccggaaccggctcacggcagtgccccgactgccctgtgtcccccaaaacttgtacctggatcaatggtggccccggcagccaggtgggatccagcaaggaccagggctccgcctccccggtcagtgtgagcagcgatgactccttcgagcagagcatcagggcggaaatagaacagtttctgaatgagaagagacagcatgagacccaaaaatgtgatgggtcagtggagaagaaaccagacacaaatgaaaattccgccaagtcactcttgaaatcccaccaagagccgcctacaaaggtggtgcatcggcagggcctgctgggcgtccagaaggagtttgccttccgcaaacctccccggttagcgaagatgaacgtccagcccagaagcctcaggtccaaggtcacaaccacgcaggagaacgagggcagcacgaagccggcaaccccctgccgcccttcagaagcagcacagaataaaggtgggatcaaaaggagcgccagcgctgcaaggaggggaaagcgagtcatgagtgcggcacaggcgtccgaggcgtccgactccagcagcgacgatggcattgaggaggccatccagctgtaccagctgcagaaaacacgcaaggaggccgacggggacctgccccagagggtccaactccgagaggagagagcgcctgaccctcccgcacacagcacaagcagtgccacaaaaagtgccttgcccgagacccacaggaaaacacccagcaagaagaagctagtggccaccaagaccatggaccctggtccagggggcctggacactgaccatgcccccaagctcctgaaggaaaccaaagctccacctccagcgagccctgcttccaggagtgagtttgtggaacggtcctcgtgccgggcggacacatctgctgagctgatgtgtgcagaagcaatcctggacatctccaagacgatcctgcccggcccctgta

SEQ ID NO: 186601 - DNA, 822 bp, Homo Sapiens
caaaaaatttggggtgatccgacccgggaaaagtctctgggtagggcgagttgggaaagcagcagcccccgccgcccccgcttccccttctcctcctttctcccacgtcctatctgcctctcgctggaggccaggccgtgcagcatcgaagacaggaggaactggagcctcattggccggcccggggcgccggcctcgggcttaaataggagctccgggctctggctgggacccgaccgctgccggccgcgctcccgctgctcctgccgggtgatggaaaaccccagcccggccgccgccctgggcaaggccctctgcgctctcctcctggccactctcggcgccgccggccagcctcttgggggagagtccatctgttccgccagagccccggccaaatacagcatcaccttcacgggcaagtggagccagacggccttccccaagcagtaccccctgttccgcccccctgcgcagtggtcttcgctgctgggggccgcgcatagctccgactacagcatgtggaggaaaaaccagtacgtcagtaacgggctgcgcgactttgcggagcgcggcgaggcctgggcgctgatgaaggagatcgaggcggcgggggaggcgctgcaaagcgtgcacgcagtgttttcggcgcccgccgtccccagcggcaccgggcagacgtcggcggagctggaggtgcagcgcaagcactcgctggtctcgttttgtggtgcgcatcgtgcccagccccgactggttcgtgggcgtggacagccctggacctgtgcgacggggacggttggcgggaacaggcggcgctgg

SEQ ID NO: 186602 - DNA, 1388 bp, Homo Sapiens
  misc_feature (914)..(924): n is a, c, g, or t
ttgggtggtatcactggatttgctggcttctcagcgtagttggaatcttctgtattctcttagcgcatgaccactacactgtggacgtggtggtggcatattacatcaccacgagactcttctggtggtatcacactatggccaatcagcaagtgctaaaggaagcttcccagatgaacctcctggccagggtgtggtggtacaggccatttcagtactttgaaaagaatgtccaaggaattgtacctcgatcttaccattggcctttcccctggccagtagtccacctcagtaggcaagttaaatacagccggctggtgaatgacacataacagctgtacaaagtggggaaaagacaaattgtccgaagtgctaagaactccatgagagaagatgccataaaataaacacctccctaatcctattatctttcaatggttaccttgacttaacctattgagttacctggtcagcactgtgatctttttttctctccaaaggacctgcgttggacaacaataaagaaaaatttaacctatcatgcactgtacacatttcctgttcataagtttgggatttacataacccgcaaccaccatgttcctttgtatatgatgcagcagcataaatgtaagcttttatatcataagttctggtctttccagtcacatctggaaataaagcgtattattttcttgggaaaacatacttttcatatctcttgccccaaagattgggctgtaagccattttctagcaaatgtctctatgaaggtttctaagtacctgaatggggtttgattctgaaatctttctacctgttgcaccgatattcaaataaaaatgatagacacagaaaggtttggtaactttgggttttgtaaaatcagcaaaggcagtgtttcaaaaagtgcnnnnnnnnnnngattctgttataaagtgattttctaagtatttcctaactttatttttcaaaatgatgttatgaacaccaaatttaaagatttttaacatgtcagagagaagagagttaaaatttaaaaatgcatcttgggagagaaatttgtctatgtttctagtgcctttcttgtcttgattgtatggtcagtaggcaatcttaaatgtttttatttaaaataaagtattccttgaaaatataaatatatgtatacactactaaattttgcatttatagctaaattgaatcagaagactgcttatggttttaaaattgcaatgacttaaataatgagttgttaattagagtcagagcctgttcacatattgtgatcaggtagcaatgacatgtaccacttaaattattttatcgtcgatttggtagttcgattttaactactcaatgaaaacaggccatgaatattctttttc

SEQ ID NO: 186603 - DNA, 1419 bp, Homo Sapiens
tggtacaaaaaagttggaaggaaacaaatgatacttggaactcccagtttgggaaaaggccagaatcaccatcagaaatatctccaatcaagggatctgttagaactggtttgtttgaatgggataatgattttgaagatatcagatcagaagactgtattttaagtttggatagtgatccccttttggagatgaaggatgacgattttaaaaatcgattggaaaatctgaatgaagccattgaggaagatattgtacaaagtgttcttaggccaaccaactgtaggacgtactgtagggccaataaaacgaaatcctcccaaggagcatcaaattttgataagctgatggacggcaccagtcaggccttagccaaagcaaacagtgaatcgagtaaagatggcctgaatcaggcaaagaaagggggtgtaagttgtgggaccagttttagagggacagttggacggactagagattacactgttttacatccatcttgcttgtcagtttgtaatgttaccatacaggatactatggaacgcagcatggatgagttcactgcatccactcctgcagatttgggagaagctggtcgtctcagaaaaaaggcagatattgcaacttctaagactactactagatttcgacctagtaatactaaatccaaaaaggatgttaaacttgaattttttggttttgaagatcatgagacaggaggtgatgaaggaggttctggaagttctaattacaaaattaagtattttggctttgatgatctcagtgaaagcgaagatgatgaagatgatgactgtcaagtagaaagaaagacaagcaaaaaaagaactaaaacagctccatcaccctccttgcagcctcccccagaaagcaatgataattcccaggacagtcagtctggtactaacaatgcagaaaacttggattttacagaggacttgcctggtgtgcctgaaagtgtgaagaagcccataaataaacaaggagataaatcaaaggaaaataccagaaagatttttagtggccccaaacggtcacccacaaaagctgtatataatgccagacattggaatcatccagattcagaagaactgcctgggccaccagtagtaaaacctcagagtgtcacagtgaggctgtcttcaaaggaaccaaatcaaaaagatgatggagtttttaaggctcctgcaccaccatccaaagtgataaaaactgtgacaatacctactcagccctaccaagatatagttactgcactgaaatgcagacgagaagacaaagaattatatactgttgttcagcacgtgaagcacttcaacgatgttgtagaatttggtgaaaatcaagagttcactgatgacattgagtacttgttaagtggcttaaagagcactcagcctctaa

SEQ ID NO: 186604 - DNA, 1358 bp, Homo Sapiens
ttggggctgttggaggaaggaggtgggggccgggagcgcaaatggcgttgagatggttcagggccctgttcaaactccagcactgaccattcaccggcggaagcggcggcgcaggaggcggcggcggcccagcgggggcacacagcaggctctgttaccagctccagcagtggcggccagcgagagctaggcccgggcccggccggcggcgctcgaggcggggagggaagttgcggggccgccgctcctgcccccccaaccgggcttcctatttaccgaaagcagagtccctcgcctctctcggctctcacctgccggccctgctctcccgcgcgagggttccgcgcccgcccgcgggccgtagggagcgggagaggcggaggcggcccgtggccaaagcacccgccaggctccgaggagaatatgaaactggtgtcaaaatgacatccagatttgggaaaacatacagtaggaaaggtggaaatggcagttcaaaattcgatgaagtcttttccaacaaacggactacccttagcacaaaatggggagagaccacatttatggctaaattagggcagaagaggcccaatttcaaaccagatatccaagaaattccgaagaaacctaaagtggaagaagaaagtactggagatccttttggatttgatagtgatgatgagtctctaccagtttcttcaaagaatttagcccaggttaagtgttcctcttattcagaatctagtgaagctgctcagttggaagaggtcacttcagtacttgaagctaatagcaaaattagtcatgtggtcgttgaagacactgtcgtttctgataaatgcttccctttggaggacactttacttgggaaagaaaagagcacaaaccgaattgtagaagatgatgcaagcataagtagctgtaataaattaataacttcagataaagtggagaattttcatgaagaacatgaaaagaatagtcaccatattcacaaaaatgctgatgacagtactaagaaacccaatgcagaaactacagtggcttctgaaatcaaggaaacaaatgatacttggaactcccagtttgggaaaaggccagaatcaccatcagaaatatctccaatcaagggatctgttagaactggtttgtttgaatgggataatgattttgaagatatcagatcagaagactgtattttaagtttggatagtgatccccttttggagatgaaggatgacgattttaaaatcgattggaaaatctgaatgaagccattgaggaagatattgtacaaagtgttcttaggccaaccaactgtagacgtactgtagggccataaaacgaaatcctcccaaaga

SEQ ID NO: 186605 - DNA, 1288 bp, Homo Sapiens
  misc_feature (269)..(281): n is a, c, g, or t
ttggcccttagacggtcttcaaggcgacgttcagaagtagtagagtctaccactgaaagccaagataaggaaaatagtcatcaaaaaaaggaacgacgtaaggaagaagaaaaacctcttcagaagagtccattgcatataaaagatgatgtgttacctaaacaaaaactgattgctgaacaaactctacaggagaatttaattgagaaaggaagtaatttacatgagaagactcttggggaaactagtgctaatgcagaaactgaacnnnnnnnnnnnnnggcagaccctgagaacattaagtctgagggggatggtacccaggacattgtagataagtcctctgagaaactagtcagaggccgaacacggtatcaaactagaagagcatctcagggtttgctttccagcattgaaaactcagaatctgatagttcggaggcaaaagaagaaggttctaggaagaagagatctggaaaatggaaaaacaaaagcaatgaaagtgttgacattcaagatcaagaagagaaagtggtgaaacaggaatgtataaaagctgaaaatcagtcacatgattataaagcaacttctgaagaagatgtaagcataaaatctccgatttgcgaaaaacaagatgaaagtaatactgtaatatgtcaggattctacagtaacttcagatttgttgcaagttcctgatgatttaccaaatgtgtgtgaggaaaaaaatgaaactagcaaatatgcagaatattcctttacaagtctacctgtgccagaatcaaatctaaggactagaaatgccattaagagattacataagcgagactcttttgataattgtagtttgggagaatcctcaaaaatagggatatcagatatttcttcgctttcagaaaaaacttttcaaacacttgaatgccaacacaagagaagtaggagggtgaggagatctaaaggttgtgattgctgtggggaaaaatcacaacctcaggaaaagtcactcattgggttaaagaatacagaaaataatgacgtagagattagtgaaacaaaaaaggcagatgtgcaagcacctgtaagctcatcagaaacttctcaagctaatccatattctgaaggacaatttttagatgaacatcatagtgtgaattttcatttgggtctcaaagaggataatgatactattaatgattcattaattgtttctgaaccaatcaaagaaacactatgcaagaatctcttccttctggaatagtaaactttagagaggaatttgtgatatggat

SEQ ID NO: 186606 - DNA, 1092 bp, Homo Sapiens
gtagacggagaagccaaaggagaccagacacagcgtgtctgcatgccactaggactgtcattgctgacacaagtgaaggatcaagttcccttagtttttgaggagatgcattattgtcttctattattagctcagagatagctgttccagatgccagacactgtgatggttcctccactttctgtgaagtatggtgatcttcctgtaaaatatcactttccattaccatttgattgttatctaattttcttcagatttactatactcagtatttgtttcagttttattagcgtcaatgattccttcttcagtgctcatttcaactgtgtcacaaacaaagttgtccatttctgcagtcaacatgtttgtttcagcttcatcaggctttgaggttttggtagttatgccctcattctctgtttcaccatcatggccagtttcagccattgcctcgccgatcatcatttcttcataatttttcattttggtattcgtttcttcagatgagtgtagatcagatacatcatttcctccatctagttccccagctgctgtttgttcagaaatctcagtttgagcattcaattttacaggtgtagtattatcagaaagactaatatctgaattaaattcctcagttgctacttctttggcattcagtttagctgtgtctgcttcagagtcatcatttcttttattttcttctattgctgcttcttcagaaataccagttttggttctctcttgtccatgaaagctagcttcatttcctacattcaattccatagtttttgctttctctagattggattctgttactttacatgcatttccttcaacagtaacattctctagactcagttccatttttggggtttcttctggtttttcttcttttgtctccaaagattcctgtgaaacatttttcgagtctcctaaacacgggccaacagttttaaaattttcattaggtgactcctggctttcaagagacattgcttcactagaatccatatcacaaatttcctctctaaagtttactattccagaaggaagagattcttgcatagtgttttcttttgatttggccaa

SEQ ID NO: 186607 - DNA, 1930 bp, Homo Sapiens
ttggccctgcccaggcttcagagtgccctgttgctgctgccactgccccccacactccagggccatgtcagagctcccatctaccctccaccagcatgccgctcctgaagatgcccccaccattctcggggtgcagccacccctgcagcgggcactgtggtgggcactgcagtgggcctctcctcccacccccgagctctcagccactccctagcactcacagggatcccgggtgcaaggggcacaagtttgcacacagtggcctggcttgccagctgccccagccctgcgaggcagatgaggggctgggtgaggaagaggatagcagctctgagcgaagctcctgcacctcatcctccacccaccagagagatgggaagttctgtgactgctgctactgtgagttcttcggccacaatgcgccacccgctgccccgacgagtcggaactataccgagatccgggagaagctccgctcgaggctgaccaggcggaaagaggagctgcccatgaaggggggcaccctgggcgggatccctggggagcccgccgtggaccaccgagatgtggatgagctgctggaattcatcaacagcacggagcccaaagtccccaacagcgccagggccgccaagcgggcccggcacaagctgaaaaagaaggaaaaggagaaggcccagttggcagcagaagctctaaagcaggcaaatcgtgtttctggaagccgggagccaaggcctgccagggagaggctcttggagtggcccgaccgggaactggatcgggtcaacagcttcctgagcagccgtctgcaggagatcaaaaacactgtcaaagactccatccgtgccagcttcagtgtgtgtgagctcagcatggacagcaatggcttctctaaggagggggctgctgagcctgagcctcagagtctacccccctcaaacctcagtggctcctcagagcagcagcctgacatcaaccttgacctgtcccctttgactttgggctcccctcagaaccacacgttacaagctccaggcgagccagccccaccatgggcagaaatgagaggcccccacccaccatggacagaggtgagggggccccctcccggtatcgtccccgagaacgggctcgtgaggagactcaacaccgtgcccaacctatcccgggtgatctgggtcaagacacccaagccgggctaccccagctccgaggagccaagctcaaaggaagttcccagttgcaagcaggagctgcctgagcctgtgtcctcaggtgggaagccacagaagggcaagaggcagggcagtcaggccaagaagagcgaggcaagcccagccccccggcccccagccagcctagaggttcccagtgccaagggccaggtcgctggccccaagcagccaggcagggtcctagagcttcccaaagtaggcagctgtgctgaggctggagaggggagccgggggagccggccaggaccaggttgggctggcagtcccaaaactgagaaggagaagggcagctcctggcgaaactggccaggcgaggccaaggcacggcctcaggagcaggagtctgtgcagcccccaggcccagcaaggccacagagcttgccccagggcaagggccgcagccgccggagccgcaacaagcaggagaagccagcctcctccttggacgatgtgttcctgtccaaggacatggacggggtggagatggatgagactgaccgagaggtggagtactttaagaggttctgtttggattctgcaaagcagactcgtcagaaagttgctgtgaactggaccaacttcagcctcaagaaaaccactcctagcacagctcagtgaggccctgcccaggctgagctgctttcagggcatcctgaggccctgactgccacctgaagggcgtaataattttt

SEQ ID NO: 186608 - DNA, 1199 bp, Homo Sapiens
  misc_feature (154)..(201): n is a, c, g, or t
actttgtacaaaaaagttggcccacaggtctcttccaagccccaaggattgggccccagccccagccccatcctcagccccatccttcacaagcgtttgggcctcagcccccacagcagccccttccactccagcatccacatctcttcccacnnnnnnnnnnnnnnnnnnnnnnnnnnnnnnnnnnnnnnnnnnnnnnnntcagcctggggtcctggggcagccgccaccccccctacacacccagctctacccaggtcccgctcaagaccctctgccagcccactcaggggctctgcctttccccagccctgggccccctcagcctccccatcccccactggcatatggtcctgccccttctaccagacccatgggcccccaggcagcccctcttaccattcgagggccctcgtctgctggccagtccacccctagtccccacctggtgccttcacctgccccatctccagggcctggtccggtaccccctcgccccccagcagcagaaccacccccttgcctgcgccgaggcgccgcagctgcagacctgctctcctccagcccggagagccagcatggcggcactcagtctcctgggggtgggcagcccctgctgcagcccaccaaggtggatgcagctgagggtcgtcggccgcaggccctgcggctgattgagcgggacccctatgagcatcctgagaggctgcggcagttgcagcaggagctggaggcctttcggggtcagctgggggatgtgggagctctggacactgtctggcgagagctgcaagatgcgcaggaacatgatgcccgaggccgttccatcgccattgcccgctgctactcactgaagaaccggcaccaggatgtcatgccctatgacagtaaccgtgtggtgctgcgctcaggcaaggatgactacatcaatgccagctgcgtggaagggctctccccatactgccccccgctagtggcaacccaggccccactgcctggcacagctgctgacttctggctcatggtccatgagcagaaagtgtcagtcattgtcatgctggtttctgaggctgagatggagaagcaaaaagtggcacgctactttctcaccgagaggggccagcccatggtgcacggtgccctgagcctggcattgagcagcgtccgcagcaccgaaacccatgtggagcgcgtgctga

SEQ ID NO: 186609 - DNA, 1114 bp, Homo Sapiens
gaaccgcaacccacacacagggcaggagtagggcttctccccagagtgggacagcttgtgccggttaagatgatacacatcacagaagatcttgccgcagatctcacaagccattgcttcctggtccggctcctctttcgggggccgtcggggtcttcagagatgggtagcccattctcacccagcctcggaggaggaaggtcgatgtagcccagctggaggctggtgacaccgtgctgggcctcgtgctgccggagccggttggcatcagtgaacaccttaccacatagaccgcatggaaggatgcctgcctccctcaggccccctggggacccaaacattgagtccagcaggttggccttccttgggcggccccggcctcgcttgccagtcaggggaggggcactggatgccacactggggaatggggaagtcagcagttggggggataggggtccagccaccatgggcaagcggtccaccccaggtaacacaggcaaagaggcttggcctgcaatggctgcaccagccgcccgagctgcctcctcctctggctgcatgctgccggcgatgccattgctgttggctgccaaggctgccccgttggtcatgtccaaagggaagcccaagtccgaggtcccaggggggcgaaaaagcattatatcggcgcgggcagggggtaccaggatctgtacgttggactgtttgatgacttcctggcagatctcgataaccgacctcatcagcaggaacttggcggccgtcatgagttcgggaaagctctccaagcgcaccacgatgcgggaagtgtaggcgaagtccagaatgtccccaaataccttggagctgatagtgtgcatctccagctcccggctgcccccggccccgccgcctggtgctgccgtcgcgccccctacatcagccggacccccgtccgcagctccgccgtcgcccaactgggcgctgaacaccgactcaaagtactcgctgcaggcggccagcacggcgcggtgcgctgggaagctctcgtcgcctacccgcaagagcacgtcgcagaagcgcccgccgtttttgcgctgctggttcaggttgtgcagcatctccgtgctgccaa

SEQ ID NO: 186610 - DNA, 1579 bp, Homo Sapiens
  misc_feature (234)..(246): n is a, c, g, or t
  misc_feature (768)..(1055): n is a, c, g, or t
ttgggtcctaaagcacagttggtgattgtgagatctgttagcggcaggctgagcagatactacttggttttgcttggtatgagatactactgtttgcttagtatgagattttttccagcctgtctcttaaactcctgtgacatcttcaatgatatgtgccctcagttgcagcatagcttctctgctgcctattgccattgctgtctcaaaagttgagtgaattttgaggcgtcnnnnnnnnnnnnncctctcttgggagtcgttgtaaactactgtgtacaagtcattttgtgatatgattctgaacagttggaatagaatcatagttaagtggtacagccatggctatcgtcaggcctgttgcctggagatctctaagttaaggcaacaagacttaaagaattttctaatacacttgtttcacacatggacgttgaggccatagtctttaaaagcttggacctttgtagcacctcaacatgaaagggcattagctatgtttcctgtttttacagtgatcaccaaacagatcttgccactttgattgttaaaaatgaaccacattctagccctggtctgggactttggagggagatgaatttcttgttggaaatgtaaatctagtgtccatatttaatactctcacagctttgtgtttattctctttgctcatggaatagcagaacaagataaacatgggttaagacatttaggagaacctgctgtatctaacccagttggattttctttcatgcttaacacagtagnnnnnnnnnnnnnnnnnnnnnnnnnnnnnnnnnnnnnnnnnnnnnnnnnnnnnnnnnnnnnnnnnnnnnnnnnnnnnnnnnnnnnnnnnnnnnnnnnnnnnnnnnnnnnnnnnnnnnnnnnnnnnnnnnnnnnnnnnnnnnnnnnnnnnnnnnnnnnnnnnnnnnnnnnnnnnnnnnnnnnnnnnnnnnnnnnnnnnnnnnnnnnnnnnnnnnnnnnnnnnnnnnnnnnnnnnnnnnnnnnnnnnnnnnnnnnnnnnnnnnnnnnnnnnnnnnnnnnnnnnnnnnnnntagtaataaccaccgtgtagacaagtgggagggaagaatagaatggcactgtccagctctgggctagccagatcaactcccccacccgtcttcttcctctgtcccagaatggaaaatgatgtatggtcagtcacgctgaagtatagcagcgactgtgttaagagagagcagtgactctctcttctagagaagaggttttcaataacagggcttggaatgaactagaataggaaatagatcttttcagatgctgctttcccatgtaatacaagcgtttctacagggtaccagaggtgtgaaatatgtgacacttaagaacagtgatttttattgggaattttcttagggttattacacttaaagcaacaaccaactagtaacagctccaggaaaggggaatgaatcaactcttggttctttcctgaagacggcagtgttgtggataagtgagtttttaatgccctgggcagtggctacatttgacacttttagaaaaaataaacatatttaataatttttgtttc

SEQ ID NO: 186611 - DNA, 1316 bp, Homo Sapiens
ttggggccttccccctcttggccgggacgttgccccacgttgagtcccacacaacatcctgtgagcctggctccccaggagggcccccagacagctcccaggcacgtcataggcaaagcctgttcccccgactcaggatttccaaggcctggggtcctgctcacccccctttgctctcacgcccagcctgtccccaggtttcagctgggagaggccacctccctcagccaaggaaaacgagaacccccagggtacaggaggaggctggggcaggtccccttgggtgtcactccctcagcccctgcccaggcccactcccgctggtgctggagtacgcactggtgggggggccctgctcagcccaacctggagggtcccagtgtcaccagaaccaggggcacggcaacagcatcgatgggttctgcagcccagggcccccgatgcggggtcagtgcgtggggggcgcagggcccccgatgccgatgcggggtcagtgtgtgtggggcgcagggcctccgatgcggggtcagtgcgtggggggcgcagggccccctcgtgtccagggcactttggtacactgtcccacaaggcacctgtctcagaggaggggccctggcaggcagcgtggcaactcccttccggagcccagctccatgctaacctgcccacagcaaccccacagagccacattccctgctgcacctggtctgcaggggtgtcccaggacaggcccaagtcagcccagcatgcagctgccctcctaccctgaagatgggagtgggctttccaggggacataaggatgtcaggcctggacctcctgggcaggaaagggtgcaggtcctgagggcctgtgccccacagccccagcaccaggtggactgcagcgcagtgggtgggccagtggcagccagggagaagccccccgtcagcaggctggggtctgcccaccagggcctccccacgtctgcctttgagggtgcctgccatgccctgggggatcctggcatctttactggactggaagcaggagacagaacagtgtctgtcccggggtgacttcatcaggagaccgcccacatagagctggaccccgcagctgaagcggaaatgtgagacaggctggcacctccggaaaaactgcctttcagccttggtgttccgtgcaaggtgaaaagaaatagggtcctcccagtttacagcttgaaaatcacgctagtgagtggccctggagaccacgaggggagaatttaaaggccccggctggcagggtctaggtggctggcagaggcacatgcagaccctgcctggagcctg

SEQ ID NO: 186612 - DNA, 1500 bp, Homo Sapiens
actttgtacaaaaaagttggcattgcgttttccagtctcgggacccctgttggagagactatggcgctcaacaagaatcactcggagggcggcggagtgatcgtcaataacaccgagagcatcctaatgtcctatgatcacgtggaactcacattcaatgacatgaagaacgtgccagaagccttcaaagggaccaagaaaggcactgtctaccttaccccttaccgggtcatctttctgtccaagggcaaggatgccatgcagtccttcatgatgccattttatctcatgaaagactgtgagatcaagcagcccgtatttggtgcaaactacatcaagggaacagtgaaggcggaagcgggaggtggctgggaaggctctgcttcctacaagttgactttcacggcagggggcgccattgagttcggacagcggatgctccaggtggcatctcaagcctccagaggtgaagtccccagtggagcctatggctactcttacatgcccagcggggcctatgtctatcccccgccagtcgccaatggaatgtacccctgccctcctggctacccctatccaccgcccccacctgagttctatccaggaccccccatgatggacggggccatgggatacgtgcagcccccaccaccgccctaccctgggcccatggaacctccggtcagcggccccgatgtcccctccactcctgcagccgaagccaaggccgcagaagcagccgccagcgcctattacaacccaggcaatcctcacaacgtctacatgcccacgagccagccgccgccacctccctactacccaccggaagataagaagacccagtaggccctcctgcctccctgcctcccaccctcatctctctaccctacccctcccatcggggctgtgctggggcttggggaggggagggggcgccttgttctccctccaggtctgatcataaacaattaccaggaactagcattgtgggacattagggcccccggcctcgggagaggtgccgcccagcttcccatgccagcccggagcccacagtgctgcccagcgtacctccctcaccgtctggggctcttctgggagcacggagcatcccctgttcctgtttcactctcagcttctcccctcgaagggactctctggccacctcctccaccgcagtccagctccctcagtctggcacccactgctacactcagcctcatgagccacttcagaccagccaggtgtcttcccgggccctgccagaccctgctcacattccctctgctggtctgtgctggtctcagaaggccaccgcgcccgcattccactcagccagggtccagctgcagcccccgccacccttccttcccttccctgtcctgggtcatgttgttgccaccctgtgtgacttttgaagctgtaaaatgagcttccagggcttgggtggcgtcggggcagggccgccgaggctgggaggaagcccttctgccatttgct

SEQ ID NO: 186613 - DNA, 1012 bp, Homo Sapiens
actttgtacaaaaaagttggccataagttatttaatttttaaaagaggaaactcctgagtgagctgtttaagaaatctgagtgtgatctattgttacgttatttataactaggtaaaatgtctgtcgtgatagatttcttttaacgttcagatactgtggttgggttgtctatatttaatatgcagatttgcctgctggaatcataatccatttttaagtgaatgtaagaaatgaaaactactgcatttgtgtcttttgaaggcaaggatccttggattttaaaggaagagtatgtgctttgaaggcactcagagactagtaatagcatatggtttgaagggaaacccattctctttcaattacaagagagcatcacttagcgtgcagtacttctgttacagcatccgatgtgtcctttattttaaattgtaaccataacagccattaatggctttatttcttgtattgctctcatctgggaaaagtctctacttcttcaaacgtaacataaatctattatgaagcttgtcccctagtatgccattataaagaaaaaattcttcgatggtatgcagtgtatctattctgtttgtaaaagatcatgtcaaaatgttctgcctctataatgataatagatggttttgtctttcaggatatttatccacctactgtcttctttgccttaaagggacacttggccatcatttttaggctcgaacttaacactgttaagaaataactgaaatatgatggtatttacattaatttttgaaattcaatggtgggatagaattaggtcaggaaatggaagttgttccaatggtgtgagaactaggagacaagatgattcactttattatttaaaccaagcttcatttttagtttttgttgtttaaatggactggaaagttaagtttttgcagggattgttttgaaataaagagatatgctaactcacagatgaactttgttaagacccctttatttttatataagtctaatatttgaaaa

SEQ ID NO: 186614 - DNA, 1762 bp, Homo Sapiens
  misc_feature (71)..(79): n is a, c, g, or t
ttggctttaatggtccttttccgcagcagtgatatgacagatttgatcagaaattctcttgcttgagagannnnnnnnngtcctctgttgactacatagtttcaaatctctctttatttcatgatgatatataaattgcttttaattatattaaatttttatttttctgcatcagcttcaagtacattattttgtttccctttcctgtttgagccgcttatgccatttctcacagaggggaagaaatacgtagttgctttcattactcttattgcttctttgctgttggggtgtgtgaagtgagcattgattttagtgctgagaatgtaaacggacttacaggatgcttggattagtcatcacaggttcttatgactttgctaccacagttgatatatttctcctcaaacctgttgccctaaggaatatataaaatattgttgatatttctaggtggtgttatcaaggagaagaaattcctgccttgaccagatgtgtggagcatctacaaatgaatgaatagttatttacacacaaaccactgtgtacaaaagcgtccatggagctgtcagtgtctcgagtggtattatgaggcctcaggtgccttggggtacattgtcatgctataagggatgtatatcataaggtatggtggaagaggggccttatgtgaatgattgccacatactgtttctgttgctgctttttttccgattcctttttgtcattggatttgtttgttttgtcatgtggtgaatggtgttttagttattgtgttgctgccagaatcagaatccagttcttgttcttactgccttatagttattgtgttgccaccagaatcagaatccagttcttgttcatactgccttgtagtgagggcagtttaatatctacaaagaagcttttagaagctgaaaaagtcaatgtgattgtgcattctgcttttaagaagctgtttcagctatgaactgtgtatgtgctataagtgtgaggtaccataagttatttaatttttaaaagaggaaactcctgagtgagctgtttaagaaatctgagtgtgatctattgttacgttatttataactaggtaaaatgtctgtcgtgatagatttcttttaacgttcagatactgtggttgggttgtctatatttaatatgcagatttgcctgctggaatcataatccatttttaagtgaatgtaagaaatgaaaactactgcatttgtgtcttttgaaggcaaggatccttggattttaaaggaagagtatgtgctttgaaggcactcagagactagtaatagcatatggtttgaagggaaacccattctctttcaattacaagagagcatcacttagcgtgcagtacttctgttacagcatccgatgtgtcctttattttaaattgtaaccataacagccattaatggctttatttcttgtattgctctcatctgggaaaagtctctacttcttcaaacgtaacataaatctattatgaagcttgtcccctagtatgccattataaagaaaaaattcttcgatggtatgcagtgtatctattctgtttgtaaaagatcatgtcaaaatgttctgcctctataatgataatagatggttttgtctttcaggatatttatccacctactgtcttctttgccttaaagggacacttggccatcatttttatgctcgaacttaacactgttaagaaataactgaaatatgatgggtatttacattaatttttgaaattcaatgg

SEQ ID NO: 186615 - DNA, 951 bp, Homo Sapiens
ttgggagcctgcgagccgagaccgagccatgtggctagaaatcctcctcacttcagtgctgggctttgccatctactggttcatctcccgggacaaagaggaaactttgccacttgaagatgggtggtgggggccaggcacgaggtccgcagccagggaggacgacagcatccgccctttcaaggtggaaacgtcagatgaggagatccacgacttacaccagaggatcgataagttccgtttcaccccacctttggaggacagctgcttccactatggcttcaactccaactacctgaagaaagtcatctcctactggcggaatgaatttgactggaagaagcaggtggagattctcaacagacaccctcacttcaagactaagattgaagggctggacatccacttcatccacgtgaagcccccccagctgcccgcaggccataccccgaagcccttgctgatggtgcacggctggcccggctctttctacgagttttataagatcatcccactcctgactgaccccaagaaccatggcctgagcgatgagcacgtttttgaagtcatctgcccttccatccctggctatggcttctcagaggcatcctccaagaaggggttcaactcggtggccaccgccaggatcttttacaagctgatgctgcggctgggcttccaggaattctacattcaaggaggggactgggggtccctgatctgcactaatatggcccagctggtgcccagccacgtgaaaggcctgcacttgaacatggctttggttttaagcaacttctctaccctgaccctcctcctgggacagcgtttcgggaggtttcttggcctcactgagagggatgtggagctgctgtaccccgtcaaggagaaggtattctacagcctgatgagggagagcggctacatgcacatccagtgcaccaagcctga

SEQ ID NO: 186616 - DNA, 1387 bp, Homo Sapiens
actttgtacaaaaaagttggcacctttggaccgacagctgcttccactatggcttcaactccaactacctgaagaaagtcatctcctactggcggaatgaatttgactggaagaagcaggtggacattctcagcagacaccctcacttcaagactaagattgaagggctggacatccacttcatccacgtgaagcccccccagctgcccgcaggccataccccgaagcccttgctgatggtgcacggctggcccggctctttctacgagttttataagatcatcccactcctgactgaccccaagaaccatggcctgagcgatgagcacgtttttgaagtcatctgcccttccatccctggctatggcttctcagaggcatcctccaagaaggggttcaactcggtggccaccgccaggatcttttacaagctgatgctgcggctgggcttccaggaattctacattcaaggaggggactgggggtccctgatctgcactaatatggcccagctggtgcccagccacgtgaaaggcctgcacttgaacatggctttggttttaagcaacttctctaccctgaccctcctcctgggacagcgtttcgggaggtttcttggcctcactgagagggatgtggagctgctgtaccccgtcaaggagaaggtattctacagcctgatgagggagagcggctacatgcacatccagtgcaccaagcctgacaccgtaggctctgctctgaatgactctcctgtgggtctggctgcctatattctagagaagttttccacctggaccaatacggaattccgatacctggaggatggaggcctggaaaggaagttctccctggacgacctgctgaccaacgtcatgctctactggacaacaggcaccatcatctcctcccagcgcttctacaaggagaacctgggacagggctggatgacccagaagcatgagcggatgaaggtctatgtgcccactggcttctctgccttcccttttgagctattgcacacgcctgaaaagtgggtgaggttcaagtacccaaagctcatctcctattcctacatggttcgtgggggccactttgcggcctttgaggagccggagctgctcgcccaggacatccgcaagttcctgtcggtgctggagcggcaatgacccacccctctccccccgcctgccacctccccccacaagtgccctccaggcttttcttggggaagataccccttttctgaggaatgagtttgcctccgtcccctgcccatgctgggagcccacgctcaccccctcacccctccagctcactccccaacccccaactccgtgtggtaagcaacatggctttgatgataaacgactttactctacaaaaa

SEQ ID NO: 186617 - DNA, 2587 bp, Homo Sapiens
  misc_feature (340)..(357): n is a, c, g, or t
gaaaacaatttgcctggaatcagttacttccttacagatttcccaacaatctgcatttcaaaaataggaagacaatagaaggcagccactgcatttaaaaacattacagctggcactgatacaagagccccgatttgtcactttatacaaggaaataacaaagtctaaatgggtaaaaattagacttttagctattttccccaatacacaccaaactaatatttttatggcttcaagttttacaaatccaatgaagaaacatgatgtaactacctgaaaggtatttaaaagtattaatgaaaaagatctctagaaagcctgtattcaggcccaatcaatnnnnnnnnnnnnnnnnnngtataaccagtggtgtgaacaataatacaagaaaaatttgcaatgttatgatattaaatctataaaatgttttgtgttccataactgtttttcaaataactgctctacgaacaaagaatctgaatgaaaaaagggtcttctctaaaccagcaatttaaggctttgcgcttatgcaattgatcctgtcactctatagaagaatatacatgttatctggaaacaggaattccacattggtgttttagcttccttatatttattgtactgaacattagaaaatatatctagagagtctttcctcaaaatctaataatgttttaagagcctccctagcattaagtgtaaactaccctgggtttgactattttgcctcctccttttaacagggcacatcatcttatataatattctctcaaactgttgtttttcttgtgcctatagctatgacacattatggtatgatattgaatatggttgtggtctcaaaagtaaaaaatagttcaataacccaaacctaatcaagaataaaaaaatatactattaatcccgtgtatctttggattccatctaattttaaatatagacagtagttcagggaacaacaaccaaaaaattcacaaaattattaaaagctttatttacgattggaatcattcaacaaaaaagcaaaagcaaatgagcctgaaaaaggaactaagctgttgtctagaatgtcctcagaacattcgctacctcagtagctaagctgcctttgcacctggctggcatgacaacagtggctcaacatacacagcagttgcactaacagcagcacaaattttccccttcaaacttgcccagaataaagcaagaaaacaaggggagggtataaactctgccaaagtaaatgtatttaaatactgcatggaattgttaacagcctgaaccttttcccctcatttttgatagttgcagattgatgtagtaactgtcatttagcaaatgccgaatgcatgacgaagaaatcaggtggccttaaaaatccaaacacgaatgatactgatgaatgttcttggtatatcttcaaggacttctttcatgacttgacttttctttgtctaaggatagctccagcattaccgagcacctgaagcaaaggtaaagcagctagcaatgttccaaatattcaatcactctagagatagatttctggccagttgttccaacagcacaagtgagattcataaaactcaaaaattttttgagcatctctgtcattattgaaaagtctccttctggcagatattcccgcacagtggttacattgattggactttcctggcagagacacccaagaagtagtgccgtgtaggaggccacaatgcaatcctccatgtgtttgccggcatgctgaagggctttattgaggtcaagttcttcatcctcctcctccttcttatgtttctcttctgtaccatcagtcttttcagttgacacccactgtatttctccacttgtttcttgccactctccactcttatcatgctgagtggtgggagcatctttgatcaactcatctgttttactttctgctagctgggctgcccgctctcgctcaaggaatagctgcactaaagcctggacagcatgaacttgtccacctatccttaaactatcatccccttctccactacagatggaagaatcaaaagagcacgatgtttccatgttgacaagacagtgccgattccgagcactatactccactagatttatcagcagacctaagcccagcactcgaatatcaaatctctgctcctgaggtaggtactttggaacctgaagcacacagttcagcgctgtgcctatgagaccgtcctgctctcctgttttggtgctgccccactcattatcattagttaaattaagcaacaccccgatgatggccctcatgcagtcctccactgctttgcctacatggttagttacattctggtgaggcagaggcttactgtcagctaagcatatgctgtcctcagcacggttgtactgctgaatcagttcttcacaatgctgtaatgctttagctgatgaaacaataagttgggaatctttatatgctatcaagtagctttgattttcgggattatgcacagttacactttctaaaactcgtaaacatctctctgctccccatagtgaggctaccagtttctcttcatcctcatctctacttaaatgatccacccaa

SEQ ID NO: 186618 - DNA, 926 bp, Homo Sapiens
  misc_feature (46)..(71): n is a, c, g, or t
ttggccctccccgagacccaccggaccccgaacccagggcaacgcnnnnnnnnnnnnnnnnnnnnnnnnnnggaatcatgcatcggactacacggatcaaaatcacagagctgaacccccacctcatgtgtgccctctgcggggggtacttcatcgacgccaccactatcgtggagtgcctgcattccttctgcaaaacctgcatcgtgcgctacctggagaccaacaaatactgccccatgtgtgacgtgcaggtccataaaacccggccgctgctgagcatcaggtctgacaaaacacttcaagacattgtctacaaattggtccctgggctttttaaagatgagatgaaacggcggcgggatttctatgcagcgtaccccctgacggaggtccccaacggctccaatgaggaccgcggcgaggtcttggagcaggagaagggggctctgagtgatgatgagattgtcagcctctccatcgaattctacgaaggtgccagggaccgggacgagaagaagggccccctggagaatggggatggggacaaagagaaaacaggggtgcgcttcctgcgatgcccagcagccatgaccgtcatgcatcttgccaagtttctccgcaacaagatggatgtgcccagcaagtacaaggtggaggttctgtacgaggacgagccactgaaggaatactacaccctcatggacatcgcctacatctacccctggcggcggaacgggcctctccccctcaagtaccgtgtccagccagcctgcaagcggctcaccctaaccacggtgcccaccccctccgagggcaccaacaccagcggggcgtccgaatgtgagtcagtcagcgacaaggctcccagccctgccaccctgccagccacctcctcctccctgcccagcccagccacccatccc

SEQ ID NO: 186619 - DNA, 1075 bp, Homo Sapiens
ttggcaaggaattgaaatcaggtttgtttaacttcagatcctgtgctcctaaaatctctctgcccaactattcccaacagaattatccccttatttcctgttactgattctgtttgcccctaggcggcagaagaaaacgacttaccacaccatggtggacctaaaagacttgaaaggctacagccggattgggaagcccatcctgtgtcctgttcaccctgcagaggaactgaggctgttctgtgagttctgtgaccggcccgtgtgccaggattgtgtggtgggggagcatcgggaacacccctgtgacttcaccagcaatgtcatccacaagcatggggactctgtgtgggagctcctcaaaggtactcagccccacgtggaggccctggaggaagccctggctcagatccacataataaacagtgccctccagaagcgagtggaggcagtggcagctgatgtccggacattctcggagggctacattaaggccattgaggagcatcgggacaagctgctgaagcagctggaagacatacgggcccagaaggaaaattccctgcagctgcagaaggcccagctggaacagttactggcagacatgcggactggagtggagttcaccgagcacttgctgaccagcggctcagacttggagatcctcatcaccaagagggtggtggtagaacggctcaggaagctgaacaaagttcaatatagcacccgtcctggagtaaatgataagatacgcttctatcctcaggagaaagcaggccagtgccgtggctatgaaatttatggtacgattaataccaaagaggttgatccagccaaatgtgtcctacaaggagaagacctccacagagcccgggagaaacagacggcctctttcaccctgctttgtaaggatgccgcaagagaaatcatgggcaggggaggagacaacgttcaagttgccgttgtccctaaagataagaaagacagcccagtcagaacaatggtccaggataacaaggatgggacatactacatttcctacacccccaaggaacctggcgtctatactgtgtgg

SEQ ID NO: 186620 - DNA, 1549 bp, Homo Sapiens
ttggaattaacatgtgggaaagaaaattgagattacttcagtggatcttgctctgggcaatgagacgggaagatgtgtggttttaaattggcagggaggaggaggagatgctgcttcctcccaagaagccttacaggcagctcggtctttcaaaaggcgacctaagctacctgacaatgaagttcactgggacagcattataattcaggcaagcacaatgatcatatccagagtcccaaacatttctgtacatctgctacatgaaccccctgcactgactaatgaaatgtattgtttggttgtgactgttcagtcccatgaaaagacccaaatcagagatgtgaagctcaccgctggcttaaaaccaggacaggatgccaatttaactcagaagactcacgtgactcttcatggaacagaactgtgtgatgaatcctacccggctttactcactgacattcctgttggagacttacatccaggggaacagctggaaaaaatgttgtatgttcgctgtggaacagtgggttccagaatgtttcttgtatatgtttcttacctgataaatacaaccgttgaagaaaaagaaattgtttgcaagtgtcacaaggatgaaactgtaacaattgaaacagtctttccatttgatgttgcggttaaatttgtttctaccaagtttgagcacctggaaagggtttatgctgacatcccctttctgttgatgacggacctcttaagtgcctcaccctgggccctcactattgtttccagtgagctccagcttgctccatccatgaccacagtggaccagctcgagtctcaagtggacaatgttatcttacagactggagagagtgctagtgaatgcttttgtcttcaatgcccatctcttggaaatattgaaggtggagtagcaaccgggcattatattatctcttggaaaaggacctcagcaatggagaatatccccatcatcacaactgtcatcactctgccgcacgtgattgtggagaatatccctctccatgtgaatgcagatctgccgtcatttgggcgtgtcagagagtcgttacctgtcaagtatcacctacagaataagaccgacttagttcaagatgtagaaatttctgtggagcccagtgatgccttcatgttctcaggtctcaaacagattcgattacgtatcctccctggcacggagcaggaaatgctatataatttctatcctctgatggctggataccagcagctgccatctctcaacatcaacttgcttagatttcctaacttcacaaatcagctgctcaggcgttttatacctaccagtatttttgtcaagccacagggtcgactcatggatgatacctctattgctgctgcatgatgttcaagaccggcccttggctgttgttacagagatgttgggcagagctatgcaagtgtttcattgtgaactctagctttgatcatggtaaaaaagttaacctttttctattttttaatggatggttataccaactattcagaggaactcttacttcaaaatatt

SEQ ID NO: 186621 - DNA, 1129 bp, Homo Sapiens
ttggcttgtggcggtcgagcgtggcgcaggcgaatcctcggcactaagcaaatatggacctcgcggcggcagcggagccgggcgccggcagccagcacctggaggtccgcgacgaggtggccgagaagtgccagaaactgttcctggacttcttggaggagtttcagagcagcgatggagaaattaaatacttgcaattagcagaggaactgattcgtcctgagagaaacacattggttgtgagttttgtggacctggaacaatttaaccagcaactttccaccaccattcaagaggagttctatagagtttacccttacctgtgtcgggccttgaaaacattcgtcaaagaccgtaaagagatccctcttgccaaggatttttatgttgcattccaagacctgcctaccagacacaagattcgagagctcacctcatccagaattggtttgctcactcgcatcagtgggcaggtggtgcggactcacccagttcacccagagcttgtgagcggaacttttctgtgcttggactgtcagacagtgatcagggatgtagaacagcagttcaaatacacacagccaaacatctgccgaaatccagtttgtgccaacaggaggagattcttactggatacaaataaatcaagatttgttgattttcaaaaggttcgtattcaagagacccaagctgagcttcctcgagggagtatcccccgcagtttagaagtaattttaagggctgaagctgtggaatcagctcaagctggtgacaagtgtgactttacagggacactgattgttgtgcctgacgtctccaagcttagcacaccaggagcacgtgcagaaactaattcccgtgtcagtggtgttgatggatatgagacagaaggcattcgaggactccgggcccttggtgttagggacctttcttatacgctggtctttcttgcctgctgtgttgcgccaaccaacccaaggtttggggggaaagagctcagagatgaggaacagacagctgagagcattaagaaccaaatgactgtgaaagaatgggagaaagtgtttgagatgagtcaagataaaaatctataccacaatctttgtaccagcctgttccctactataca

SEQ ID NO: 186622 - DNA, 1650 bp, Homo Sapiens
  misc_feature (546)..(804): n is a, c, g, or t
  misc_feature (1494)..(1524): n is a, c, g, or t
gttttctttccagtagagagaactgtgcctcttctaggtcagacaccagagttcttgagaactttctgctatattcacagtctgttccagtccaggtaacatgggggcagagagttctgcacaggtgaagtcagaactcagctctccctacctctcctagcctcaattcagttgctttctcattgaagcagatcccctgacctggaagcaaagaaggccctaggatgagaacccagggacagctgggtggtcttagcacaggcagcttccagacttgctccagtcgctgcagctgggacaattaatgaatgcccccaaagaaaattcagcatctcatcagcccttgggagtgagtatgtccatgtttgtataaataaccaccttctcagagcagaagcatagctggtggggggagtaggaactgtgactccctctcccaaccagaacatgccacaaaagtggtgcctttcaaaaaccacttgtaaagtattggtttttgggactatgatgaaaaaacgttagaagggccaggtgcggtggctcatnnnnnnnnnnnnnnnnnnnnnnnnnnnnnnnnnnnnnnnnnnnnnnnnnnnnnnnnnnnnnnnnnnnnnnnnnnnnnnnnnnnnnnnnnnnnnnnnnnnnnnnnnnnnnnnnnnnnnnnnnnnnnnnnnnnnnnnnnnnnnnnnnnnnnnnnnnnnnnnnnnnnnnnnnnnnnnnnnnnnnnnnnnnnnnnnnnnnnnnnnnnnnnnnnnnnnnnnnnnnnnnnnnnnnnnnnnnnnnnnnnnnnnnnnnnnnnnnnnncaaaaacaaacaaaatgttagaaggagcagtggggctgcaagcccttgagatgtccagaggtagctgtcaaagggtggctgctgtccactaaccacaagcatggaccagcccccagccagaccccctgaggctacaaactgtgatgccactgactcaaagctcaggggtctgggagcccacagggcatagacagggtatagtgactgggtccctaaagaggatttagggggtcaggaaaatagcagggtctagcaagacaatacaccaccgggatatactgacctttgacctaccacttggtgtgtgcatcacagagcacattagaaaagggggaagagattctcccccagcccaggctggggtacccagagacctgggaaatgggggagagtcatgtgcatgagtatgtaccatgtccagcctccagcaatagtgggacaggagggccaggggcagttccccagggaatttcttagaaccagagcacagagcgttggagaactcccaaggtggctcactctgcttcactcgtcccctgccacttgtcttatataaggagatagaggctgtcagtcagacaggcaaggccttaagtccagtaggccaaactctgggggataaaacataatcatatcacaggggtattgaggacaatccacatatataaatccttaggtcagggcttctgnnnnnnnnnnnnnnnnnnnnnnnnnnnnnnnggtctcagctccaggtcatcggcctgcgatggggatgggggagctgaaagaggcactcaggggtgggggggtctcagcccagcccctctatgaaacagttttttccagcgtggggcgcagagccaa

SEQ ID NO: 186623 - DNA, 1258 bp, Homo Sapiens
tgtacaaacaagctgtaccaggacgaaaaggcggttttggtgaataacatcaccacaggtgagaggctcatccgagtgctgcaagaccagttaaagaccctgcagaggaattacggcaggctgcagcaggatgtcctccagtttcagaagaaccagaccaacctggagaggaagttctcctacgacctgagccagtgcatcaatcagatgaaggaggggaaggaacagtgtgaggagcgaatagaagaggtcaccaaaaaggggaatgaagctgtagcttccagagacctgagtgaaaacaacgaccagagacagcagctccaagccctcagtgagcctcagcccaggctgcaggcagcaggcctgccacacacagaggtgccacaagggaagggaaacgtgcttggtaacagcaagtcccagacaccagcccccagttccgaagtggttttggattcaaagagacaagttgagaaagaggaaaccaatgagatccaggtggtgaatgaggagcctcagagggacaggctgccgcaggagccaggccgggagcaggtggtggaagacagacctgtaggtggaagaggcttcgggggagccggagaactgggccagaccccacaggtgcaggctgccctgtcagtgagccaggaaaatccagagatggagggccctgagcgagaccagcttgtcatccccgacggacaggaggaggagcaggaagctgccggggaagggagaaaccagcagaaactgagaggagaagatgactacaacatggatgaaaatgaagcagaatctgagacagacaagcaagcagccctggcagggaatgacagaaacatagatgtttttaatgttgaagatcagaaaagagacaccataaatttacttgatcagcgtgaaaagcggaatcatacactctgaattgaactggaatcacatatttcacaacagggccgaagagatgactataaaatgttcatgagggactgaatactgaaaactgtgaaatgtactaaataaaatgtacatctgaagatgattattgtgaaattttagtatgcactttgtgtaggaaaaaatggaatggtcttttaaacagcttttggggggtactttggaagtgtctaataacgtgtcacaatttttggtagtagtatttcgtgagaagttcaacaccaaaactggaacatagttctccttcaagtgttggcgacagcggggcttcctgattctggaatataactttgtgtaa

SEQ ID NO: 186624 - DNA, 1565 bp, Homo Sapiens
ctttgtacaaaaaagttggctataaaatgttcatgagggactgaatactgaaaactgtgaaatgtactaaataaaatgtacatctgaagatgattattgtgaaattttagtatgcactttgtgtaggaaaaaatggaatggtcttttaaacagcttttggggggtactttggaagtgtctaataaggtgtcacaatttttggtagtaggtatttcgtgagaagttcaacaccaaaactggaacatagttctccttcaagtgttggcgacagcggggcttcctgattctggaatataactttgtgtaaattaacagccacctatagaagagtccatctgctgtgaaggagagacagagaactctgggttccgtcgtcctgtccacgtgctgtaccaagtgctggtgccagcctgttacctgttctcactgaaaagtctggctaatgctcttgtgtagtcacttctgattctgacaatcaatcaatcaatggcctagagcactgactgttaacacaaacgtcactagcaaagtagcaacagctttaagtctaaatacaaagctgttctgtgtgagaattttttaaaaggctacttgtataataacccttgtcatttttaatgtacaaaacgctattaagtggcttagaatttgaacatttgtggtctttatttactttgcttcgtgtgtgggcaaagcaacatcttccctaaatatatattaccaagaaaagcaagaagcagattaggtttttgacaaaacaaacaggccaaaagggggctgacctggagcagagcatggtgagaggcaaggcatgagagggcaagtttgttgtggacagatctgtgcctactttattactggagtaaaagaaaacaaagttcattgatgtcgaaggatatatacagtgttagaaattaggactgtttagaaaaacaggaatacaatggttgtttttatcatagtgtacacatttagcttgtggtaaatgactcacaaaactgattttaaaatcaagttaatgtgaattttgaaaattactacttaatcctaattcacaataacaatggcattaaggtttgacttgagttggttcttagtattatttatggtaaataggctcttaccacttgcaaataactggccacatcattaatgactgacttcccagtaaggctctctaaggggtaagtaggaggatccacaggatttgagatgctaaggccccagagatcgtttgatccaaccctcttattttcagaggggaaaatggggcctagaagttacagagcatctagctggtgcgctggcacccctggcctcacacagactcccgagtagctgggactacaggcacacagtcactgaagcaggccctgtttgcaattcacgttgccacctccaacttaaacattcttcatatgtgatgtccttagtcactaaggttaaactttcccacccagaaaaggcaacttagataaaatcttagagtactttcatactcttctaagtcctcttccagcctcactttgagtcctccttggggttgataggaattttctctgctt

SEQ ID NO: 186625 - DNA, 1822 bp, Homo Sapiens
gaagagtatgaaagtactctaagattttatctaagtgcccttttctgggtggggaaagtttaaccttagtgactaaggacatcacatatgaagaaatgtttaagttggaggtgggcaacgtgaattgcaaacagggctgcttcagtgactgtgtgcctgtagtcccagctagatgctctgtaacttctaggccccattttcccctctgaaaataagagggttggatcaaacgatctctggggccttagcatctcaaatcctgtggatcctcctacttaccccttagagagccttactgggaagtcagtcattaatgatgtggccagttatttgcaagtggtaagagcctatttaccataaataatactaagaaccaactcaagtcaaaccttaatgccattgttattgtgaattaggattaagtagtaattttcaaaattcacattaacttgattttaaaatcagttttgtgagtcatttaccacaagctaaatgtgtacactatgataaaaacaaccattgtattcctgtttttctaaacagtcctaatttctaacactgtatatatccttcgacatcaatgaactttgttttcttttactccagtaataaagtaggcacagatctgtccacaacaaacttgccctctcatgccttgcctctcaccatgctctgctccaggtcagcccccttttggcctgtttgttttgtcaaaaacctaatctgcttcttgcttttcttggtaatatatatttagggaagatgttgctttgcccacacacgaagcaaagtaaataaagaccacaaatgttcaaattctaagccacttaatagcgttttgtacattaaaaatgacaagggttattatacaagtagccttttaaaaaattctcacacagaacagctttgtatttagacttaaagctgttgctactttgctagtgacgtttgtgttaacagtcagtgctctaggccattgattgattgattgtcagaatcagaagtgactacacaagagcattagccagacttttcagtgagaacaggtaacaggctggcaccagcacttggtacagcacgtggacaggacgacggaacccagagttctctgtctctccttcacagcagatggactcttctataggtggctgttaatttacacaaagttatattccagaatcaggaagccccgctgtcgccaacacttgaaggagaactatgttccagttttggtgttgaacttctcacgaaatacctactaccaaaaattgtgacaccttattagacacttccaaagtaccccccaaaagctgtttaaaagaccattccattttttcctacacaaagtgcatactaaaatttcacaataatcatcttcagatgtacattttatttagtacatttcacagttttcagtattcagtccctcatgaacattttatagtcatctcttcggccctgttgtgaaatatgtgccattccagttcaattcagagtgtatgattccgcttttcacgctgatcaagtaaatttatggtgtctcttttctgatcttcaacattaaaaacatctatgtttctgtcattccctgccagggctgcttgcttgtctgtctcagattctgcttcattttcatccatgttgtagtcatcttctcctctcagtttctgctggtttctcccttccccggcagcttcctgctcctcctcctgtccgtcggggatgacaagctggtctcgctcagggccctccatctctggattttcctggctcactgacagggcagcggtgcacctgtgccaacttttttgtacaaagttgg

SEQ ID NO: 186626 - DNA, 2106 bp, Homo Sapiens
ttgggttaataacactacagcaatcacacagtgactatagcttgcatttaatgcattacaaaagagggaggacaaactttctagaagaagcatttcatgttgaagggtttcataaaaggacaatcctgaacgttacggattttattaaaaccatatgttattttttgttgctaatcatttgacacttaatcgaaacagaataagttactgtggaaaaaaggatgatccaactcctgaggattgccacctgtgtgtctttaattgattatctttgatagttagagttatttttcagatttttccccctcatactggattgtgatgctctgatatgagcatgcaatgactgatacagaaataggctggagcttcggtgtgtgcttttgctatacagcttacagttctaatgcctgatgtagagatgatgaatttctcctttttaaacctatcttctgtttactccttttgcattatgaaggccctcttcaatgatgtatgtttctgatggaatcagaaaatttcacactagaaaagtgtacctaacttgattcagtgtgagctcttgggacagggaggggagccaggggtagagcttaaagaagctggctctgtaagagttgtatatcaaagtaccttttgctacaaggtgcatatagaagtctaagataagaaatgtaccctctatactttatttttcatgcccctatcatgtttggtgtgccttaaatcttacctttaaatgaagactctatggattgtttacaaatgaagttttacactaggaccagatcgtccatacatgattggtcttctacaataataatgttcaattctttcattttaaatctttctttagggtcatataaagattagttctttcagaaaagctattgctttggtacatgacttagtctaaccagttgggtaatgctgctttgaaaaatagtttgtccctctccccattccaaaaatgaatccattcagtcagaaaaaaagattatcctactatttgtagatgattgctaaggcttgaaataggaaaggggaaagaagggatagaaaagtttcaagtccagtagtgcagtgaatcctttgtgtttgagacttttttacacttatttttgaagttagtgaactttcattgtccctgtggcctcatatttatagagcttcttaactgttttgtacctcagattgtttttagatgtcattgaagattgagatgtacaaattatgttgaatttaacctgtttctcttggagaaattgcctctgatatctttctaacttaatcttagtgtgttctaggaacagttttccataagaggacaacttctcaatgatcatgatagttatttagtaagaaataatggttgttaatcaaatacatgttatgtcttgtccttctctgatttttctgacttggattccttaatttgcagtgatgtcttagaaatggaaaaagtatcctctgggctttcagactttcagcaacaacagccagtgggatacctctgagttcttgtgttctagtctcttgtatgtcctgaaaggcagcaggagcatttttggggtcacactgatattttgttaaagcagagtttcctgcatggtttatggtgctgctctaatattttctctttaaaactgtgtcaatttttggagaatgaatttttcaaccttttcattgtggaggatttttcccacaaggtagtaatgggcagtggatcaaaatcctatcataaatgattgaattttcaatgtcatagtgtgtggaaatactactccctttcctccatgtctatcttcttagatgttctgtctttgtcatcatctgctccagcacatactttggactcctttacaggtgaccttcccccctccctcctcaataggtgtcctcagtgttttctaagcatttaaaactgaatttgacaagtggctaaaaacttagtctgagacttgtacttagtatatggttaattatagaaacaacaactattttaaacagttactctgttgactgctctttatgactacacttgtatgccaggaggcagcagcctatacaccattagactctttacaagcaaccaacgaacaattg

SEQ ID NO: 186627 - DNA, 949 bp, Homo Sapiens
taacacatactgcagaaccaactgtacatgtacttcggatgatacagtgatcaataatagggctacaatttactgtaatctctaagcagtggtgtgcattgtggtgttgtgcagatttgtcatcagggttaaaccttattgtcatatatccaacataagcatcttcagagccttccataaaaacgaaggttgaatctctagtgttttcaattataactttgtctgccactttcccaggtgctgcaccaatcatggtgattggagattcaatatatatccattcatcagtatatattccagaatgaacaaagataagtccatcaaaatgagcctcttgtaccccaccaagggcatcttcaatagtatcataatacaacatattttctcttcctttatatcttgcagggttactgtagaaatgttcagcaaatcctggctttacatgtgcacctttatacaactgctggaaactctctttccagggatttggatgttcatactcttctggattaatctggtagaattttccaggttcaggatgcatcatagggcgagtatattcaaatacttccatatataaacgtttccacaaaattggatcattagcaagttcactgaagcgtttacatacacaagctgctctacaaagatcctgttccagcaagtaagagaagatttttagaaccacttcatctggcagtttctcctgaagatactgttcagcaggtgctgctgatagatcttgtgattttccagacactcttgcacgtttttcacgatgaccaaagttttctgtagttgaagttgaggcgccctccatactgttctttgtgggacacgctgttcttttcggcaaaagagtttttctacgaagttggtatggactattttgtgcaccaggacctgattcttctgcaaccatatctgcaggcacatcatcatcccccaa

SEQ ID NO: 186628 - DNA, 1485 bp, Homo Sapiens
  misc_feature (1289)..(1329): n is a, c, g, or t
ttgggctcgtcagccggtcggccgccgcctccagccgtgtgccgctatgggagtcccggcgttcttccgctggctcagccgcaagtacccgtccatcatagtcaactgcgtggaagagaagccaaaagaatgcaatggtgtaaagattccagttgatgccagtaaacctaatccaaatgatgtggagtttgataatctgtatttggatatgaatggaatcatccatccctgtactcatcctgaagacaaaccagcaccaaaaaatgaagatgaaatgatggttgcaatttttgagtacattgacagacttttcagtattgtaagaccaagaagacttctctacatggcaatagatggagtggcaccacgtgctaaaatgaaccagcagcgttcaaggaggttcagggcatcaaaagaaggaatggaagcagcagtcgagaagcagcgagtcagggaagaaatattggcaaaaggtggctttcttcctccagaagaaataaaagaaagatttgacagcaactgtattacaccaggaactgaattcatggacaatcttgctaaatgccttcgctattacatagctgatcgtttaaataatgaccctgggtggaaaaatttgacagttattttatctgatgctagtgctcctggtgaaggagaacataaaatcatggattacattagaaggcaaagagcccagcctaaccatgacccaaatactcatcattgtttatgtggagcagatgctgatctcattatgcttggccttgccacacatgaaccgaactttaccattattagagaagaattcaaaccaaacaagcccaaaccatgtggtctttgtaatcagtttggacatgaggtcaaagattgtgaaggtttgccaagagaaaagaagggaaagcatgatgaacttgccgatagtcttccttgtgcagaaggagagtttatcttccttcggcttaatgttcttcgtgagtatttggaaagagaactcacaatggccagcctaccattcacatttgatgttgagaggagcattgatgactgggttttcatgtgcttctttgtgggaaatgacttcctccctcatttgccatcgttagagattagggaaaatgcaattgaccgtttggttaacatatacaaaaatgtggtacacaaaactgggggttaccttacagaaagtggttatgtcaatctgcaaagagtacagatgatcatgttagcagttggtgaagttgaggatagcatttttaaaaagagaaaggatgatgaggacagttttnnnnnnnnnnnnnnnnnnnnnnnnnnnnnnnnnnnnnnnnntcaaccagctttcactcctagtggaatattaactcctcatgccttgggttcaagaaattcaccaggttctcaagtagccagtaatccgagacaagcagcctatgaaatgaggatgcagaataactctagtccttcgatatctcctaatacgagttt

SEQ ID NO: 186629 - DNA, 777 bp, Homo Sapiens
ttggctagtggcgccgacgggccgggccgggccgggaccggggccgaggcgaaccgaggggcctgtgcggccgcccggcccggccgcggatcaggctcctggaaccatgggcctcaggccctgaggatacggggctcccggtggccatgacgacgggtgactgctgccacctccccggctccctgtgtgactgctccggcagccctgccttctccaaggtcgtggaggctacgggcctcggaccgccccagtatgtggcacaggtgacttcaagggatggccggctcctctccaccgtcatccgtaccttggacacaccgagtgatggtcctttctgccggatctgccatgagggagcgaacggggagtgcttgctgtccccgtgtggctgcaccggcacgctgggtgccgtgcataagagctgtctggagaagtggctttcctcatctaacaccagctactgcgagctgtgccacacggagtttgcagtggagaaacggcctcgacccctcacagagtggctgaaggacccggggccgcggacggagaagcggacactgtgctgcgacatggtgtgtttcctgttcatcacaccgctggccgccatctcaggctggttgtgcctgcgcggggcccaggaccacctccggctccacagccagctggaggccgtgggtctcattgccctcaccatcgccctcttcaccatctatgtcctctggaagcctggtctccttccgctaccactgcccagctgtactcccgagtggagaaaga

SEQ ID NO: 186630 - DNA, 869 bp, Homo Sapiens
  misc_feature (189)..(247): n is a, c, g, or t
  misc_feature (323)..(374): n is a, c, g, or t
ttggggcagaggctgttctggaaggcttcttgtcttctgacgtccccacagccctgggcccctcgtgtctctttgtgtcccccactgtagaggacggtgagccgcagctgcatcaacctccttttacctttagataggtgaatttttacaattcagttttacatgttttgggcagtattttgtcttaannnnnnnnnnnnnnnnnnnnnnnnnnnnnnnnnnnnnnnnnnnnnnnnnnnnnnnnnnnaaagtatattttttctataaacatcctttgctgctacattagaacttttatagcctaaacaattgcagttggtgtnnnnnnnnnnnnnnnnnnnnnnnnnnnnnnnnnnnnnnnnnnnnnnnnnnnngcagtgagcatcactacagtctcagtcaacagtgtgaatgtatcatgttttactttaaatgtgtgtgtgatacttcttcattatgtcctgcgctgcagtgagacctgggtgaaaatcaggaaccgcacacagccacatcttcctagacctaagagtaaattatggaggattttatttatgtctatttatatgtaaatgtcattgaagacaaaggtcaaatatttgtctgtttgtagatcacaggcaccagttggtcttcagggacctcatagcccctcggtggtgccttctcaaggcagtgttcctggaggctcccgtcagggtcagcccatgcacctgccctgggtgaggaagtagcattgctgctggatgagaaacgcctgcgctgctctgttaaactggtgctgaaacaaaaggtaacgctaggttgaagtctagaatgaaagaaatctgaatccatgtcattcataaccccttgatctgtagtgtcatggg

SEQ ID NO: 186631 - DNA, 1773 bp, Homo Sapiens
  misc_feature (1180)..(1238): n is a, c, g, or t
  misc_feature (1327)..(1379): n is a, c, g, or t
ttggctcagcggcgggaagctggcggcagcggcggtggcggtggctgagcagaggacccggcgggcggcctcgcgggtcaggacacaatgtttgcacgaggactgaagaggaaatgtgttggccacgaggaagacgtggagggagccctggccggcttgaagacagtgtcctcatacagcctgcagcggcagtcgctcctggacatgtctctggtgaagttgcagctttgccacatgcttgtggagcccaatctgtgccgctcagtcctcattgccaacacggtccggcagatccaagaggagatgacgcaggatgggacgtggcgcacagtggcaccccaggctgcagagcgggcgccgctcgaccgcttggtctccacggagatcctgtgccgtgcagcgtgggggcaagagggggcacatcctgctcctggcttgggggacggccacacacagggtccagtttctgacctttgcccagtcacctcagcacaggcaccaaggcacctgcagagcagcgcctgggagatggatggccctcgagaaaacagaggaagctttcacaagtcacttgatcagatatttgaaacgctggagactaaaaaccccagctgcatggaagagctgttctcagacgtggacagcccctactacgacctggacacagtactgacaggcatgatggggggtgccaggccgggcccctgcgaagggctcgagggcttggctccggccaccccaggccctagctccagctgcaagtccgacctgggcgagctggaccacgtggtggagatcctggtggagacctgagcaggagccctgagtgctcacagccgcctctgacgcattgacacgtgagcactggctcccacggagggtgcgcctgccgccagcggcccagccttgctgccctgtctgctgattctgagaaatcccagaacagcccattaccagtggggctgcagccctaggcccgtcccactcacctcccccctgtggagcgccaggcagaggctgttctggaaggcttcttgtcttctgacgtccccacagccctgggcccctcgtgtctctttgtgtcccccactgtagaggacggtgagccgcagctgcatcaacctccttttacctttagataggtgaatttttacaattcagttttacatgttttgggcannnnnnnnnnnnnnnnnnnnnnnnnnnnnnnnnnnnnnnnnnnnnnnnnnnnnnnnnnncagctattttcttaaaagtatattttttctataaacatcctttgctgctacattagaacttttatagcctaaacaattgcagttggtgnnnnnnnnnnnnnnnnnnnnnnnnnnnnnnnnnnnnnnnnnnnnnnnnnnnnngcagtgagcatcactacagtctcagtcaacagtgtgaatgtatcatgttttactttaaatgtgtgtgtgatacttcttcattatgtcctgcgctgcagtgagacctgggtgaaaatcaggagccgcacacagccacatcttcctagacctaagagtaaattatggaggattttatttatgtctatttatatgtaaatgtcattgaagacaaaggtcaaatatttgtctgtttgtagatcacaggcaccagttggtcttcagggacctcatagcccctcggtggtgccttctcaaggcagtgttcctggaggctcccatcacggtcagcccatgcacctgccctgggtgaggaagtagcattgctgctggatgagaaacgcctgcgctgctctgt

SEQ ID NO: 186632 - DNA, 981 bp, Homo Sapiens
ttcgatacgagtagccagatagagcatctctccctgagcagccaactggtgaacagacaaagaatttgctaacagaggtgtggtagagacctcatttcctctgtgtttgttggttaaagtggttgactgttttatgggtgagaaatgctttgttgtagagggggtgtagacatgccttacttgaattcccggagaaggagatgtatggatattgcattcagctttaaataggacagatgccacctccaggtcagagttaacctgatcttgaatatttttactatcttcttcatttaaggacttcacaaatcgagaacacacattcatatcaaatcggttaggcaatatgaatttcattcccatggcaacaccctgagctgacccttcttctgaatttgggtccagtggatgttctattttaatgtctggcatgccagttaggctataagtgctgggacactcttccacgataagctgggctccaatatccagatttgttgatgtatccatgatttcaactgtagtttcaataactaaaacatttcttcatgatttcctcttggttttgtaagagcagtatccagtgtgttcttggaatctggatatttaaaaataggcgacaggtgtcccagcgtcccgagacaggagcccgctgtctcccgctggaggggagactcttgcaggaaagaaagtccgttctgtcgccaccggccagctgtgcccgaaaagtcccaggaagaaactctcgctcatccgcggcgagcggatcccgggcacaggggctggaggccgacccggtgagagtgcaaggtctcgcgaccaccgacgacagcagacagcgagtcgggccttcccatctgaggccagcttcagtacaggcctccaagcccgggcttgttttggccgcgacgtcacttccgatttcttctttcgccttctggctaaaaaacgttccgcagcaatgcagctgaaactttcggg

SEQ ID NO: 186633 - DNA, 702 bp, Homo Sapiens
ggccggagcgcccccgcgagctcggaccaggctcagccgcccagtgggctcaggcccagagcccagagcaaccagcacaatagcgtccaacagctggaacgccagcagcagccccggggaggcccgggaggatgggcccgagggcctggacaaggggctggacaacgatgcggagggcgtgtggagcccggacatcgagcagagcttccaggaggccctggccatctacccgccctgcggccggcggaagatcatcctgtcagacgagggcaagatgtacggccgaaatgagttgattgcacgctatattaaactgaggacggggaagactcggacgagaaaacaggtgtccagccacatacaggttctagctcggaagaaggtgcgggagtaccaggttggcatcaaggccatgaacctggaccaggtctccaaggacaaagcccttcagagcatggcgtccatgtcctctgcccagatcgtctctgccagtgtcctgcagaacaagttcagcccaccttcccctctgccccaggccgtcttctccacttcctcgcggttctggagcagcccccctctcctgggacagcagcctggaccctctcaagacatcaagccctttgcacagccagcctaccccatccagccgcccctgccgccgacgctcagcagtttatgagcccctgggccccgctcccctca

SEQ ID NO: 186634 - DNA, 1601 bp, Homo Sapiens
  misc_feature (49)..(64): n is a, c, g, or t
ttggctggtgttagatcgagctaccctctaaaagcagtttagagtggtnnnnnnnnnnnnnnnncacaccaaacgctcgcagccacaaaagggatgaaatttcttctggacatcctcctgcttctcccgttactgatcgtctgctccctagagtccttcgtgaagctttttattcctaagaggagaaaatcagtcaccggcgaaatcgtgctgattacaggagctgggcatggaattgggagactgactgcctatgaatttgctaaacttaaaagcaagctggttctctgggatataaataagcatggactggaggaaacagctgccaaatgcaagggactgggtgccaaggttcatacctttgtggtagactgcagcaaccgagaagatatttacagctctgcaaagaaggtgaaggcagaaattggagatgttagtattttagtaaataatgctggtgtagtctatacatcagatttgtttgctacacaagatcctcagattgaaaagacttttgaagttaatgtacttgcacatttctggactacaaaggcatttcttcctgcaatgacgaagaataaccatggccatattgtcactgtggcttcggcagctggacatgtctcggtccccttcttactggcttactgttcaagcaagtttgctgctgttggatttcataaaactttgacagatgaactggctgccttacaaataactggagtcaaaacaacatgtctgtgtcctaatttcgtaaacactggcttcatcaaaaatcccagtacaagtttgggacccactctggaacctgaggaagtggtaaacaggctgatgcatgggattctgactgagcagaagatgatttttattccatcttctatagcttttttaacaacattggaaaggatccttcctgagcgtttcctggcagttttaaaacgaaaaatcagtgttaagtttgatgcagttattggatataaaatgaaagcgcaataagcacctagttttctgaaaactgatttaccaggtttaggttgatgtcatctaatagtgccagaattttaatgtttgaacttctgttttttctaattatccccatttcttcaatatcatttttgaggctttggcagtcttcatttactaccacttgttctttagccaaaagctgattacatatgatataaacagagaaatacctttagaggtgactttaaggaaaatgaagaaaaagaaccaaaatgactttattaaaataatttccaagattatttgtggctcacctgaaggctttgcaaaatttgtaccataaccgtttatttaacatatatttttatttttgattgcacttaaattttgtataatttgtgtttctttttctgttctacataaaatcagaaacttcaagctctctaaaataaaatgaaggactatatctagtggtatttcacaatgaatatcatgaactctcaatgggtagggtttcatcctacccatttgccactctgttttctgagagatacctcacattccaatgccaaacaattctgcacagggaagctagaggtggatacacgtgttgcaagtataaaagcatcactggg

SEQ ID NO: 186635 - DNA, 2765 bp, Homo Sapiens
ttggcaaatgggcttgggcggctcctcggcgggtggcggtggtggccgtagcggttcctcctggccctgttaatgtcggggccaggccgggggaggatggcgccctagaacccggccttgctggggtaggggcgggaggggacggggtggggaccggccatgtcggaggtgacccggagtctgctgcagcgctggggcgccagttttaggagaggcgccgacttcgactcttggggccagctggtggaggcgatagacgagtatcagatattagcaagacatctacaaaaggaggcccaagctcaacacaataattctgaattcacagaagaacaaaagaaaaccataggcaaaattgcaacatgcttggaattgcgaagtgcagctttacagtccacacagtctcaagaagaatttaaactggaggacctgaagaagctagaaccaatcctaaagaatattcttacatataataaagaattcccatttgatgttcagcctgtcccattaagaagaattttggcacctggtgaagaagagaatttggaatttgaagaagatgaagaagagggtggtgctggagcagggtctcctgattcttttcctgctagagttcccggtactttattaccaaggttgccatcggaaccaggaatgacattactcactatcagaattgagaaaattggtttgaaagatgctgggcagtgcatcgatccctatattacagttagtgtaaaggatctgaatggcatagacttaactcctgtgcaagatactcctgtggcttcaagaaaagaagatacatatgttcattttaatgtggacattgagctccagaagcatgttgaaaaattaaccaaaggtgcagctatcttctttgaattcaaacactacaagcctaaaaaaaggtttaccagcaccaagtgttttgctttcatggagatggatgaaattaaacctgggccaattgtaatagaactatacaagaaacccactgactttaaaagaaagaaattgcaattattgaccaagaaaccactttatcttcatctacatcaaactttgcacaaggaatgatcctgacatgatgaacctggaacttctgtgaattttaccactcagtagaaaccatcatagctctgtgtagcatattcacccttcaacaggcaggaagcaagccgtacccagaccagtaggccggacggagtccaatgcaaagctgtaccacagaattcagagtccagcacatcacactgacgtataggactccttgggatacaggtttattgtagattttgaaacatgtttttacttttctattaattgtgcaattaatagtctattttctaatttaccactactcctaccctgcttcctggaacaatactgttgtgggtaggatgtgctcatcttcagacttaatacagcaataagaatgtgctagagtttacacatctgttcacttttgctccaatatgctcttttgacttaacgtcaagctttgggttgatgtgggtagggtagtgtcaaactgctttgagaggaatgggaccagttctgctgcctaagaaggtctgtctggatgtttataggcagcacctctgaagtggcctaaattcaccctgatctgatagttttcctgcttagaaagtgtgccttggccagatcagtatcccacatgggagtgttccctaggttgtagctgtgattgtttccagatgaccagattgtttttctgaaaatgagcatatttttagtcatgtcgattagctgttcttctacatcacattgttactctttctgatgatgattctagggttaacattggaaccatctcaaaataattacaaagttttagatgggtttacaatgtcttctaaacaatgtaatctaaaaataattgagtcagatgctaacgagatactgcaggcataactgctgtttttctgacaactgattgtgaaaccttaaaacctgcatacctcttcttacagtgaggagtatgcaaaatctggaaagatattctattttttttatataggtagataggatcgccatttatttcctatttagatatactgacattcatccatatgaaaatatgcaggtcattagcttactataatttacttttgacttaatggggcataaataaaactttcatagtacacatgaggtggatatttgatacacagaacatttgcggtgggctttctgtgggttagatgtaaagcccacatattttaatattcactattttaaatgagcaatgcatgaggggaatgcagtgtcagtacctggcctatttttaaactagtgtaatcaccctagtcataccattcagtatgtttgctttttaaaataagtaaccacaattaagttgttgtagcccttgcacttcaagagatctagtctttactttcagttgtctgttaggtccattctgtttactagacggatgttaataaaaactatgcgagcctgaatgaattctcagccaaatttagtcttgtctctcatcttgattggattaattccaaattctaaaatgattcagtccacaatagctctaggggatgaagaatttgccttactttgcccagttcctaagactgtgagttgtcaaatccctagactgtaagctcctcaaggagcaagaggcgcattttctccgtgtcatgtaatttttctaaatgtttggcagcactctgtacccctgtggagtactcagtaccttttgtttgatgttgctgacaaacctg

SEQ ID NO: 186636 - DNA, 986 bp, Homo Sapiens
tgagccactgcacctagccttaccacccattttttatatatgttgtgtgttctagtgctttggttcattcctaacttggaggaagatcttaagtaaggttagagtaaggatatagatgatgaacttattcaatgcaggagttgctctcatcctttgagaccataagaattttcttagttgagtcttcaagtagctattgcttcttatttatgtgctttcttcttacttcattttgtgtacctctttatatgttaggtgctcccactctttcccggcttttagaagctggtcctacacagttcaccacacctcttgcttccttcactactgttgccagtgagcctccagttaaacttgtgccaccccctgtagagtctgtgtcccaagctaccattgtcatgatgcctgcgctgccagcaccatcctctgctccggctgtctccactactgaaagtgtagctccagtgagtcaacccgacaactgtgttcccatggaggctgtgggggatccacatactgtgactgtttccatggacagcagtgaaatatccatgatcatcaattctatcaaagaagagtgttttcgatcaggggtagcagaggctcctgttggatcaaaggctcccagcatagatgggaaggaagaattagatctggctgagaagatggatattgctgtgtcttacacaggtgaagagctggattttgagactgttggagacatcattgccatcattgaggacaaggtagatgatcatcctgaagtgctggatgtggcagcagtggaagcagcactgtcattttgtgaagaaaatgatgatcctcagtccctgcctggcccctgggagcatcctatccagcacgagcgggacaagccagtacctctctctgcaccagaaatgacggtcaagcaagagagactgggactttgaggaaacggaaaacaagggaatacatgaactggtggacatcaggagcccagtgca

SEQ ID NO: 186637 - DNA, 1695 bp, Homo Sapiens
ttgggaagatggttattgacatggtgttagcaactgatatgtctaaacatatgagcctgctggcagacctgaagacaatggtagaaacgaagaaagttacaagttcaggcgttcttctcctagacaactataccgatcgcattcaggtccttcgcaacatggtacactgtgcagacctgagcaaccccaccaagtccttggaattgtatcggcaatggacagaccgcatcatggaggaatttttccagcagggagacaaagagcgggagaggggaatggaaattagcccaatgtgtgataaacacacagcttctgtggaaaaatcccaggttggtttcatcgactacattgtccatccattgtgggagacatgggcagatttggtacagcctgatgctcaggacattctcgataccttagaagataacaggaactggtatcagagcatgatacctcaaagtccctcaccaccactggacgagcagaacagggactgccagggtctgatggagaagtttcagtttgaactgactctcgatgaggaagattctgaaggacctgagaaggagggagagggacacagctatttcagcagcacaaagacgctttgtgtgattgatccagaaaacagagattccctgggagagactgacatagacattgcaacagaagacaagtcccccgtggatacataatccccctctccctgtggagatgaacattctatccttgatgagcatgccagctatgtggtagggccagcccaccatgggggccaagacctgcacaggacaagggccacctggcctttcagttacttgagtttggagtcagaaagcaagaccaggaagcaaatagcagctcaggaaatcccacggttgacttgccttgatggcaagcttggtggagagggctgaagctgttgctgggggccgattctgatcaagacacatggcttgaaaatggaagacacaaaactgagagatcattctgcactaagtttcgggaacttatccccgacagtgactgaactcactgactaataacttcatttatgaatcttctcacttgtccctttgtctgccaacctgtgtgccttttttgtaaaacattttcatgtctttaaaatgcctgttgaatacctggagtttagtatcaacttctacacagataagctttcaaagttgacaaacttttttgactctttctggaaaagggaaagaaaatagtcttccttctttcttgggcaatatccttcactttactacagttacttttgcaaacagacagaaaggatacacttctaaccacattttacttccttcccctgttgtccagtccaactccacagtcactcttaaaacttctctctgtttgcctgcctccaacagtacttttaactttttgctgtaaacagaataaaattgaacaaattagggggtagaaaggagcagtggtgtcgttcaccgtgagagtctgcatagaactcagcagtgtgccctgctgtgtcttggaccctgccccccacaggagttgtacagtccctggccctgttccctacctcctctcttcaccccgttaggctgttttcaatgtaatgctgccgtccttctcttgcactgccttctgcgctaacacctccattcctgtttataaccgtgtatttattacttagtgtatataatgtaatgtttt

SEQ ID NO: 186638 - DNA, 2643 bp, Homo Sapiens
  misc_feature (326)..(335): n is a, c, g, or t
  misc_feature (1182)..(1214): n is a, c, g, or t
  misc_feature (2369)..(2384): n is a, c, g, or t
ttggccaacctgaacccagagttcatctccgtctgcaacaacgccacctgggccattggtgaaatctgcatgcagatgggtgagtgccctgcaagtggcaacacgcgccccccattagcctgttctcaacctgggggcgggagcctagctctgactgacagcttccttcaaggcaagtctcttgggggtcgtcaggggtggagccaagcagaaaggtcatttgtgattggcttctctaaagaggagggataggagggctgttctgattggaccgttttgtgtagttggctaaaagactcattcggattggttgggtgactttggcnnnnnnnnnncctttgacttgggcagcgtgttgtcaccttagcgactccagagaagcctctgttgtttggagggtgtgggtctgtccctggttggccagggattctgggtggggattagccggagaaggtcttttgtttcctcactggtagtggttggccagtctctagttggaactggggcgagtagtgagtgaggtggggcggccccctggcccctgtgggtggcgggggctgtgcagggctctgactgggtgctcccccaggggcagagatgcagccttatgtgcagatggtcctcaacaacctggtggaaatcattaaccgacccaacacacccaagacactgctggaaaacacagccatcaccatcggccgcttgggctacgtgtgcccccaggaggtggcacccatgctgcagcagttcatccggccttggtgcacgtccctcaggaacatcagggacaacgaggagaaggactcagccttccgcggcatctgcatgatgatcggtgtcaacccggggggcgttgtgcaggactttattttcttctgcgatgctgtagcctcctgggtgagcccgaaggatgaccttcgggacatgttttataagattctccacggcttcaaagaccaagttggggaagataactggcagcagttctctgagcaattcccgccgctgctcaaggagaggctggcggctttctatggggtctaggtgatcatggagactgccaggtttctgtctgcgtcgtcgtcggagggattactggggagtgcgctgcatccggaagtcgctgtgccctggttgaggggggttagggaggagtgagtgggactcaaatccagatgcctnnnnnnnnnnnnnnnnnnnnnnnnnnnnnnnnnacttgccctcctggcaggtgggtggggccaccatgctcatcctacaaacggggaggtgggggggacttctggtgggcaagggcccctgggctctaatagggtcatctctggcagcccacttgggccagctacgtgggagggaggaattacacagctgaccgaatccggcttcggatgaggtgagggaggagcaggtcaggaggggggccctcgtagggacgcgtacactcacacggacacacatggccacacgcatgtgcgggtgccataaccggcgaggctgggccagccgctccaccatttccccgactgcatggagacagtagaattagtgaacccctgagttaacccgtaaggccttccgtgtaacctgcatctagagtttaagaagcttctgctgttttgccggaattggcggtgactggggagggctgggtgggtggggggcctcaggcgggatctcggggcggggggaggaggatggtgaccttgggagtcgccctgtcagcacgcacatgcttgggacccactccacacactccctgccagctttgttgcagcctcagctggtggtgtctccgtccttatcctagcctagctcgcagggtgagaaccactggagtggctggggctggccagaggtcaccgtttctccttcctgtgtgctccagtggcttttgaagacactgggttgggacctttttcctgaagagagctgggtgtagccagagctactggcacctaccccgagcatctctctctgtaagcagcttcaggggcagtccgtttctctgtgcttctgaaagcccccttctcacgtttcaggccccagttttaactcaaggcctggggcaggggcgtttgattgatgatgacagaggacacaggtttttgccagcaaaaaggaaaaccaaggcttggtggaagggaaaggtggtgtgtcccctgttccctattccatctccctgggacttcctgctcatcatagtacccagtgagcccagagatcctactagactgggtcagcaattctagagaaccttccggaatagtctgggaacatggtcaaggtggaaggggctcccctagagagggtgggggtgtagttacttcccagttggccagaaaactgggccttgcagacccccttagcannnnnnnnnnnnnnnnccttccctgctttctacttctttggggagccccttgtgttttggagtctgactggagtctcgcatcctggggcctgctccatccatccctcctgggcgccagaccctccatccaagccctgtgtctttccatagtcagggtcaggccctgcatctattcccaagggggcactcagtacacatttccataaaattagctgggtgtctctgcacgctcacccccatgaaacttcgagcaagtctctggaagccaatttgtt

SEQ ID NO: 186639 - DNA, 1730 bp, Homo Sapiens
tacaaaaaagttggatagtatgggaattcctattatgccatcactggtgcaagctatatttaacggagatcctgatgaagttcgagcactaatatttaagaaagaagatgttaactttcaggacaatgaaaagcgaaccccattgcacgccgcagcttaccttggagatgcagaaatcattgaacttcttattttatctggagctagagttaatgccaaagacagcaaatggttgacacctttacacagagcagttgcatcttgtagtgaggaagcagttcaggtacttttgaagcattctgcagatgttaatgctcgagacaaaaattggcaaacccctttacatatagctgctgctaataaagctgtaaagtgtgctgaagctttggtacctcttctgagtaatgtaaacgtatctgatcgagcagggaggactgcattacatcatgcagctttcagtggacatggtgagatggtcaaactactcttgtctagaggtgccaatattaatgcttttgacaagaaagataggcgtgctatccattgggcagcatatatggatgaatgaaccaaatgcctatggaaatacacctcttcatgtagcctgctataatggacaagatgttgtagtgaatgaacttatagactgtggtgctattgtgaatcaaaagaatgaaaaaggatttactcctttgcactttgctgctgcatcaacacatggagcattgtgtttagagcttctagttggcaatggggccgatgtcaatatgaagagtaaagatgggaaaaccccactacacatgactgctctccacggtagattctcccgatcacaaaccattatccagagtggagctgtaatcgactgtgaggataagaatggaaatacccctttgcacatagcagcacggtatggccatgagctgctgatcaacactcttattacaagtggtgctgacactgcaaagcgtggcatacatggaatgttccccctccatttggcagccttaagcggcttttcagattgctgcagaaaacttctttcttcaggatttgatatagataccccagatgattttggcaggacttgtctacatgcagctgcagctggagggaatttggagtgcctaaaccttctgctgaatactggtgcagactttaataaaaaggacaaatttgggagatctccactgcactacgctgctgccaactgcaattaccagtgcctgtttgctcttgtgggatcaggagcaagtgtgaatgaccttgatgaaagaggctgcacacccctgcactatgcagctacatcagacacagatggcaagtgcctggaatacttattaagaaacgatgcaaatccagggatccgtgataagcaaggatacaacgcagttcattattcagctgcttatggtcaccgtctatgtcttcagctgattgcaagtgaaactcctctagatgttttaatggaaacctcaggaacagacatgctgagtgattcagataatagagcaacaataagccctttacacttggctgcctatcatggtcaccatcaagcactggaagtgttggtacagtctttgttagatcttgatgtcagaaatagtagtggaagaacacccctagatcttgcagcttttatgggccatgttgatgtgtggatgtactcattattcaaggagcctcaatcttagtaaaagattacatttttgaagaggacacctatt

SEQ ID NO: 186640 - DNA, 1081 bp, Homo Sapiens
tttgtacaaaaaagttggtaggatccgaccggggccaagagggataagaaaacttctctgggtgcccacgtggtactgagcgcccttgggagggctctggagaagaccatcgccttccaggggaaggaaactgaggtccagaaaagttatgactcgccccaaggggattgcctggcaggacgtgaaggggaagaggcccaccctggagtaaccctcactggagaatccagagacacgccgctttttggatgcctcctatgcctggcgggagtcttgtctgagctggcaccaccacacggcccacgacatcttcgcagggaagcctgtggaccctctgccaggctccacaagaggtcaggacagtgcagtgtgttcacaaggccagtttctgatcgtccgccccgaggctgaggaccagtaggcagctcccaagatgggtgaaaggaaaggggtcaacaagtactatcctccagacttcaaccctgagaagcatggctctctcaaccgataccacaacagccacccgcttcgggagcgggctcggaagctgtcacagggcatcctcatcatccgattcgaaatgccatataacatctggtgcgatggctgcaagaaccacatcggcatgggtgttcgttacaatgcagaaaagaagaaggtgggcaattactacacaaccccgatctacaggttccggatgaaatgccacctctgtgtcaactacatctagatgcagacggaccccgccaactgcgactacttgatcgtgagtggcgcccagcgcaaggaggatcgctgggacatgggcggacaatgagcaggtgctgaccacaggtgaccgccacccacttacctgcctgggggcccctggcccctgagtctgcgctggggcccccaaagcccaacctagctctgatcgttacagagcatgaaaacaaacacaagctggagacggacgccttgttccggctggagcatggcgagaccgaccgcagcacactcaagaacgcgctgcccacactgagccacatccagcaggcacagagcgcctggaaggactacttctccctcaacagcatgc

SEQ ID NO: 186641 - DNA, 1330 bp, Homo Sapiens
ttggctcaagctttcaacggcttaacgtctctgaggctactccatttggaaggaaatctcctccaccagctgcaccccagcaccttctccacgttcacatttttggattatttcagactctccaccataaggcacctctacttagcagagaacatggttagaactcttcctgccagcatgcttcggaacatgccgcttctggagaatctttacttgcagggaaatccgtggacctgcgattgtgagatgagatggtttttggaatgggatgcaaaatccagaggaattctgaagtgtaaaaaggacaaagcttatgaaggcggtcagttgtgtgcaatgtgcttcagtccaaagaagttgtacaaacatgagatacacaagctgaaggacatgacttgtctgaagccttcaatagagtcccctctgagacagaacaggagcaggagtattgaggaggggcaagaacaggaagaggatggtggcagccagctcatcctggagaaattccaactgccccagtggagcatctctttgaatatgaccgacgagcacgggaacatggtgaacttggtctgtgacatcaagaaaccaatggatgtgtacaagattcacttgaaccaaacggatcctccagatattgacataaatgcaacagttgccttggactttgagtgtccaatgacccgagaaaactatgaaaagctatggaaattgatagcatactacagtgaagttcccgtgaagctacacagagagctcatgctcagcaaagaccccagagtcagctaccagtacaggcaggatgctgatgaggaagctctttactacacaggtgtgagagcccagattcttgcagaaccagaatgggtcatgcagccatccatagatatccagctgaaccgacgtcagagtacggccaagaaggtgctactttcctactacacccagtattctcaaacaatatccaccaaagatacaaggcaggctcggggcagaagctgggtaatgattgagcctagtggagctgtgcaaagagatcagactgtcctggaagggggtccatgccagttgagctgcaacgtgaaagcttctgagagtccatctatcttctgggtgcttccagatggctccatcctgaaagcgcccatggatgacccagacagcaagttctccattctcagcagtggctggctgaggatcaagtccatggagccatctgactcagcttgtaccagtgcattgctcaagtgagggatgaaatggaccgcatggtatatagggtacttgtgcagtctccctccactcagccagccgagaaagacacagtgac

SEQ ID NO: 186642 - DNA, 941 bp, Homo Sapiens
tttgtacaaaaaagttgggtgtacggtccgcagcggcaggtgaagcctagcagaggacgcggccaggcgattcggtgaagcgattcctgcaggcgttggttcccctctttgacctggatttgaatttgttgaaatgagcagtcgtaaatcaaagagtaacagcttaattcacacagagtgcctttcacaggtacaaagaattttacgtgaaagattttgtcgtcagagtccacatagtaacctatttggagtgcaagtacaatacaaacacttaagtgagctgctgaaaagaactgctctccatggagagagtaactctgtccttattatcggaccccgaggatcaggaaaaactatgttaataagtcatgctttgaaagaactcatggaaatagaagaagtgagtgaaaatgtattacaagttcacttaaatggactgctgcagatcaatgacaaaatcgccctaaaggaaatcacaaggcagttaaatctggaaaatgtagttggagataaagtttttggaagctttgctgaaaacctttcatttcttctggaagctttaaaaaaaggtgaccgaactagcagttgcccagtgatcttcatattagatgaatttgatctttttgctcatcataaaaaccaaacacttctctataatctttttgacatttctcagtctgcacagaccccaatagcagttattggtcttacatgtagattggatattttggaactcttagaaaaaagagtgaagtcaagattttctcaccggcagatacacttaatgaattcatttggttttccacagtatgttaaaatatttaaagaacagttatctctacctgcagagtttccagacaaggtttttgctgagaagtggaatgaaaatgttcagtatctctcagaagatagaagtgtgcagaagtactacagaagcattt

SEQ ID NO: 186643 - DNA, 1746 bp, Homo Sapiens
  misc_feature (1069)..(1077): n is a, c, g, or t
tttgtacaaaaaagttgggggaggagaaagtggcgagttccggatccctgcctagcgcggcccaacctttactccagagatcatggctgccgaggatgtggtggcgactggcgccgacccaagcgatctggagagcggcgggctgctgcatgagattttcacgtcgccgctcaacctgctgctgcttggcctctgcatcttcctgctctacaagatcgtgcgcggggaccagccggcggccagcggcgacagcgacgacgacgagccgccccctctgccccgcctcaagcggcgcgacttcacccccgccgagctgcggcgcttcgacggcgtccaggacccgcgcatactcatggccatcaacggcaaggtgttcgatgtgaccaaaggccgcaaattctacgggcccgaggggccgtatggggtctttgctggaagagatgcatccaggggccttgccacattttgcctggataaggaagcactgaaggatgagtacgatgacctttctgacctcactgctgcccagcaggagactctgagtgactgggagtctcagttcactttcaagtatcatcacgtgggcaaactgctgaaggagggggaggagcccactgtgtactcagatgaggaagaaccaaaagatgagagtgcccggaaaaatgattaaagcattcagtggaagtatatctatttttgtattttgcaaaatcatttgtaacagtccactctgtctttaaaacatagtgattacaatatttagaaagttttgagcacttgctataagttttttaattaacatcactagtgacactaataaaattaacttcttagaatgcatgatgtgtttgtgtgtcacaaatccagaaagtgaactgcagtgctgtaatacacatgttaatactgtttttcttctatctgtagttagtacaggatgaatttaaatgtgtttttcctgagagacaaggaagacttgggtatttcccaaaacaggtaaaaatcttaaatgtgcaccaagagcaaaggatcaacttttagtcatgatgttctgtaaagacaacaaatcccnnnnnnnnnctcaattgacttaactgcatgatttctgttttatctacctctaaagcaaatctgcagtgttccaaagactttggtatggattaagcgctgtccagtaacaaaatgaaatctcaaaacagagctcagctgcaaaaaagcatattttctgtgtttctggactgcactgttgtccttgccctcacatagacactcagacaccctcacaaacacagtagtctatagttaggattaaaataggatctgaacattcaaaagaaagctttggaaaaaaagagctggctggcctaaaaacctaaatatatgatgaagattgtaggactgtcttcccaagccccatgttcatggtggggcaatggttatttggttattttactcaattggttactctcatttgaaatgagggagggacatacagaataggaacaggtgtttgctctcctaagagccttcatgcacacccctgaaccacgaggaaacagtacagtcgctagtcaagtggtttttaaagtaaagtatattcataacgtaacagttattctgttgttataaaactatacccactgcaaaagtagtagtcaagtgtctaggtctttgatattgctcttttggttaacactaagcttaagtagactatacagttgtatgaatttgtaaaagtatatgaacacc

SEQ ID NO: 186644 - DNA, 1456 bp, Homo Sapiens
actttgtacaaaaaagttggcgaagtttggggcgcagctccagtgtgtcactggcccccaggcgacacggggccagatgcttctggaggtctcctacggggggtcccccgtgcccaaccccggcatcttcttcacctaccgcgaaaaccccgtactgcgagccttcgagccgctacgaagctttgccagtggtggccgcagcatcaacgtcacgggtcagggcttcagcctgatccagaggtttgccatggtggtcatcgcggagcccctgcagtcctggcagccgccgcgggaggctgaatccctgcaacccatgacggtggtgggtacagactacgtgttccacaatgacaccaaggtcgtcttcctgtccccggctgtgcctgaggagccagaggcctacaacctcacggtgctgatcgagatggacgggcaccgtgccctgctcagaacagaggccggggccttcgagtacgtgcctgaccccacctttgagaacttcacaggtggcgtcaagaagcaggtcaacaagctcatccacgcccggggcaccaatctgaacaaggcgatgacgctgcaggaggccgaggccttcgtgggtgccgagcgctgcaccatgaagacgctgacggagaccgacctgtactgtgagcccccggaggtgcagcccccgcccaagcggcggcagaaacgagacaccacacacaacctgcccgagttcattgtgaagttcggctctcgcgagtgggtgctgggccgcgtggagtacgacacacgggtgagcgacgtgccgctcagcctcatcttgccgctggtcatcgtgcccatggtggtcgtcatcgcggtgtctgtctactgctactggaggaagagccagcaggccgaacgagagtatgagaagatcaagtcccagctggagggcctggaggagagcgtgcgggaccgctgcaagaaggaattcacagacctgatgatcgagatggaggaccagaccaacgacgtgcacgaggccggcatccccgtgctggactacaagacctacaccgaccgcgtcttcttcctgccctccaaggacggcgacaaggacgtgatgatcaccggcaagctggacatccccgagccgcggcggccggtggtggagcaggccctctaccagttctccaacctgctgaacagcaagtctttcctcatcaatgtgagccgggcgtcgggcgggcgggagggcacacaggtggcgccgggcaggctttgaccgccggcccctacagttcatccacaccctggagaaccagcgggagttctcggcccgcgccaaggtctacttcgcgtccctgctgacggtggcgctgcacgggaaactggagtactacacggacatcatgcacacgctcttcctggagctcctggagcagtacgtggtggccagaaacccaaagctgatgctgcgcaagtgcac

SEQ ID NO: 186645 - DNA, 1802 bp, Homo Sapiens
ttggtaaggtcctggtgtctattctcagggaaggtgaaagcagaaggtggagagagaggtgcaaatatccacgtggccttctaactcctgtagtgctccatagtcatctctgtccccagagactttcctacctaacctctctgccctttctccccagggtctcatgttccggtgcagcgccagctgttgtgaggacagccaggcctccatgaagcaggtgcaccagtgcatcgagcgctgccatgtgcctctggctcaagcccaggctttggtcaccagtgagctggagaagttccaggaccgcctggcccggtgcaccatgcattgcaacgacaaagccaaagattcaatagatgctgggagtaaggagcttcaggtgaagcagcagctggacagttgtgtgaccaagtgtgtggatgaccacatgcacctcatcccaactatgaccaagaagatgaaggaggctctcttatcaattggaaaataaaagtatttgccagtggccatcagggctgagggcaagaatatattttttataaggaattgggaattttagtcttttaagcaaagtttacgaatgaagaaatgaaggatggccacaagcgtaaggcatatgtcacttgcctctggacactggttattttatgtttcagtccctaaaaaatgaaatggaaaaaagtggtgctaaatcgagtcagagatattacaggagagttttagagcttattatttcctgtggccagtgcttgtcctggcagtaaggctttcccctgtaacaagccagagccctccaaggtaccagactcttcttactacacaggtactaacaggctggcaggttagagttggtggagtctgaggagagatattttctctttgttgccaacatcctgtttaccaaaagtgtcaccccaccatcttccataagctgtgaaacaaaatcaatgaggtcactaacttagaagggaaagaaagttttctgggtctttgttttcttgatttggggtaatttatacaagggcatacaagttgattttaagatgtggaactgggaggtagactagtttggataagaactttgaaatgttccttgtggatccccatttctggtcatcaagatgtggatgtacatttcttaaaattattacatgctgcatctttcagcctggagactgtgcagaaacatgagaggtgatgacacactaattatgggaagcagaattactggctgatggcccctgaggctgtgtgtaacaaaatgacaggacaatcttgcagtaacactttccccttgaagagaagggggttttgattgtgatatatactagtatctaggaatgaacagtaaaagaggagcagttggctacttgattacaacagagtaaatgaagtactggatttgggaaaacctggttttattagaacatatggaatgaaagcctacacctagcattgcctacttagccccctgaattaacagagcccaattgagacaaacccctggcaacaggaaattcaagggagaaaaagtaagcaacttgggctaggatgagctgactcccttagagcaaaggagagacagcccccattaccaaataccatttttgcctggggcttgtgcagctggcagtgttcctgccccagcatggcaccttattgttttgatagcaacttcgttgaattttcaccaacttattacttgaaattataatatagcctgtccgtttgctgtttccaggctgtgatatattttcctagtggtttgactttaaaaataaataaggtttaatttttctctccac

SEQ ID NO: 186646 - DNA, 889 bp, Homo Sapiens
tacaaaaaagttggactgaagataaagtaagtgctgtttgggctaacaggatctcctcttgcagtctgcagcccaggacgctgattccagcagcgccttaccgcgcagcccgaagattcactatggtgaaaatcgccttcaatacccctaccgccgtgcaaaaggaggaggcgcggcaagacgtggaggccctcctgagccgcacggtcagaactcagatactgaccggcaaggagctccgagttgccacccaggaaaaagagggctcctctgggagatgtatgcttactctcttaggcctttcattcatcttggcaggacttattgttggtggagcctgcatttacaagtacttcatgcccaagagcaccatttaccgtggagagatgtgcttttttgattctgaggatcctgcaaattcccttcgtggaggagagcctaacttcctgcctgtgactgaggaggctgacattcgtgaggatgacaacattgcaatcattgatgtgcctgtccccagtttctctgatagtgaccctgcagcaattattcatgactttgaaaagggaatgactgcttacctggacttgttgctggggaactgctatctgatgcccctcaatacttctattgttatgcctccaaaaaatctggtagagctctttggcaaactggcgagtggcagatatctgcctcaaacttatgtggttcgagaagacctagttgctgtggaggaaattcgtgatgttagtaaccttggcatctttatttaccaactttgcaataacagaaagtccttccgccttcgtcgcagagacctcttgctgggtttcaacaaacgtgccattgataaatgctggaaaaataaaacacttccccaacgaatttattg

SEQ ID NO: 186647 - DNA, 1866 bp, Homo Sapiens
  misc_feature (134)..(180): n is a, c, g, or t
  misc_feature (1601)..(1609): n is a, c, g, or t
gccaactttgtacaaaaaagttggacctctcacatgcagctcagagctcccaagagctcaaaagcagaaatggccaggccttctgaaaacttaagtccagaattgtcacagtgtcccttctacttccctctatnnnnnnnnnnnnnnnnnnnnnnnnnnnnnnnnnnnnnnnnnnnnnnngttttttctaatcagaagaaagctggggtatgccctctacttactaaacaagtcacaagcccagctcagattcaagaaaagggtgtgaagtagaggtgcagttaagtggggggccactagtctaacagacggtcacaaccagtgccatggaaaaccaaggatattagcaaaagcagaagttgctagtgaccttgggaagccgaagctgcttacagtagctgggacaagctgaaagtcagactaagaaataaagagagggccttcaagaagcttcctgaatgatttctgctagccctgagcctatttttggaaccagcacttggggaaactgatcttgtgaggatggatgtgtttagggacacagggcttttgagagcagcaccaccccactggggcatccccagacttgggaaacgtgactctttcttaatgccactgggttttagtcaggccacagtgagaaggaacagccctaacaggcctccagccaggttgaatgagctcatttttgttgtagccaaccagtaagatttgctaatgttctacattaagtgccttctccaaagacatccctctttgcctcatatgttgaatcatccagtgcggatatttcaatgaaaatatcattggttgacttttgtgatggtaataatgctatggcatctttgccatgaagttgtggcctccttggattcttctgactttggcttctgaaaggaaggcctagatccagccctggtggtagttcctttctgaggtctctcagtcccttgagactttggggtagtttggctgccattctcactgacaaaatgtatatcagcccccacctccaccccccaatattccttgaactttgaattgcttcagaacacaggtgtggcctgaaggtattcccttattagggaagtgtcactgctgtcttctagtcaaacttgtaaagaaaaagattccagttcagtatttgcagcaagaagcttgaatgctgttctttttatcgcattgttacatcgactcattctccattttgctttggttttgtcttgacttgacttgactttgggggtaaagtctttcaccagcacacaagagtttgattgtacaaatatatcttctgcattaacatctctgcctgttgcttaagatcagttgcttttatactcagaatggaaatacctgatcttggctagttttgttataagatattgatttcatttagatttccctccacgaggtcagcaaactatcatgttcttatgtaaacttaggccaaggccagagttatcatagtccctaggttgctacggcttatcatgtgcttggtaaaaggtgatcgcaggttctcagacgagtttactttacatgagatggaatcaggcagagaggctgggatgatggagaaagctcgaggtgaagttttnnnnnnnnngttgtggaaaggaaagttccaaagaggtggtttctgaggaagtcagagcgcccagggccagagcagtcagtaatgggtgaatgaggttgtttggaaagtcggtgtgacagacacatggatgccatctacttctaggttgctggtgggtattaaatatgcacaatattccatagctcactgaggattttaaaattataagcataggattttatattttggggtgaaagaattatctggcacattaggtattggagttt

SEQ ID NO: 186648 - DNA, 1799 bp, Homo Sapiens
  misc_feature (308)..(316): n is a, c, g, or t
  misc_feature (571)..(627): n is a, c, g, or t
ttggcattaacatctctgcctgttgcttaagatcagttgcttttatactcagaatggaaatacctgatcttggctagttttgttataagatattgatttcatttagatttccctccacgaggtcagcaaactatcatgttcttatgtaaacttaggccaaggccagagttatcatagtccctaggttgctacggcttatcatgtgcttggtaaaaggtgatcgcaggttctcagacgagtttactttacatgagatggaatcaggcagagaggctgggatgatggagaaagctcgaggtgaagttttnnnnnnnnngttgtggaaaggaaagttccaaagaggtggtttctgaggaagtcagagcgcccagggccagagcagtcagtaatgggtgaatgaggttgtttggaaagtcggtgtgacagacacatggatgccatctacttctaggttgctggtgggtattaaatatgcacaatattccatagctcactgaggattttaaaattataagcataggattttatattttggggtgaaagaattatctggcacattaggtattggagnnnnnnnnnnnnnnnnnnnnnnnnnnnnnnnnnnnnnnnnnnnnnnnnnnnnnnnnnggcgcttcatgtccagtgtgtggcccttctgaaacttatggtcatctctcccactgaaaccaaggtcttttcaaatgtggctaaatggggatgaggagacacgggtaggactttcttggtgtgtgtgcattctttaaagagccaagttgcttcggggaaacagccaggaaaatggtcaagattatttttagaggttattttattggggattttaagaactaataacatcttgagttatttttaattcagggggatgtggaaaggtttgcaattgtcaagtgttttgttgtagcttagtatccataagggaaacttagactatagacataactacaaagccagtgcagcttttgttttctgtatgttgttgggggatcaactttcacacatagcaagcacatggcctccctgatgtcaggatgcctttgttaggatctgtatttgcccttaattttgttgaaatcttttttccttcttcctcttgaaaagttccaaaatatagtttattgtatctttcatcactaaaaatttgttcctttttcactatgggcagttcacacaaggcaaaaactattgaacagttggttttagtgtgttgtataactttgctgtatatcaaactaattttgacaagttttcatcctaagcctcaaatcatgtaattaataatttgcctgtttatttatgacctaattgtgattcttttattaataaaagctaatgggaaaaggatccctgattaagctgatgactagacctacaattaattttcctgcagtatatgaagtattgtaccagagtattaaaagatatgtaatattttattgataaatctatcctttaaaaggaatacgttttaggatgtcatcattttgatgtgaatcatgtaaatgttgataatatgctgtttattatacatttagtgtttcaagagattcacttaattgcctttttgcccacgtatattatgtagtctatttgcaactgttcttaaaaaaatgacattaaaagaatagtttatgtagagaaacattagtggatgttaattgtctccccacctatatttatgggtgttagcgcaactgctttgctagttgcaaagctgtattatcagagtaaaagtgtatttgtaaactgtatgggaactaaaaattaggaataaaaccattttc

SEQ ID NO: 186649 - DNA, 1450 bp, Homo Sapiens
  misc_feature (1103)..(1123): n is a, c, g, or t
ttggcttgctacagtgtctgaagttacagtcccaccccacagtcatgctttttgcacttatcgcactggaaaagtttgcacagacaagtgaaaataaattgactatttctgaatccagtattagtgaccggcttgtcacattggagtcctgggctaatgatcctgattatctgaaacgtcaagttggtttctgtgcccagtggagcttagacaatctctttttaaaagaaggtagacagctgacctatgagaaagtgaacttgagtagcattagggccatgctgaatagcaatgatgtcagcgagtacctgaagatctcacctcatggcttagaggctcgctgtgatgcctcctcttttgaaagtgtgcgttgcaccttttgtgtggatgccggggtatggtactatgaagtaacagtggtcacttctggcgtcatgcagattggctgggccactcgagacagcaaattcctcaatcatgaaggctacggcattggggatgatgaatactcctgtgcgtatgatggctgccggcagctgatttggtacaatgccagaagtaagcctcacatacacccatgctggaaagaaggagatacagtaggatttctgttagacttgaatgaaaagcaaatgatcttctttttaaatggcaaccagctgcctcctgaaaagcaagtcttttcatctactgtatctggattttttgctgcagctagtttcatgtcatatcaacaatgtgagttcaattttggagcaaaaccattcaaatacccaccatctatgaaatttagcacttttaatgactacgccttcctaacagctgaagaaaaaatcattttgccaaggcacaggcgtcttgctctgttgaagcaagtcagtatccgagaaaactgctgttccctttgttgtgatgaggtagcagacacacaattgaagccatgtggacacagtgacctgtgcatggattgtgccttgcagctggagacctgcccattgtgtcgtaaagaaatagtatctagaatcagacagatttctcatatttcatgacacatgtgaagaggcatcgtggacttttttctactcaattccagccaatgttgnnnnnnnnnnnnnnnnnnnnnctctctaatcagttgtacacacattgaaacttatagccatggccagattttatgctaaaaatggtagtttgtcaaagacaaaattctcttagaatctaatccaacttgccagccctgagaaaatcccttttaaggccaaggaaagctgaatgctagcagccaggcctgtggtacttccatgagaaaccatagcagacaatgccctcccaagtactgaaatcacactggaatcccccttgttgggttcatttgattgtttacacaggatgtgttgtgtcattctgaagtttttatttggggcagaagtctttatggagatgtaaatga

SEQ ID NO: 186650 - DNA, 1227 bp, Homo Sapiens
tttgtacaaaaaagttggcttgaaagaccaatgggaatcggtggaaaccaaactcaatgaaaggaaaactaaactggaagaggctctcaacttggcaatggagttccacaattctctccaagacttcatcaactggcttactcaggctgaacagaccctaaatgtagcttctcggccaagtctcatcttggacacagtcttatttcaaattgacgaacacaaggtttttgccaatgaagtaaattctcatcgtgagcagataatagagctggacaaaactggaacccacctaaaatattttagtcagaaacaagatgttgttctaatcaagaatctacttatcagtgtacaaagtcgatgggaaaaagtggttcaacggttggtagagagaggaagatctttggatgatgcaaggaagagagccaagcagttccatgaagcttggagtaaacttatggagtggctagaagagtcagaaaagtctttggattctgaactggaaatcgcaaatgatccagacaaaataaaaacacaacttgcacaacataaggagtttcagaaatcactcggagccaagcattctgtctacgacaccaccaacaggactggacgttctctgaaggagaaaacctccctggctgatgacaacctgaaactggatgacatgctgagtgaactcagagacaaatgggataccatatgtggaaaatctgtggaaagacaaaacaaattggaggaagccctgttattttctggacaattcacagatgccctacaggctctcattgattggttatatagagttgaaccccagctggcagaagaccagcctgttcatggagacattgatttggtgatgaatctgatcgataatcacaaggccttccaaaaagagttggggaagaggaccagcagtgtgcaggccctgaagcgctcagcccgagaactcatagaaggcagtcgggatgactcctcctgggtcaaggtccagatgcaggaattaagcacacgctgggagaccgtgtgtgcactttctatatcaaagcaaacacggttagaagcagccctgcgtcacgcagaggaattccactcggtggtacatgccctcttggagtggctggctgaggcggagcaaaccctgcgtttccatggtgtcctcccagatgatgaggatgctctccggactctcattgatcagcataagaattcatgagaactggaggaaaa

SEQ ID NO: 186651 - DNA, 1969 bp, Homo Sapiens
ttggctgtcaagggggcagcaggtccagagctgctggtgctcccgttccccagaccctacccctatccccagtggagccggagtgcgggcgcgccccaccaccgccctcaccatggtgctgttggcagcagcggtctgcacaaaagcaggaaaggctattgtttctcgacagtttgtggaaatgacccgaactcggattgagggcttattagcagcttttccaaagctcatgaacactggaaaacaacatacgtttgttgaaacagagagtgtaagatatgtctaccagcctatggagaaactgtatatggtactgatcactaccaaaaacagcaacattttagaagatttggagaccctaaggctcttctcaagagtgatccctgaatattgccgagccttagaagagaatgaaatatctgagcactgttttgatttgatttttgcttttgatgaaattgtcgcactgggataccgggagaatgttaacttggcacagatcagaaccttcacagaaatggattctcatgaggagaaggtgttcagagccgtcagagagactcaagaacgtgaagctaaggctgagatgcgtcgtaaagcaaaggaattacaacaggcccgaagagatgcagagagacagggcaaaaaagcaccaggatttggcggatttggcagctctgcagtatctggaggcagcacagctgccatgatcacagagaccatcattgaaactgataaaccaaaagtggcacctgcaccagccaggccttcaggccccagcaaggctttaaaacttggagccaaaggaaaggaagtagataactttgtggacaaattaaaatctgaaggtgaaaccatcatgtcctctagtatgggcaagcgtacttctgaagcaaccaaaatgcatgctccacccattaatatggaaagtgtacatatgaagattgaagaaaagataacattaacctgtggacgagacggaggattacagaatatggagttgcatggcatgatcatgcttaggatctcagatgacaagtatggccgaattcgtcttcatgtggaaaatgaagataagaaaggggtgcagctacagacccatccaaatgtggataaaaaacttttcactgcagagtctctaattggcctgaagaatccagagaagtcatttccagtcaacagtgacgtaggggtgctaaagtggagactacaaaccacagaggaatcttttattccactgacaattaattgctggccctcggagagtggaaatggctgtgatgtcaacatagaatatgagctacaagaagataatttagaactgaatgatgtggttatcaccatcccactcccgtctggtgtcggcgcgcctgttatcggtgagatcgatggggagtatcgacatgacagtcgacgaaataccctggagtggtgcctgcctgtgattgatgccaaaaataagagtggcagcctggagtttagcattgctgggcagcccaatgacttcttccctgttcaagtttcctttgtctccaagaaaaattactgtaacatacaggttaccaaagtgacccaggtagatggaaacagccccgtcaggttttccacagagaccactttcctagtggataagtatgaaattctgtaataccaagaagagggagctgaaaaggaaaattttcagattaataaagaagacgccaatgatggctgaagagtttttcccagatttacaagccactggagaccccttttttctgatacaatgcacgattctctgcgcgcaaggaccctcgactcacccccatgtttcagtgtcacagagacattctttgataaggaaatggcacaaacataaagggaaaggctgctaattttctttggcagattgtattggccagcaggaaagcaagctctccagagaatgcccccagttaaatacctcctctacctttacctaagttgctcc

SEQ ID NO: 186652 - DNA, 1496 bp, Homo Sapiens
  misc_feature (1017)..(1025): n is a, c, g, or t
actttgtacaaaaaagttgggttgcttcaaagctttccaagagtcagaaattgattcagtacggtttactaaagtcatgtggaataaagccattggaaacaaatggaaagcctgtcgggacttctgggctcagaaccagctggctcacgcactccacttgtcagctggacttctgccttgtgaaatggaagcagcctttgttcctttctggctgagcaagctcctgaggctgggagagactaggaaggcttggtaggaggggaaaaaagtcaggaaaagatatcaaatcagaaacatggaagaagaagggaaccgatttgagttggtgggcaaaactctaaaaatctaaatctgatgcttatgtaagggttgagcgaattagggagattgctagtggaaattggagggaatttgttttgcatcatttgtctaggatctatgcaaatatagctccactaaaggaccatagggaagagccagccttgccttttcttatatgattttgtttacaaaattttactgggacttttaaatctagctatagagttgggaaaaaatatttccacttagatattttacatggttttgtttaaaattaccattacttgttttttaaaaacacatgaccacatatgtatatgtatatctacctaaacattgtatcatggtttcagtatgttattcatgtattactgggagatgctaccaagaaaccaacccaaagaaaattctgaaaaatacatttctatttatagaataaatgtttcatttatataaaagcaaaagaacttagagttctaataaatgggatgtctaataaattatgaagttactgatttgaatatattatatttttataacttccttgccaaagtcctgatttagtacattagagaacctgtgtttcctctctcctctaccattcatctctcttccatacagtcatttgggctttttactcaaagagaatcaagaaataataaggtataacaagcttggcaaagtgttggctttttnnnnnnnnntttttttaatctctagcagtttggtaatttagcagcatcatttatttgggattcttttatctgatttcaacagtgaaaaacatccctatgataaagcctaatgacccatttcacaaaagatggaatttgcccttcctagaaaatatgacggagaaaagtctgactcagagaaagtgagtctgaattttataaggggtagtaagaattggacaattcctttgcatatctgaaacttggcaggtaccgttctaaatctgaaacagggtgatagctcaaagttgccattcatccagaatagattgttttagaatgtagtgtttaagtgactgtttcattaatacacctacaccttttctttgaaagtttgcaacctaattgcatctaaactatgaataagttctgtggtaaaatcttaaactatggaaaattacaaaatgaatttttcttccctgaaatcagagcttacatgtg

SEQ ID NO: 186653 - DNA, 1080 bp, Homo Sapiens
  misc_feature (100)..(108): n is a, c, g, or t
ttggattcatctctcttccatacagtcatttgggctttttactcaaagagaatcaagaaataataaggtataacaagcttggcaaagtgttggctttttnnnnnnnnntttttttaatctctagcagtttggtaatttagcagcatcatttatttgggattcttttatctgatttcaacagtgaaaaacatccctatgataaagcctaatgacccatttcacaaaagatggaatttgcccttcctagaaaatatgacggagaaaagtctgactcagagaaagtgagtctgaattttataaggggtagtaagaattggacaattcctttgcatatctgaacttggcaggtaccgttctaaatctgaaacagggtgatagctcaaagttgccattcatccagaatagattgttttagaatgtagtgtttaagtgactgtttcattaatacacctacaccctttctttgaaagtttgcaacctaattgcatctaaaactatgaataagttctgtggtaaaatcttaaactatggaaaattacaaaaatgaatttttcttccctgaaatcagagcttacatgtgtgtttttttataacattttcagataaatgtattcaacatgtaatacagtattttaacattcacctcttattttatattgaaatgtattacagtattaaaactcagtgttcagtatttatttcactatgcattttatttagtaaaagccaggagaaatgtttaatccaatggtgccttactttgtgatttaaaagaaatcaacttttttttatgtctaagtagtagattatttgcatatttgtaaaaactgttaggtctttatattttaaagtgtaataccagttttgttattttagtaccacaaatgggatgattgttaaagttccccaaaaatgttggcatgaaattaatttttccctccttatagtcaaggaccgtagaagaagaaaaacttttttttcatatcatgcactatgtaaacagacacattttgctatctgtgtcatcaggatagtgtaagtggtagggtagagactacccctacacatctgcatctttgt

SEQ ID NO: 186654 - DNA, 1726 bp, Homo Sapiens
  misc_feature (593)..(601): n is a, c, g, or t
aaataaatactgaacactgagttttaatactgtaatacatttcaatataaaataagagtgaatgttaaaatactgtattacatgttgaatacatttatctgaaaatgttataaaaaaacacacatgtaagctctgatttcagggaagaaaaattcatttttgtaattttccatagtttaagattttaccacagaacttattcatagttttagatgcaattaggttgcaaactttcaaagaaagggtgtaggtgtattaatgaaacagtcacttaaacactacattctaaaacaatctattctggatgaatggcaactttgagctatcaccctgtttcagatttagaacggtacctgccaagttcagatatgcaaaggaattgtccaattcttactaccccttataaaattcagactcactttctctgagtcagacttttctccgtcatattttctaggaagggcaaattccatcttttgtgaaatgggtcattaggctttatcatagggatgtttttcactgttgaaatcagataaaagaatcccaaataaatgatgctgctaaattaccaaactgctagagattaaaaaaannnnnnnnnaaaaagccaacactttgccaagcttgttataccttattatttcttgattctctttgagtaaaaagcccaaatgactgtatggaagagagatgaatggtagaggagagaggaaacacaggttctctaatgtactaaatcaggactttggcaaggaagttataaaaatataatatattcaaatcagtaacttcataatttattagacatcccatttattagaactctaagttcttttgcttttatataaatgaaacatttattctataaatagaaatgtatttttcagaattttctttgggttggtttcttggtagcatctcccagtaatacatgaataacatactgaaaccatgatacaatgtttaggtagatatacatatacatatgtggtcatgtgtttttaaaaaacaagtaatggtaattttaaacaaaaccatgtaaaatatctaagtggaaatattttttcccaactctatagctagatttaaaagtcccagtaaaattttgtaaacaaaatcatataagaaaaggcaaggctggctcttccctatggtcctttagtggagctatatttgcatagatcctagacaaatgatgcaaaacaaattccctccaatttccactagcaatctccctaattcgctcaacccttacataagcatcagatttagatttttagagttttgcccaccaactcaaatcggttcccttcttcttccatgtttctgatttgatatcttttcctgacttttttcccctcctaccaagccttcctagtctctcccagcctcaggagcttgctcagccagaaaggaacaaaggctgcttccatttcacaaggcagaagtccagctgacaagtggagtgcgtgagccagctggttctgagcccagaagtcccgacaggctttccatttgtttccaatggctttattccacatgactttagtaaaccgtactgaatcaatttctgaccttggtactttgaagcaacacttgtatacagatattaagggaagagggaagttaagggaggaaaatcgaaggtcaaactgtgtgtcaaacaaggtgctgggtcctaattttatttttagttgcctcttgaatcgctcaagcccatcttgcc

SEQ ID NO: 186655 - DNA, 1181 bp, Homo Sapiens
ttggctctactccggggtctagtacagcgctggcgctacggcaaggtctgcctgcgctccctgctctacaactcctttgggggcagtgacaccgctgttgatgctgcctttgagcctgtctactggctggtagacaacgtgatccgctggtttggagtggtgttcgtggtcctggtgatcgtgctgacaggctccattgtagctatcgcctacctgtgtgtcctgcctctcatcctccgaacctactcagtgccacgactctgctggcatttcttctatagccactggaatctgatcctgattgtcttccactactaccaggccatcaccactccgcctgggtacccaccccagggcaggaatgatatcgccaccgtctccatctgtaagaagtgcatttaccccaagccagcccgaacacaccactgcagcatctgcaacagcaggatgctggtccttgtagggaaggattggcactgacatctcaagaactttggccaccgtaacagagcctgtgtcccttcctcacaggtgtgtgctgaagatggatcaccactgcccctggctaaacaattgtgtgggccactataaccatcggtacttcttctctttctgctttttcatgactctgggctgtgtctactgcagctatggaagttgggaccttttccgggaggcttatgctgccattgagaaaatgaaacagctcgacaagaacaaactacaggcggttgccaaccagacttatcaccagaccccaccacccaccttctcctttcgagaaaggatgactcacaagagtcttgtctacctctggttcctgtgcagttctgtggcacttgccctgggtgccctaactgtatggcatgctgttctcatcagtcgaggtgagactagcatcgaaaggcacatcaacaagaaggagagacgtcggctacaggccaagggcagagtatttaggaatccttacaactacggctgcttggacaactggaaggtattcctgggtgtggatacaggaaggcactggcttactcgggtgctcttaccttctagtcacttgccccatgggaatggaatgagctgggagccccctccctgggtgactgctcactcagcctctgtgatggcagtgtgagctggactgtgtcagccacgactcgagcactcattctgctccc

SEQ ID NO: 186656 - DNA, 2869 bp, Homo Sapiens
ttgggtggcagtagaacagctcgatggggacaataaatacgacgctggggaacatggcttacaggaagcagagaaaggtgtgaaattcctaacattgccaccagtgttacatctacaactgatgagatttatgtatgaccctcagacggaccaaaatatcaagatcaatgataggtttgaattcccagagcagttaccacttgatgaatttttgcaaaaaacagatcctaaggaccctgcaaattatattcttcatgcagtcctggttcatagtggagataatcatggtggacattatgtggtttatctaaaccccaaaggggatggcaaatggtgtaaatttgatgacgacgtggtgtcaaggtgtactaaagaggaagcaattgagcacaattatgggggtcacgatgacgacctgtctgttcgacactgcactaatgcttacatgttagtctacatcagggaatcaaaactgagtgaagttttacaggcggtcaccgaccatgatattcctcagcagttggtggagcgattacaagaagagaaaaggatcgaggctcagaagcggaaggagcggcaggaagcccatctctatatgcaagtgcagatagtcgcagaggaccagttttgtggccaccaagggaatgacatgtacgatgaagaaaaagtgaaatacactgtgttcaaagtattgaagaactcctcgcttgctgagtttgttcagagcctctctcagaccatgggatttccacaagatcaaattcgattgtggcccatgcaagcaaggagtaatggaacaaaacgaccagcaatgttagataatgaagccgacggcaataaaacaatgattgagctcagtgataatgaaaacccttggacaatattcctggaaacagttgatcccgagctggctgctagtggagcgaccttacccaagtttgataaagatcatgatgtaatgttatttttgaagatgtatgatcccaaaacgcggagcttgaattactgtgggcatatctacacaccaatatcctgtaaaatacgtgacttgctcccagttatgtgtgacagagcaggatttattcaagatactagccttatcctctatgaggaagttaaaccgaatttaacagagagaattcaggactatgacgtgtctcttgataaagcccttgatgaactaatggatggtgacatcatagtatttcagaaggatgaccctgaaaatgataacagtgaattacccaccgcaaaggagtatttccgagatctctaccaccgcgttgatgtcattttctgtgataaaacaatccctaatgatcctggatttgtggttacgttatcaaatagaatgaattattttcaggttgcaaagacagttgcacagaggctcaacacagatccaatgttgctgcagtttttcaagtctcaaggttatagggatggcccaggtaatcctcttagacataattatgaaggtactttaagagatcttctacagttcttcaagcctagacaacctaagaaactttactatcagcagcttaagatgaaaatcacagactttgagaacaggcgaagttttaaatgtatatggttaaacagccaatttagggaagaggaaataacactatatccagacaagcatgggtgtgtccgggacctgttagaagaatgtaaaaaggccgtggagcttggggagaaagcatcagggaaacttaggctgctagaaattgtaagctacaaaatcattggtgttcatcaagaagatgaactattagaatgtttatctcctgcaacgagccggacgtttcgaatagaggaaatccctttggaccaggtggacatagacaaagagaatgagatgcttgtcacagtggcgcatttccacaaagaggtcttcggaacgttcggaatcccgtttttgctgaggatacaccagggcgagcattttcgagaagtgatgaagcgaatccagagcctgctggacatccaggagaaggagtttgagaagtttaaatttgcaattgtaatgatgggccgacaccagtacataaatgaagacgagtatgaagtaaatttgaaagactttgagccacagcccggtaatatgtctcatcctcggccttggctagggctcgaccacttcaacaaagccccaaagaggagtcgctacacttaccttgaaaaggccattaaaatccataactgatttccaagctggtgtgttcaaggcgaggacggtgtgtgggtggccccttaacagcctagaactttggtgcacgtgccctctagccgaagtcttcagcaagaggattcgctgctggtgttaattttattttattgaggctgttcagtttggcttctctgtatctattgactgccctttttgagcaaaatgaagatgtttttataaagcttggatgccaatgagagttattttatggtaaccacagtgcaaggcaactgtcagcgcaatgggggagaagaggttagtggatcgggggtccctggctcaaggtctctgggctgtccctagtgggcacgagtggctcggctgccttcctggggtcccgtgcaccagccctgcagctagcaagtcttgtgtttaggctcgtctgacctatttccttcagttatactttcaatgaccttttgtgcatctgttaaggcaaaacagagaaactcacaacctaataaataggcgctcttcccttcattgtgtgcattgtcggcccttcctcgggttctcctcctccagctgcctgggggctttttaataaacttgtctcacctcgtcagccactactgtctgcagtccctttgcaaagtggatgcactgaatacagtccggacagacattgtgggg

SEQ ID NO: 186657 - DNA, 2058 bp, Homo Sapiens
  misc_feature (791)..(821): n is a, c, g, or t
actttgtacaaaaaagttggcaaggaaacccagcgtttgctggcagaaccagttcctggcatcaaagccgaaccagatgagagcaacgcccgttattttcatgtggtcattgctggccctcaggattccccctttgagggagggacttttaaacttgaactattccttccagaagaatacccaatggcagcccctaaagtacgtttcatgaccaaaatttatcatcctaatgtagacaagttgggaagaatatgtttagatattttgaaagataagtggtccccagcactgcagatccgcacagttctgctatcgatccaggccttgttaagtgctcccaatccagatgatccattagcaaatgatgtagcggagcagtggaagaccaacgaagcccaagccatagaaacagctagagcatggactaggctatatgccatgaataatatttaaattgatacgatcatcaagtgtgcatcacttctcctgttctgccaagacttcctcctctttgtttgcatttaatggacacagtcttagaaacattacagaataaaaaagcccagacatcttcagtcctttggtgattaaatgcacattagcaaatctatgtcttgtcctgattcactgtcataaagcatgagcagaggctagaagtatcatctggattgttgtgaaacgtttaaaagcagtggcccctccctgcttttattcatttcccccatcctggtttaagtataaagcactgtgaatgaaggtagttgtcaggttagctgcaggggtgtgggtgnnnnnnnnnnnnnnnnnnnnnnnnnnnnnnngaggggggaggtagtttaattttatgggctcctttcccccttttttggtgatctaattgcattggttaaaagcagctaaccagggctttagaatatgctctagccaagtctaactttatttagacgctgtagatggacaagcttgattgttggaaccaaaatgggaacattaaacaaacatcacagccctcactaataacattgctgtcaagtgtagattccccccttcaaaaaaagcttgtgaccattttgtatggcttgtctggaaacttctgtaaatcttatgttttagtaaaatattttttgttattctactttgcctttgtacagtttattttactgtgtttatttcattttcccaatttgacaatcgtattttaaaattgaaactgatggaacattctttcttggtcttcaccatctgacaaattgaatggcaagaggtggattttgccagtttcttttcactgatgcagatttgtgttaagatagtactgaatggagtatttataaactggccctgagcatgcataaagcatcagtatctgacctttttttaaccttctaggaatttgaaataaatgtgtttgtgttgtctgattagatgatcattggtgtcttgccacaatgtttaaaaattactgtacaggaaagtcacagcaaagatagcagttgtgactgacatgtaggactttcacagttgtgccacatttttgcctaaaatttgggttatgacatttttcttggttcttatctgaaaatttcatctgtaacctttcatgtgtgttaagaaacactgatctgatcatttgggatttgctgaggcatttgtgagtcttccttataaacctgatgagcagatctcaactatctagcttgtgtgtcatcagaaaggtttatccctttgagagtatcaagtcctcagttaatgattcttgctttcatccctccagtatttgctgtgggagctcgttttattctttaatttggaattcagtaatttttcttctttattgacgaattcctcccctcacaaaactgttctttcccacctctctccatatctaattcctgattcttgttatttttaagtcataaatgtagccagtcataaatacataaatgttaaccttcgggttgcaaccttgtctcttgcagtttaagtaatggatattgtagcccatttgaattttcttcactcttattctcgtaattctggagtttcttcagattgtgg

SEQ ID NO: 186658 - DNA, 2444 bp, Homo Sapiens
ttggatgttgtctgtggtggtttgtgtggttggactctcccctggtcagtatttttatttccaggaggtgttccctgtcttggctgcaaagcactgtatcatgcaggccaatgctgagtaccatcagtctatcctggcaaaacagcagaagaaatttggagaagaaattgcaaggttacagcatgcagcagaactgattaaaacagtggcatctcgctatgatgaatatgttaatgtgaaggatttttctgacaaaatcaatcgtgcccttactgcagcaaagaaggataatgacttcatttatcatgatcgagttccagaccttaaagatctagatcctattggcaaagccacacttgtgaaatctaccccggtcaatgtacccatcagtcagaaatttactgatctgtttgagaagatggttcccgtgtcagtacagcagtctttggctgcctataatcagaggaaagccgatttgattaacagatcaattgctcagatgagagaagccaccactttggcaaatggggtgctagcttcccttaatcttccagcagcaattgaagatgtgtctggagacactgtacctcagtctatattgactaaatccagatctgtgattgaacagggaggcatccagactgttgatcagttgattaaagaactgcctgaattactgcaacgaaatagagaaatcctagatgagtcattaaggttgttggatgaagaagaagcaaccgataatgatttaagagcaaaatttaaggaacgttggcaaaggacaccatccaatgaactgtataagcctttaagagcagagggaaccaacttcagaacagttttagataaagctgtgcaggcagatggacaagtgaaagaatgttaccagtctcatcgtgacaccatcgtgcttttgtgtaagccagagcctgagctgaatgctgccatcccttctgctaatccagcaaagaccatgcagggcagtgaggttgtaaatgtcttaaaatccttattgtcaaatcttgatgaagtaaagaaggaaagagagggtctggagaatgacttgaaatctgtgaattttgacatgacaagcaagtttttgacagccctggctcaagatggtgtgataaatgaagaagctctttctgttactgaactagatcgagtctatggaggtcttacaactaaagtccaagaatctctaaagaaacaggagggacttcttaaaaatattcaggtctcacatcaggaattttcaaaaatgaaacaatctaataatgaagctaacttaagagaagaagttttgaagaatttagctactgcatatgacaactttgttgaacttgtagctaatttgaaggaaggcacaaagttttacaatgagttgactgaaatcctggtcaggttccagaacaaatgcagtgatatagtttttgcacggaagacagaaagagatgaactcttaaaggacttgcaacaaagcattgccagagaacctagtgctccttcaattcctacacctgcgtatcagtcctcaccagcaggaggacatgcaccaactcctccaactccagcgccaagaaccatgccgcctactaagccccagcccccagccaggcctccaccacctgtgcttccagcaaatcgagctccttctgctactgctccatctccagtgggggctgggactgctgcgccagctccatcacaaacgcctggctcagctcctcctccacaggcgcagggaccaccctatcccacctatccaggatatcctgggtattgccaaatgcccatgcccatgggctataatccttatgcgtatggccagtataatatgccatatccaccagtgtatcaccagagtcctggacaggctccatacccgggaccccagcagccttcataccccttccctcagcccccacagcagtcttactatccacagcagtaatatgtctgctcagcagctcagctgattcagatcagagggaaagaaataccaaccctgcaataagtgtactaaactctacgctctggttaatgtaatgtactctcctggactgaatgcagtgtataatttctgtctacagctagaagctgtgccccagttccacatttgattacacatgtgagatttgctgctgttgcagtataaacactaggtataataggatttgaaattgcattacagttcataaaaattgaaaatgagaaattaaacctgcaagtgaaacatttgaaacgattatactttctacataagacatggttgggacatcagatacttacaaagatggtttaagtatggatactagagaaaattaagttttctttctctttggtttattgatttggtttaatttccattatgctattttgcataatcaaggcactgtaaatcttataattttaaaataaattacttaagaacaaaagaagag

SEQ ID NO: 186659 - DNA, 1104 bp, Homo Sapiens
ttggattccaatagcggcactgtgcttcacttcctggtcaggatgcctcctttcactaaaatgtttttagcctatcaagatcaaagttttgacattccagacagaacttttcattctacaaatacaacttggcgactctcatcttttgaatctatgactgatgtgaaagaacttatcccagagtttttctatcttccagagttcctagttaaccgtgaaggttttgattttggtgtgcgtcagaatggtgaacgggttaatcacgtcaaccttcccccttgggcgcgtaatgatcctcgtctttttatcctcatccatcggcaggctctagagtctgactacgtgtcgcagaacatctgtcagtggattgacttggtgtttgggtataagcaaaaggggaaggcttctgttcaagcgatcaatgtttttcatcctgctacatattttggaatggatgtctctgcagttgaagatccagttcagagacgagcgctagaaaccatgataaaaacctacgggcagactccccgtcagctgttccacatggcccatgtgagcagacctggagccaagctcaatattgaaggagagcttccagctgctgtggggttgctagtgcagtttgctttcagggagacccgagaacaggtcaaagaaatcacctatccgagtcctttgtcatggataaaaggcttgaaatggggggaatacgtgggttcccccagtgctccagtacctgtggtctgcttcagccagccccacggagaaagatttggctctctccaggctctgccaccagagcaatctgtggtttgtcacggaatttctgtcttctgatgacatatagcaaggaacaaggtgtgagaagcatgaacagtacggacattcagtggtcagtcatcctgagctggggatatgctgataatattttaaggttgaagagtaaacaaagtgagcctccagtaaactttattcaaagttcacaacagtaccaggtgactagttgtgcttgggtgcctgacagttgccagctgtttactggaagcaaatgcggtgtcatcacagcctacacaaacagatttacaagcagcacgtcatcagaaa

SEQ ID NO: 186660 - DNA, 1592 bp, Homo Sapiens
  misc_feature (946)..(988): n is a, c, g, or t
ttggctgcactttcccccgtttcagggttttctagtcttgaactactggctacgtggctaccaaatgcctaagggagttcgttcacagctgagttatgaagctggaattggttctagacgctgggtagatgcaaagcagcctaactcttcaagtaccgacatttctcacctctgattccggctctcctttgagaaggagaccttagcttccccggcttcaagtagaacagaagcccgtttccttccctcatcagtgaaaaaatctaatgtttcaaatgtaaattgttcatagaaaaggaacatagaatctgttttacagaagtaaatcgaccgtcaagagaagacttggcctctaatttatattgctttgcactttggtttgatattaagaaacagcattcttcttcagtgaaattttgggtgccaaacacctacccagaatgtccagggctttcattttcaaaagttagcattctccttttgaccgtccaagtcattatgaattctgacttgttgtattaggaacatgttggacagtggaaaattttctctggattgttttagtaatatttttgggattatacttcctttctgtaccaatttcttttaatttaaagaactataagtcagttatattatctaccaacaggtaatatagctctttcttttattaactgttctctgtcccccaaccatctcctgatatttggtagagtaacacctttatacgtgtgcttgcctcctaatttaaaatactgtattcgcatgtagatataatgtacataacagtttaacctcaaagttgctggagtcagggccccctgtgcttgagacactaatacagagtgtgttcgcacttagccatgggctgggctcaagaacctgatacctgggttgatgtggattacctagaacccttcctgcagtattcatacagtgtttttannnnnnnnnnnnnnnnnnnnnnnnnnnnnnnnnnnnnnnnnnnaatgagaatcttgttttaaaatgtaatttctaaggtttaacaccaaaatgttttatttgttgtggagtatatattatacaatagagaggtaccttaaacattttttgttcttattctttttctcataagtactcctgagtacaagtggtcacctcccatagtattcatttggcttcgctgtcaaaaatcattattctgtgcagtcgtggccctgggaaggggaaataagaaggccctgttgacgggctgtcttggctctggaattcatgcatcctggccttgccaaggttctggcagggcctgctggtgtgttggagcctgcagggcaggtcaggctggttcagaggcccatgctgaggggtgggtgctctgaagtggagtgaagcctcaagcccatgaatgccaccccagtcatctctggtgtcagctgctgctgtggccccagcaggttctcaaagctcccaagtcctccctacgacacagcccaaatgtgtaaatggcactgttgccctgacagtgcatggaaaggacgttggcatccaattggcactccttctcccttattcaatattagtttgatttgcctttcgccattgtttccaaa

SEQ ID NO: 186661 - DNA, 1926 bp, Homo Sapiens
  misc_feature (1039)..(1048): n is a, c, g, or t
ctctgtcctcttttagtctagtgtctggttttctagcaaacagtaaatttaaacaagtaaactattatggtttccattgcttacaaaatgattttcctttacattcttatcatgaacactattttaagcatcaaatgcaatcatctaaaatataaaggtcaatcatttataatagaaacaccttgaccacaagcccttgattgaacattttataatatttcatctacttattaaaacaaataatttcccttgggttggaggggaagtgatttcataaattaattagaaagccatctttagcatattgcttatgtctggatccatgtttctgaggaaaaagacattctcaggtgatgtatttttttcatgcattagtatgcatttttaaaaaataatgcatgtttctttaataattaattttcatcttctataagatgccatgtgaagaagttgtggaaatgtagaataaaaagctaaagctgccaaatttctgttgaactcttaaaaacagctcatgtttgtttgtcctctcgggttgtggcctagcctatttgcaatgtaatgaagctgcagggttcttgtatagctaaagcgttcaatgcatttcacgtgctgtggtggatgtgggtgctgtagacaggcttcttctcttcctgctctcaaaatacctcggcttgacatttggacagatcctgtcattgtttaagctgagcaaaaaaccacacaaaagttgtgtaagagatgagataacaaaggagcgagagaaatctcatgtgaatttccaagttttaattcgttctccatgaaggattttcatttcagtgaaagtcgcagcagaagagggaactttctggagtttttgagaatgccaaaccacatttttatcacacttctttggaaatcaatgcctttgcatagaaaatcaaattcagggaccacaaagaattttcagtgggaatgtctagtctgaggggtctgaggttgtttttactttattgtgttgtttaaatattttaaaaatatctttagcgtttggtcnnnnnnnnnnctgtaaacatttaatttggtctgagaaaagctgaatgtttgggtgtgacgtttgactgaggtggattggggctgcctgtggacattagtgaacaggtggtaggcttcaggaatatccagttttaatcagttgcatttggtacagaattttgagtaatggtgaaaattgttgtctttggaaagcacaaaagaaacctggaaaggcagttcggctcaggtagctacacataacattgtgtatgattttcacttcaaagctgtctggaaggaaatgcagtcagctccagctagtactatttatgtacccagataactaagatattgtttcatggccttgccttagtcagaggcccttttctctgtcctgaacccccaggtatgggtgaaattggaaattactaatctattggaaatcagttcctgacatagtaaagtttgctttcataactgcagcaaaaaaggtcaacttgccaagtcactgctgccatgtgtgtactgtattattttcagaaaaaaatataatagtctgagtccaagttatcttgatttaaaattgatagagaaaagaaactgtcgagcaagttatataacaactaacaacattgcactttctgtatatgaaatcaatatttaaataacttatttttctccattgctgttcttaaaaacattgtaagtagctgtaatataccagtaccaatatgttcttgcaattgcttcagcccaagaaagctgtgtattgttttaaaaattgtaaaaattattgtgatgattcatttagcataaagagaggtggacggaagggttttcctatgtatccaaacttgtctataattatgtcatcctatgtacctaagaaaaaagtaaataaatttcttc

SEQ ID NO: 186662 - DNA, 1333 bp, Homo Sapiens
tgtacacaaaagttggggagaaactggaccccaggtctggagcgaattccagcctgcagggctgataagcgaggcattagtgagattgagagagactttaccccgccgtggtggttggagggcgcgcaatagagcaccagcacaggcgcgggtcccgggaggccggctctgctcgcgccgagatgtggaatctccttcacgaaaccgactcggctgtggccaccgcgcgccgcccgcgctggctgtgcgctggggcgctggtgctggcgggtggcttctttctcctcggcttcctcttcgggtggtttataaaatcctccaatgaagctactaacattactccaaagcataatatgaaagcatttttggatgaattgaaagctgagaacatcaagaagttcttatataattttacacagataccacatttagcaggaacagaacaaaactttcagcttgcaaagcaaattcaatcccagtggaaagaatttggcctggattctgttgagctagcacattatgatgtcctgttgtcctacccaaataagactcatcccaactacatctcaataattaatgaagatggaaatgagattttcaacacatcattatttgaaccacctcctccaggatatgaaaatgtttcggatattgtaccacctttcagtgctttctctcctcaaggaatgccagagggcgatctagtgtatgttaactatgcacgaactgaagacttctttaaattggaacgggacatgaaaatcaattgctctgggaaaattgtaattgccagatatgggaaagttttcagaggaaataaggttaaaaatgcccagctggcaggggccaaaggagtcattctctactccgaccctgctgactactttgctcctggggtgaagtcctatccagatggttggaatcttcctggaggtggtgtccagcgtggaaatatcctaaatctgaatggtgcaggagaccctctcacaccaggttacccagcaaatgaatatgcttataggcgtggaattgcagaggctgttggtcttccaagtattcctgttcatccaattggatactatgatgcacagaagctcctagaaaaaatgggtggctcagcaccaccagatagcagctggagaggaagtctcaaagtgccctacaatgttggacctggctttactggaaacttttctacacaaaaagtcaagatgcacatccactctaccaatgaagtgacaagaatttacaatgtgataggtactctcagaggagcagtggaaccagacagatatgtcattctgggaggtcaccgggactcatgggtgtttgg

SEQ ID NO: 186663 - DNA, 2108 bp, Homo Sapiens
  misc_feature (1897)..(1936): n is a, c, g, or t
ttggctttgatatgattgaagaagcatacatgacaaaatgtggccacagcttttgctacaagtgtattcatcagagtttggaggacaataatagatgtcccaagtgtaactatgttgtggacaatattgaccatctgtatcctaatttcttggtgaatgaactcattcttaaacagaagcaaagatttgaggaaaagaggttcaaattggaccactcagtgagtagcaccaatggccacaggtggcagatatttcaagattggttgggaactgaccaagataaccttgatttggccaatgtcaatcttatgttggagttactagtgcagaagaagaaacaactggaagcagaatcacatgcagcccaactacagattcttatggaattcctcaaggttgcaagaagaaataagagagagcaactggaacagatccagaaggagctaagtgttttggaagaggatattaagagagtggaagaaatgagtggcttatactctcctgtcagtgaggatagcacagtgcctcaatttgaagctccttctccatcacacagtagtattattgattccacagaatacagccaacctccaggtttcagtggcagttctcagacaaagaaacagccttggtataatagcacgttagcatcaagacgaaaacgacttactgctcattttgaagacttggagcagtgttacttttctacaaggatgtctcgtatctcagatgacagtcgaactgcaagccagttggatgaatttcaggaatgcttgtccaagtttactcgatataattcagtacgacctttagccacattgtcatatgctagtgatctctataatggttccagtatagtctctagtattgaatttgaccgggattgtgactattttgcgattgctggagttacaaagaagattaaagtctatgaatatgacactgtcatccaggatgcagtggatattcattaccctgagaatgaaatgacctgcaattcgaaaatcagctgtatcagttggagtagttaccataagaacctgttagctagcagtgattatgaaggcactgttattttatgggatggattcacaggacagaggtcaaaggtctatcaggagcatgagaagaggtgttggagtgttgactttaatttgatggatcctaaactcttggcttcaggttctgatgatgcaaaagtgaagctgtggtctaccaatctagacaactcagtggcaagcattgaggcaaaggctaatgtgtgctgtgttaaattcagcccctcttccagataccatttggctttcggctgtgcagatcactgtgtccactactatgatcttcgtaacactaaacagccaatcatggtattcaaaggacaccgtaaagcagtctcttatgcaaagtttgtgagtggtgaggaaattgtctctgcctcaacagacagtcagctaaaactgtggaatgtagggaaaccatactgcctacgttccttcaagggtcatatcaatgaaaaaaactttgtaggcctggcttccaatggagattatatagcttgtggaagtgaaaataactctctctacctgtactataaaggactttctaagactttgctaacttttaagtttgatacagtcaaaagtgttctcgacaaagaccgaaaagaagatgatacaaatgaatttgttagtgctgtgtgctggagggcactaccagatggggagtccaatgtgctgattgctgctaacagtcagggtacaattaaggtgctagaattggtatgaagggttaactcaagtcaaattgtacttgatcctgctgaaatacatctgcagctgacaatgagagaagaaacagaaaatgtcatgtgatgtctctccccaaagtcatcatgggnnnnnnnnnnnnnnnnnnnnnnnnnnnnnnnnnnnnnnnnccctcctttatgacctttgggacattgggaatacccagccaactctccaccatcaatgtaactccatggacatgctgctcttggtggtgttatctaatttttgtgatagggaaacaaattcttttgattaaaaataaataacaaaacaataaaaagtttattgagccacaaa

SEQ ID NO: 186664 - DNA, 1309 bp, Homo Sapiens
ttgggtggttctttggattcaccattttaccccagcccagaaacaacaaacaccccacttcctgatctgcctgaggcggaaccagtgcttggtggcaacgtgttcatgtgctgaagcagcataacagagatgagtcagactgggctgatacgctctgacacggggttttcctttcccagcacattcttggatgggagcatgagggcaccagtcaccttttaacctattgggggacattagcagtcacatgttgagtgcaaacgagggtacttttgtgcatgtgtacaaacaggcagttacaagcgtgtcattttcagtggctccattttaaatcagtctgctgcctcagaatcccgtacgcctgaaggttttaagttgcatgtgcacctgaaactcgtatatgagtattttctgtctgtgcttttagagaggaggaattctgtaacgacttttgtttcgggttaggaagagaatgatctctttcagtgcaccgccacttatgttacctttttccttttatttctttgtgtttccagttgcaagaacagcaaggaaaaggaagccctctccagaaccagaaggtgaagtcgggccccctaagatcaacggagaggcccagccgtggctgtccacatccacagaggggctcaagatccccatgactcctacatcctcttttgtgtctccgccaccacccactgcctcacctcattccaaccggaccacaccgcctgaagcggcccagaatggccagtcccccatggcagccctgatcttagtagcagacaatgcagggggcagtcatgcctcaaaagatgccaaccaggttcactccactaccaggaggaatagcaacagtccgccctctccgtcctctatgaaccaaagaaggctgggtcccagagaggtggggggccagggagcaggcaacacaggaggactggagccagtgcaccctgccagcctcccggactcctctctggcaaccagtgccccgctgtgctgcaccctctgccacgagcggctggaggacacccattttgtgcagtgcccgtccgtcccttcgcacaagttctgcttcccttgctccagacaaagcatcaaacagcagggagctagtggagaggtctattgtcccagtggggaaaaatgccctcttgtgggctccaatgtcccctggggcctttatgcaaggggaaattgcaaccatccttgctggagatgtgaaagtgaaaaaagagagagactcgtgacttttcctggtttcagaaaacccaatgattaccctttaattaaactgcttgaattg

SEQ ID NO: 186665 - DNA, 1214 bp, Homo Sapiens
  misc_feature (752)..(778): n is a, c, g, or t
  misc_feature (820)..(862): n is a, c, g, or t
  misc_feature (1045)..(1059): n is a, c, g, or t
ttggagcagttgcaagaacagcaaggaaaaggaagccctctccagaaccagaaggtgaagtcgggccccctaagatcaacggagaggcccagccgtggctgtccacatccacagaggggctcaagatccccatgactcctacatcctcttttgtgtctccgccaccacccactgcctcacctcattccaaccggaccacaccgcctgaagcggcccagaatggccagtcccccatggcagccctgatcttagtagcagatgccaaccaggttcactccactaccaggaggaatagcaacagtccgccctctccgtcctctatgaaccaaagaaggctgggccccagagaggtggggggccagggagcaggcaacacaggaggactggagccagtgcaccctgccagcctcccggactcctctctggcaaccagtgccccgctgtgctgcaccctctgccacgagcggctggaggacacccattttgtgcagtgcccgtccgtcccttcgcacaagttctgcttcccttgctccagacaaagcatcaaacagcagggagctagtggagaggtctattgtcccagtggggaaaaatgccctcttgtgggctccaatgtcccctgggcctttatgcaaggggaaattgcaaccatccttgctggagatgtgaaagtgaaaaaagagagagactcgtgacttttccggtttcagaaaaacccaatgattacccttaattaaaactgcttgaattgnnnnnnnnnnnnnnnnnnnnnnnnnnnccaagacaagggaaatgtagacttcataaacatggctgtatnnnnnnnnnnnnnnnnnnnnnnnnnnnnnnnnnnnnnnnnnnntgacgacaaaaggtatgtacttataaagacatttttttcttttgttaacgttattagcatatctttgtgctttattatcctggtgacagttaccgttctatgtaggctgtgacttgcgctgcttttttagagcacttggcaaatcagaaatgcttctagctgtatttgtatgcacttattttnnnnnnnnnnnnnnngccaaatacattttctgacattgtaagattgccttactgtctgtcattccttattgctggcccctttctcaaccggaggccaagtggtgggagaaggaaaggaaatgatcgaaccgggcatgttgtcaagtgggccatgccactggggaaatacc

SEQ ID NO: 186666 - DNA, 976 bp, Homo Sapiens
ttggcagactggaaccatggagctcagcgtcctcctcttccttgcactcctcacaggcctcttgctactcctggttcagcgtcaccctaactcccatggcaccctcccaccagggccccgccctctgccccttttggggaaccttctgcagatggacagaagaggcctactcaaatcctttctgaggttccgagagaaatatggggacgtcttcacggtacacctgggaccgaggcccgtggtcatgctgtgtggagtagaggccatacgggaggccctggtggacaacgctgaggccttctctggccggggaaaaatcgtcatcatggacccagtctaccagggatatggcatgctctttgccaatggaaaccgctggaaggtgcttcggcgattctctgtgaccaccatgagggacttcgggatgggaaagcggagtgtggaggagcggattcaggacgaggctcagtgtctgatagaggaacttcggaaatccaagggagccctcgtggaccccaccttcctcttccattccattaccgccaacatcatctgctccatcatctttggaaaacgcttccactaccaagatcaagagttcctgaagacgctgaacttgttctgccagagtttcttactcatcagctctatatccagccagctgtttgagctcttctctggcttcttgaaatactttcctggggcacacaggcaagtttacaaaaacctacaggaaatcaatgcttacattggccacagtgtggagaagcaccgtgaaaccctggaccccagcgcccccagggacctcatcgacacctacctgctccacatggaaaaagagaaatccaacccacacagtgaattcagccaccagaacctcatcatcaacacgctctcgctcttctttgctggcactgagaccaccagcaccactctccgctacagcttcctgctcatgctcaaataccctcatgtc

SEQ ID NO: 186667 - DNA, 1459 bp, Homo Sapiens
  misc_feature (213)..(272): n is a, c, g, or t
tcatccaggtctgagtctagcaggatgacctcgggctgcgggagggcggcggctggtggcaggtcggccgggcgctcagcggctgggctgccccccaggcaggtgggggtgctgatgctgcgcgcagtcagccgcttcttgcagggctcgcgctcgccgtgggtctcggagaggcagcgcttgcgcacgtgggagagattcaggccgacggcnnnnnnnnnnnnnnnnnnnnnnnnnnnnnnnnnnnnnnnnnnnnnnnnnnnnnnnnnnnntgagggcgggtgcgtgttccgggccgggtcccaggcaagcaggtcgggcttggtggtgagctgcaggggctgctctccaaaggcctccttggtcggggacagcttgcgggagccggcatcctggggctgcggatcgctaaccccggacacctcctcctccctcctcttgggcggcgcctccaccttcttctcctctgcgcccgccgcctttttaaaagtcctgtcggcaggagggtggcgctcgtcggctgcccgcttcttgtggctgggggagcgagcctccccctctgccacctcgccggacttgatcttcaccgcctgcatgccgttctccatgtatttgctcatcacgatcacgatgcgtccgttcttgttcttgttcttgactatcttcatcttgcccccaatcccgttgcccgtcacagcctcttgggggccggcatcattccgttgggggggcccttctcggagcctttgcctggagcacccgccgcaccggccaggggcttcaccgcccccaggtagcctttggcccccgcaccttgcgcccacttgtcgggcgggtggctcttggcccccaggtccgggcaggtggggctgggcgcctccttgtggccgccctggtactgcaggtcgtacattttggggtcgggctggtagggatggtgcttcttgctgttgagctggtagtagtacttgccgctcttgcccggcggcgggggcttgcccgcccgctccttgctgtgcggctggtactggtggtgcttcttgctgttgagctcgtactgatgcccctggcccttcccctgcgcgcccaaatccagcttggcacggttgtcagtggaggagtcctggaggccggtcaggacattggaacgacgggcaaaggtaggcacctgcaccactagcggtttgggcttcggccctctcttccgatatcccatcagctgctcctgccgttccctttgtgctcaggaggcagaagctcagggatgcacctctggccctcctgcccacggccttgggcctgtggctctgtgcgaagcaaagtggacacggggatccagggaagacaaaccagcccaagcgaggtgtgcgccgacctcatccctcccgtcagaagcgcgggatgctaatgacctcagtaagattccccaacttttttgtacaaagttggcttttatagg

SEQ ID NO: 186668 - DNA, 1649 bp, Homo Sapiens
  misc_feature (1274)..(1300): n is a, c, g, or t
ttggcgcctccgccgcggcccccacctctgcctccttctactcgggcgccccggcggccgccacctctccccagcccaggagaggctgcggagccgcagccgcccagaccgcgcagcgcgggaggcaggttccgcacgaaataaatcagaatgagttatgcagaaaaacccgatgaaatcacgaaagatgagtggatggaaaagctcaataacttgcatgtccagagagcagacatgaaccgcctcatcatgaactacctggtcacagagggctttaaggaagcagcggagaagtttcgaatggaatctggaatcgaacctagtgtggatctggaaacacttgatgaacgaatcaagatccgggagatgatactgaaaggtcagattcaggaggccatcgccttgatcaacagcctccacccagagctcttggacacaaaccggtatctttacttccatttgcagcaacagcatttgatcgagctgatccgccagcgggagacagaggcggcgctggagtttgcacagactcagctggcggagcagggcgaggagagccgagagtgcctcacagagatggagcgtaccctggcactgctggcctttgacagtcccgaggagtcgcccttcggagacctcctccacaccatgcagaggcagaaggtgtggagtgaagttaaccaagctgtgctagattatgaaaatcgcgagtcaacacccaaactggcaaaattactgaaactactactttgggctcagaacgagctggaccagaagaaagtaaaatatcccaaaatgacagacctcagcaagggtgtgattgaggagcccaagtagcgcctgcgcttgcgtggtggatccaacaccagccctgcgtcgtgggacttgcctcagatcagcctgcgactgcaagattcttactgcagtagagaactctttttctcccttgtacttttttttgacctggcatctttttatagggaaaaatggcctttgtaggcagtggaaaacttgcaaggaaagctgccgtctctttggcagtctgatgcagagcctgcactctggcactcgctgaagaatctggaaggttgcggtttgctcttccagtgttcgggggcctctggctgctgaaggattcggtctaccacggagggctgtgctgttaggctgcatcccactcaaaatacaggaaaagcacgaatcatgattctgctttctgttagcttaggcagacattgggccttcacctacaagtttttccttacccctgtggnnnnnnnnnnnnnnnnnnnnnnnnnnnccataggaaagaatatataaatttgtaaatcctaattcaaagatggctcatgtgtgagggcattgagtttgatttgttttccctttggtctgggttgtgtggcttttgggggatgcgtgtgagggggctatgtgttttttaattttttaaatatatattttggtgctgtgtgtggtaagagacttgttcctagtggatcaatgaacccatctcttctgggcagttttgttgaaaataaaggtttctctttgatttcaagaatgaccaaaatggccctctaaaagatgttaatcatctcaaatgaccttttgtctttggggcgttcttccccctgtgatagcggcagtgg

SEQ ID NO: 186669 - DNA, 1166 bp, Homo Sapiens
ttggcctggtcctgctccctcagcacccaaaaggggcagaacctgagttgagacttgcatgttcctcgcatgtgtctaatgtcagcactagaaagcagttttaggaggttccagcctgcagcataggtacgacctcagaggatggctttgcacttggcatagtttcatggaaaggagtacgttgtagtttatgcagtatctgactgcaaatcatattcaggaaagaagtgcagaatttcttccccaagcccagagaagagcagccctgagcccctgtattctgctggccagacacacatggcacagacacagctgaccataacccaggaatccagagctcggtttctcatttctgagatcaggatgcttgtatagtggcctgtgaggtgacagattggcagggcccaaggccccaggttttcatttttcatgagaaaagctttccaagtgcctggccagaccttggtccttagtgcagagcccgtccttttgtacttggggtgaccccagcagccaattatccggccttccatagggggttcagtcccaaagacatggggctttgaaaaccctagcctgaagtctgagccaccaagggcttggctgggttggacacccacaggtgtatccagagcccagcccggtgctgggaaagctttgcatacggccagggccacttgtcaggattcacaggtaggagatgtttaggtctctttatttagtgcaatctgggggatggcaacagagaaagaggaaaggtagctgtagggttctcccatttccagaggctccatccacacctgccttcccacattctgagcagaacttttctcagtacttttttcccgatcaccctgtgggaccagctggacctgaggctgcagtcttctctcctgcaggctgcttgccttgtctctcatgcggaagaggcattcgagttacctggtgagagaccgtgttgccccctcccacagctctctgccctgcgcgttcttccctttggtgccgagtatgtttcggtcccctccagactccaggacacgcccatgtatgtctcctgcgtgttcatcctgggcccagatctccctgccccagcaagactcgcagtgggatggctgctggcatgcccaccctgcatgcgctttgccctctccttgcaagcctgg

SEQ ID NO: 186670 - DNA, 1824 bp, Homo Sapiens
  misc_feature (1368)..(1379): n is a, c, g, or t
ttgtacaaaaaagttggattttattggtatacgtatctaaaaatattgaaaatctattctatattatttataagatcactgttgcttctatgacaaaaaagaattttaggtacccaaaattcttatcaactaacttatgaaacagaatattttacattttaaacattaaagacttaaaaattaaactagactctaaagtgctttattcacttgatctgcttttcaaagccatatttgtcttcaaagaaaaaattggaacaaattttgacttcagactagctctaaaacaaattgcacctgctgagcattcagtaattattgttggatggaggtaactgagtagggagttagaattaaacagtttactttagtaaggaggtgcaaaatcttaattcctattaattggttatagttgatggtttaattttttaatacaattaatgatttcacacgaataatatgaagattaaagaactctgattgttgcccacatgtttatttgtagtaatggtaacatttaataactttattgagtattgcagatggcattgtgccaactgctgataactcagcagttaataagacagtttctgccttattttataattttgattaacttgatgcttatatttgtagtgttttgcttttatttctgatgcgaaattcttccctaaaataatagtattcagttcacttgcttgaagagatttgaatatatgtaattttgaatattttaccttcagttactaaaaatatttttgtcactttcagcatatgaaacactctcagatgctaatagacgaaaagagtatgatacacttggacacagtgcttttactagtggtaaaggacaaagaggtagtggaagttcttttgagcagtcatttaacttccattttgatgacttatttaaagactttggcttttttgggccaaaccaaaacactggatccaagaagcgttttgaaaatcatttccagacacgccaggatggtggttccagtagacaaaggcatcatttccaagaattttcttttggaggtggattatttgatgacatgtttgaagatatggagaaaatgttttcttttagtggttttgactctaccaatcagcatacagtacagactgaaaatagatttcatggatctagcaagcactgcaggactgtcactcaacgaagaggaaatatggttactacatacactgactgttcaggacagtagttcttattctattctcactaaatccaactggttgactcttcctcattatctttgatgctaaacaattttctgtgaactattttgacaagtgcatgatttcactttaaacaatttgatatagctattaaatatatttaagggnnnnnnnnnnnngacaaattcaacattcaacgagtagacaaaatgctaattatttccctgattaggaaagtttctttaaaaaacacgtaattttgcctagtgctttttctctacctgcccttgggctcactaatatcaccagtattattaccaagaaaatattgagtttacctgattaaactttaaaagttaattgtagatttaaattgtgtgaacctaatgatttttgcagtgaaacctttactaattcaaagttgcatgttctatgacatctgtgacttgcgttgcagagtgtacatgaaactgtataattgagtcattcagtaaaggagaacagtatcttggttaattgctactgaaaggttgagaaaggaatggtttgatatttaccacagcgctgtgcctttctacagtagaactggggtaaaggaaatggttttattgcccatagtcattt

SEQ ID NO: 186671 - DNA, 1483 bp, Homo Sapiens
  misc_feature (1035)..(1045): n is a, c, g, or t
tgagcaatgcttttctataaaagccaactttgtacaaaaaagttggaccttggatgatgtgggctgctggggcagtagcagccatgtctagcatcacctttcctgctgtcagtgcacttgtttcacgaactgctgatgctgatcaacagggtgtcgttcaaggaatgataacaggaattcgaggattatgcaatggtctgggaccggccctctatggattcattttctacatattccatgtggaacttaaagaactgccaataacaggaacagacttgggaacaaacacaagccctcagcaccactttgaacagaattccatcatccctggccctcccttcctatttggagcctgttcagtactgctggctctgcttgttgccttgtttattccggaacataccaatttaagcttaaggtccagcagttggagaaagcactgtggcagtcacagccatcctcataatacacaagcgccaggagaggccaaagaacctttactccaggacacaaatgtgtgacgactgaaatcaggaagatttttctatcagcacccaggtcttagttttcacctctagttctggatgtacattccatttccatccacagtgtactttaagattgtcttaagaaatgtatctgcatgaactccgtgggaactaaaggaagtgggaacttagaaccagacagttttccaaagatgttacaatttcttttgaaaaaccttttgtttattagcaccaatttctcgccactaagctatttgttttattatacatcctttaattaaaaactatatatgtaacttcttagatattagcaaatgtctctgctaccatttccttaaggtgttgagctttaactctatgctgactcagtgagacacagtaggtagtatggttgtggacctatttgttttaacattgtaaaattttgagtcagattttaatattgtaaaatcttgggtcaaataattcaaagccttaatgcagatgcactaaaacaaagaaatggtaaatgaattgtttgcatttnnnnnnnnnnnctcttaagaaaactgtactaaatctgaatcatgttttgagcttgtttgcagtacttttaaacattattcactactgtttttgaagtgagaaagtatcagccatttagcatttaagttggggtatttagagcctgtaatctaaatgctggctcaaatttattccccagctacttcttataccactattcttttaatgtttgcataatcataagcacctcaacacttgaatacataatctaaaaattatatagtaaagctggtagccttgaaaatgtcagtgtgatatctattatgtagataaatatatatagtggcctttcaggactgtcacagtaacactttatttacagagctaatgtttgtcctaaattttcaggaccctagaggagagctttatacaattaccgatgtgaatttctctaaagtgtatatttttgt

SEQ ID NO: 186672 - DNA, 1187 bp, Homo Sapiens
ttggcgcttattggtgctctttctgatgtttggggccgaaaatccttcttgctgctaacggtgtttttcacatgtgccccaattcctttaatgaagatcagcccatggtggtactttgctgttatctctgtttctggggtttttgcagtgactttttctgtggtatttgcatacgtagcagatataacccaagagcatgaaagaagtatggcttatggactggtttcagcaacatttgctgcaagtttagtcaccagtcctgcaattggagcttatcttggacgagtatatggggacagcttggtggtggtcttagctacagcaatagctttgctagatatttgttttatccttgttgctgtgccagagtcgttgcctgagaaaatgcggccagcatcctggggagcacccatttcctgggaacaagctgacccttttgcgtccttaaaaaaagtcggccaagattccatagtgctgctgatctgcattacagtgtttctctcctacctaccggaggcaggccaatattccagcttttttttatacctcagacagataatgaaattttcaccagaaagtgttgcagcgtttatagcagtccttggcattctttccattattgcacagaccatagtcttgagtttacttatgaggtcaattggaaataagaacaccattttactgggtctaggatttcaaatattacagttggcatggtatggctttggttcagaaccttggatgatgtgggctgctggggcagtagcagccatgtctagcatcacctttcctgctgtcagtgcacttgtttcacgaactgctgatgctgatcaacagggtgtcgttcaaggaatgataacaggaattcgaggattatgcaatggtctgggaccggccctctatggattcattttctacatattccatgtggaacttaaagaactgccaataacaggaacagacttgggaacaaacacaagccctcagcaccactttgaacagaattccatcatccctggccctcccttcctatttggagcctgttcagtactgctggctctgcttgttgccttgtttattccggaacataccaatttaagcttaaggtccagcagttggagaaagcactgtggcagtcacagccattctcataatacacaagccgccaggagaggcaaagaaccttt

SEQ ID NO: 186673 - DNA, 1722 bp, Homo Sapiens
  misc_feature (1272)..(1282): n is a, c, g, or t
ttggacctctcaattgcctgtagaaataatacccagcacattttacagtttggaacatgatatccctattttacattacaccctcacagcactcttgtgaattaagttgctgtctttgtatacagggtcagattgttaagcgacttgcccatagtcacctagtaagcaagttcagttctccttttctctacagccatttcacagtaagaattacttaattatgtagtttgactttcaggtacagtggagaagaatttactgtttttgttttgctgctctccttataggatgatgtgggctgctggggcagtagcagccatgtctagcatcacctttcctgctgtcagtgcacttgtttcacgaactgctgatgctgatcaacagggtgtcgttcaaggaatgataacaggaattcgaggattatgcaatggtctgggaccggccctctatggattcattttctacatattccatgtggaacttaaagaactgccaataacaggaacagacttgggaacaaacacaagccctcagcaccactttgaacaggtaattccatcatccctggccctcccttcctatttggagcctgttcagtactgctggctctgcttgttgccttgtttattccggaacataccaatttaagcttaaggtccagcagttggagaaagcactgtggcagtcacagccatcctcataatacacaagcgccaggagaggccaaagaacctttactccaggacacaaatgtgtgacgactgaaatcaggaagatttttctatcagcacccaggtcttagttttcacctctagttctggatgtacattccatttccatccacagtgtactttaagattgtcttaagaaatgtatctgcatgaactccgtgggaactaaaggaagtgggaacttagaaccagacagttttccaaagatgttacaatttcttttgaaaaaccttttgtttattagcaccaatttctcgccactaagctatttgttttattatacatcctttaattaaaaactatatatgtaacttcttagatattagcaaatgtctctgctaccatttccttaaggtgttgagctttaactctatgctgactcagtgagacacagtaggtagtatggttgtggacctatttgttttaacattgtaaaattttgagtcagattttaatattgtaaaatcttgggtcaaataattcaaagccttaatgcagatgcactaaaacaaagaaatggtaaatgaattgtttgcatttnnnnnnnnnnnctcttaagaaaactgtactaaatctgaatcatgttttgagcttgtttgcagtacttttaaacattattcactactgtttttgaagtgagaaagtatcagccatttagcatttaagttggggtatttagagcctgtaatctaaatgctggctcaaatttattccccagctacttcttataccactattcttttaatgtttgcataatcataagcacctcaacacttgaatacataatctaaaaattatatagtaaagctggtagccttgaaaatgtcagtgtgatatctattatgtagataaatatatatagtggcctttcaggactgtcacagtaacactttatttacagagctaatgtttgtcctaaattttcacgaccctagagagagctttatacattaccgatgtgaatttctctaaagtgtatatttttgtgtcc

SEQ ID NO: 186674 - DNA, 1707 bp, Homo Sapiens
ctttgtacaaaaaagttgggatgcacaacagtgtatgcttgaaatcttggatactgcaggaacggagcaatttacagcaatgagggatttatacatgaaaaatggacaaggatttgcattagtttattccatcacagcacagtccacatttaacgatttacaagacctgagagaacagattcttcgagttaaagacactgatgatgttccaatgattcttgttggtaataagtgtgacttggaagatgaaagagttgtagggaaggaacaaggtcaaaatctagcaagacaatggaacaactgtgcattcttagaatcttctgcaaaatcaaaaataaatgttaatgagatcttttatgacctagtgcggcaaattaacagaaaaactccagtgcctgggaaggctcgcaaaaagtcatcatgtcagctgctttaatatactaaatgcattgtagctctgagccaggtctgaagaactgttgcccaattcaacagtgccagcattccaactttgttaaacctaccaacatcttaaatggactttcctgtggtggtaccctttaagaggcggatgaaagctactatatcagtttgcacattctaatcactttccagtatcacaagagagatttttacttatataatagtcctagagtttgcagctggtaaaaccagaggctacatccagtattactgctaagagacattcttcatccaccaatgttgtacatgtatgaaaatggtgtactgtatactttaacatgccccatactttgtattggagagtacaataatgtaaatcctaaaagcaccactattttagcataataaaagaaagtccaaagagctcctatatagactactccagataacttcgcttctttgatacttgtagcttattgtaattttttttaagaaattcaaggtcattattattgtacaaaataagcgctttgattaacacagctatatagtttttttaatttttaaaaaacctgtggagacggtgatcttgtctttaaaacatgatagtcccttcagtataatgtcttagattaaagacgttgcctttaatatctgttgggaaggaaatgtccagacttttcaaatctcttattatatgtttcctttttttgtttacatagggaacaatgtttatagtcgtgtgtacagtgggggtctacaacaagaagtgtatattttcaaacaattttttaatgatttaacaatttttgtaaatcattttcaggcttctgcagctgtagattctcactgtgaatcccttgcttgctcatgcataagtgtatttgcaataccaaatatacaggtttagtatttttgcctgttagtgattgtttcacatgtgtaacgttttggttgagatgttaaatggtggacgagtactgtggatgtgaatgtgggaagtaattttaatcatatgtaattggtcacaaggcctaatttgcagtaactattgctgttttatttaacaatgccttgttgctttgtatgcattaatgtttggatgtaaagattgtgtgtctatccaacagggagccacagtatttaaattgaccaacctaatgttacaactactttgaggtggccaaatgtaaactaaaagccttaattaaagtggtgcaattttgtataacttagcatcagtagttcaataaatttggattgccatgcaagggcttgcattat

SEQ ID NO: 186675 - DNA, 1407 bp, Homo Sapiens
  misc_feature (1276)..(1289): n is a, c, g, or t
aaaagccaactttgtacaaaaaagttggccagattcaggcgtgtaaaccagccggagcggcgcggcagcggcaggaccgccgtggcgcctagagtagcgacccggggggagcgcggggcgacgctggctgcagggacccggtgacagcgtgagaggtactaggttttgacaagcttgcatcatgcgtgagtataagctagtcgttcttggctcaggaggcgttggaaagtctgctttgactgtacaatttgttcaaggaatttttgtagaaaaatacgatcctacgatagaagattcttatagaaagcaagttgaagtagatgcacaacagtgtatgcttgaaatcttggatactgcaggaacggagcaatttacagcaatgagggatttatacatgaaaaatggacaaggatttgcattagtttattccatcacagcacagtccacatttaacgatttacaagacctgagagaacagattcttcgagttaaagacactgatgatgttccaatgattcttgttggtaataagtgtgacttggaagatgaaagagttgtagggaaggaacaaggtcaaaatctagcaagacaatggaacaactgtgcattcttagaatcttctgcaaaatcaaaaataaatgttaatgagatcttttatgacctagtgcggcaaattaacagaaaaactccagtgcctgggaaggctcgcaaaaagtcatcatgtcagctgctttaatatactaaatgcattgtagctctgagccaggtctgaagaactgttgcccaattcaacagtgccagcattccaactttgttaaacctaccaacatcttaaatggactttcctgtggtggtaccctttaagaggcggatgaaagctactatatcagtttgcacattctaatcactttccagtatcacaagagagatttttacttatataatagtcctagagtttgcagctggtaaaaccagaggctacatccagtattactgctaagagacattcttcatccaccaatgttgtacatgtatgaaaatggtgtactgtatactttaacatgccccatactttgtattggagagtacaataatgtaaatcctaaaagcaccactattttagcataataaaagaaagtccaaagagctcctatatagactactccagataacttcgcttctttgatacttgtagcttattgtaattttttttaagaaattcaaggtcattattattgtacaaaataagcgcttttgattaacacagctatatagnnnnnnnnnnnnnnaaaaaacctgtggagacggtgatcttgtctttaaaacatgatagtcctttcattatatgtcttaaaataaaagacgttgcctttaatatctgttgggaaggaaatgtccagacttttc

SEQ ID NO: 186676 - DNA, 1520 bp, Homo Sapiens
ctttgtacaaaaaagttggcgttgttgcaccgcttctttgtggatgacatggctgagccaagggagacgccagagcatcctctgaagcagattaagtttttgctgggcaggaaagaagaggaggcagtgctggttgggggtgaatggtctccttccctggatggcctcgacccccaggctgacccgcaggtgctggtgcgtaccgccatccgctgtgcgcaggcccagactggcattgatttgagcggctgtaccaagtggtggcgctttgccgagtttcagtacctgcagccgggacccccccggcggcttcagacagtggtggtgtacctgccggatgtctggaccatcatgcctactttggaggagtgggaggccctgtgccagcagaaagctgcagaggcagctcccccaacccaggaggcacaaggggaaacggagcctactgaacaggcacctgatgccttggagcaagcagcagacacttctagacggaacgcagaaactccagaggccaccacacagcaggaaacggacactgatctcccagaggcccctccaccccccctagaacctgctgtcatcgcacgccctggctgtgtaaacctgtccctccatgggattgtggaggatcggaggccaaaggaaaggatctcttttgaggtgatggtgctggccgagctgtttctggagatgctccagagggattttggctatagagtttataagatgctactgagccttcctgaaaaggtcgtgtccccacctgaacctgagaaggaggaggcggccaaggaagaagccaccaaggaggaagaagccatcaaagaggaggtggtcaaggagcccaaggatgaggcacagaatgagggcccggctacagagtcagaggccccgctgaaggaggatgggcttttgcccaaaccactctcttctgggggagaggaagaagaaaaaccccggggcgaggcttctgaggacctgtgtgagatggccctggacccagaactgttgcttctgagggatgatggagaggaggagtttgcaggagcaaagctggaggattcggaggtccggtccgttgcctcaaaccagtcagagatggagttctcttcacttcaggacatggagctggatccctctgctgtgctccccttagactgtctgcttgcttttgtgttctttgatgccaactggtgtggctacttgcaccggcgagacttagagaggatcctccttacccttgggatccggctcagtgcagagcaggccaagcagctggtcagcagggtggtgacccagaacatctgccagtaccggagccttcagtacagccgccaggagggcctggatggtggccttcccgaggaggtgctcttcggaaacctggacctgctgccccctcctgggaaaagcacgaagccaggtgctgcccccacagaacacaaagcctttggtgtcccacaatggcagccctgattaacgtggggagcctgctgcaccgcgcggaacagcaggac

SEQ ID NO: 186677 - DNA, 1085 bp, Homo Sapiens
ttggcgcatgactgttacagctttctgtgcagagatgactgtccaagtgccacatgcctacgattgaaatgaaaactctattgttacctctgagttgtgttccacggaaaatgctatccagcagatcatttaggaaaaataattctatttttagcttttcatttctcagctgtccttttttcttgtttgatttttgacagcaatggagaatgggttatataaagactgcctgctaatatgaacagaaatgcatttgtaattcatgaaaataaatgtacatcttctatcttcacattcatgttaagattcagtgttgctttcctctggatcagcgtgtctgaatggacagtcaggttcaggttgtgctgaacacagaaatgctcacaggcctcactttgccgcccaggcactggcccagcacttggatttacataagatgagttagaaaggtacttctgtagggtcctttttacctctgctcggcagagaatcgatgctgtcatgttcctttattcacaatcttaggtctcaaatattctgtcaaaccctaacaaagaagccccgacatctcaggttggattccctggttctctctaaagagggcctgcccttgtgccccagaggtgctgctgggcacagccaagagttgggaagggccgccccacagtacgcagtcctcaccacccagcccagggtgctcacgctcaccactcctgtggctgaggaaggatagctggctcatcctcggaaaacagacccacatctctattcttgccctgaaatacgcgcttttcacttgcgtgctcagagctgccgtctgaaggtccacacagcattgacgggacacagaaatgtgactgttaccggataacactgattagtcagttttcatttataaaaaagcattgacagttttattactcttgtttctttttaaatggaaagttactattataaggttaatttgcagtcctcttctaaatagaaaaccatatcccttggctactaacatctggagactgtgagctccttcccattccccttcctggtactgtggagtcagattggcatgaaaccactaactt

SEQ ID NO: 186678 - DNA, 1661 bp, Homo Sapiens
tttgtacaaaaaagttggaaagatggcggcgcccagggcggtagcgtgaaacttggtggaagacgctgaccagtcgtgttggaatcaaaacagcggggaccctgcgccatgtcgcgactgatcgtgaagaatctcccgaatgggatgaaggaggagcgtttcaggcagctgtttgccgccttcggcacgctgacagactgcagcctgaagttcaccaaagatggcaagttccgcaagtttggttttattggcttcaagtccgaggaagaggcccagaaggcacagaagcatttcaacaagagcttcttcgacacatcccggatcacagtggagttctgcaagtcattcggggacccggccaaacccagagcctggagcaaacatgcccagaaaccaagccagcccaagcagcctccaaaagactctactactccagaaattaagaaagatgagaagaagaaaaaggtggcaggtcgactggagaagctgaaggaggatacagagttccaggagtttctgtcagttcatcataggcgggcgcaggcagccacttgggcgaatgatggcctggatgctgagccctccacagggaagagcaagccggccagtgactacctgaacttcgactccgattctgggcaggagagtgatgaggagggagccgcggaggacctgcaagaagaggcaagcctcgtaccaaaggcagctgtgcagaaggagctgtcggacatggattacctgaaatccaagatgatgaaggctgggtcgtcgtcttcctcggaggaagaggaaagtgaagatgaagccgtgcactgtgatgaagggagtgaggccgaggaagaggattcctccgccaccccagtcctgcaggaaagagacagcaagggtgcaggccaagagcaagggatgccagctgggaaaaagagaccaccggaggccagagccgagacagagaaaccagcaaaccagaaggaacccaccacctgccacaccgtgaagctgcggggagccccgttcaatgtcacagagaaaaatgttatggaattcctggcacccctgaaaccagtggccattcgaattgtgagaaacgctcatgggaataaaacaggatacatctttgtggatttcagcaatgaagaggaagtgaagcaagctctgaaatgcaaccgggagtacatgggtgggcgctacatcgaggtgttcagggaaaagaacgtccccaccaccaagggtgcaccaaagaataccaccaaatcctggcaaggccggatactcggggagaacgaagaggaggaggacctggccgaatccggaaggctctttgtacggaacctgccctacaccagcaccgaggaggatctggagaagctcttctccaaatatggtcccctgtctgagctccactaccccatcgacagcctgaccaagaaacccaagggttttgcattcatcaccttcatgttccctgagcacgctgtgaaggcctactcggaggtggacgggcaggtattccagggcaggatgctccacgtgttaccatctaccatcaagaaggaagccagcgaggatgccagtgccctgagatcgtcgtcctacaagaagaagaggaggcccaggacaaagccaacagtgccagctctcacaactggaacacactattc

SEQ ID NO: 186679 - DNA, 1338 bp, Homo Sapiens
ctttgtacaaaaaagttgggtgtacatctcctagcacgagcactttacagacttcaacgccacgtcggcactcttctgggaacagcacgatcttgtgtatggcgactggactagcggcgagaactcagacggctgctacgagcactttgctgagctcgatatcccacagagcgtccagcagaacggctccatctacatccacgtttacttcaccaagagtggcttccacccagacccccggcagaaggccctgtaccgccggcttgccacagtccacatgtcccggatgatcaacaaatacaagcgcagacgatttcagaaaaccaagaacctgctgacaggagagacagaagcggacccagaaatgatcaagagggctgaggactatgggcctgtggaggtgatctcccattggcaccccaacatcaccatcaacatcgtggacgaccacacgccgtgggtgaagggcagtgtgccccctcccctggatcaatatgtgaagttcgacgccgtgagcggtgactactatcccatcatctacttcaatgactactggaacctgcagaaggactactaccccatcaacgagagcctggccagcctgccgctccgcgtctccttctgcccgctctcgctttggcgctggcagctctatgctgcccagagcaccaagtcgccctggaacttcctgggtgatgagttgtacgagcagtcagatgaggagcaggactcggtgaaggtggccctgctggagaccaacccctacctgctggcgctcaccatcatcgtgtctatcgttcacagtgtcttcgagttcctggccttcaagaatgatatccagttctggaacagccggcagtccctggagggcctgtccgtgcgctccgtcttcttcggcgttttccagtcattcgtggtcctcctctacatcctggacaacgagaccaacttcgtggtccaggtcagcgtcttcattggggtcctcatcgacctctggaagatcaccaaggtcatggacgtccggctggaccgagagcacagggtggcaggaatcttcccccgcctatccttcaaggacaagtccacgtatatcgagtcctcgaccaaagtgtatgatgatatggcattccggtacctgtcctggatcctcttcccgctcctgggctgctatgccgtctacagtcttctgtacctggagcacaagggctggtactcctgggtgctcagcatgctctacggcttcctgctgaccttcggcttcatcaccatgacgccccagctcttcatcaactacaagctcaagtctgtggcccaccttccctggcgcatgctcaccta

SEQ ID NO: 186680 - DNA, 1083 bp, Homo Sapiens
ccaacccaccccctcggcaacgctgcatcagcttcaccatgattcccagtggtgctgggctggcagggcgagatggctggaaacacagagggacagagggacagacagcgcctccacaaacaaaccctggcctgccccggcccctacgtcacacgctgggccctgacctgaggcgggcctcccaccgccccggcctgatctgtccagggaaagggcgacagggaggggaggcgagggggccgggacgcaggggtagtggtcgccaggagccggagcaggtgaggaccagtctcgactaatcctttttcttgtcctctgctggctttggaggggcttcctggggctcgctggcagagctggccccctgggtgggcttggtgggcagggacgtggaggcctcctccctggtggcggtggtcgtggtgggtgcaggtgtgggcgtgagggcccctgctgctgtgggaacctcggccacgggggcggcagctgtggggtcttctccactcatgccaaactcgttgactcgggtggggtcgacgcggtagatccaccgttggtagaggtagatgaagaaaaccacatcgtcccgcaggcagccgatccggtacataacgggcatcttgatgacaaaggcgaacaggtcgtcgatgaatgtgttgagggccttgtaggtgagcatgcgccagggaaggtgggccacagacttgagcttgtagttgatgaagagctggggcgtcatggtgatgaagccgaaggtcagcaggaagccgtagagcatgctgagcacccaggagtaccagcccttgtgctccaggtacagaagactgtagacggcatagcagcccaggagcgggaagaggatccaggacaggtaccggaatgccatatcatcatacactttggtcgaggactcgatatacgtggacttgtccttgaaggataggcgggggaagattcctgccaccctgtgctctcggtccagccggacgtccatgaccttggtgatcttccagaggtcgatgaggaccccaatgaagacgctgacctggacgcacgaagttgccaacttttttgtacaaagtt

SEQ ID NO: 186681 - DNA, 1567 bp, Homo Sapiens
  misc_feature (1137)..(1148): n is a, c, g, or t
ttggggccgagagtgagaacatcccattcactctgcctgaagtttccacaaataagacctactccttcctaatttacacagaggtagatattggagaactactcatgttgaagctcaaatggaagagtgattcatactttagctggtcagactggtggagcagtcccggcttcgccattcagaagatcagagtaaaagcaggagagactcagaaaaaggtgatcttctgttctagggagaaagtgtctcatttgcagaaaggaaaggcacctgcggtatttgtgaaatgccatgacaagtctctgaataagaagtcaggctgaaactgggcgaatctacagaacaaagaacggcatgtgaattctgtgaagaatgaagtggaggaagtaacttttacaaaacatacccagtgtttggggtgtttcaaaagtggattttcctgaatattaatcccagccctacccttgttagttattttaggagacagtctcaagcactaaaaagtggctaattcaatttatggggtatagtggccaaatagcacatcctccaacgttaaaagacagtggatcatgaaaagtgctgttttgtcctttgagaaagaaataattgtttgagcgcagagtaaaataaggctccttcatgtggcgtattgggccatagcctataattggttagaacctcctattttaattggaattctggatctttcggactgaggccttctcaaactttactctaagtctccaagaatacagaaaatgcttttccgcggcacgaatcagactcatctacacagcagtatgaatgatgttttagaatgattccctcttgctattggaatgtggtccagacgtcaaccaggaacatgtaacttggagagggacgaagaaagggtctgataaacacagaggttttaaacagtccctaccattggcctgcatcatgacaaagttacaaattcaaggagatataaaatctagatcaattaattcttaataggctttatcgtttattgcttaatccctctctcccccttcttttttgtctcaagattatattataataatgttctctgggtaggtgttgaaaatgagcctgtaatcctcagctgacacataatttgaatggtgcagnnnnnnnnnnnngaaaccgtaattttattattagattctccaaatgattttcatcaatttaaaatcattcaatatctgacagttactcttcagttttaggcttaccttggtcatgcttcagttgtacttccagtgcgtctcttttgttcctggctttgacatgaaaagataggtttgagttcaaattttgcattgtgtgagcttctacagattttagacaaggaccgtttttactaagtaaaagggtggagaggttcctggggtggattcctaagcagtgcttgtaaaccatcgcgtgcaatgagccagatggagtaccatgagggttgctatttgttgtttttaacaactaatcaagagtgagtgaacaactatttataaactagatctcctatttttcaaatgctcttctacgtataaatatgaaatga

SEQ ID NO: 186682 - DNA, 1297 bp, Homo Sapiens
  misc_feature (838)..(850): n is a, c, g, or t
ttggagtttatgtgccaaactttccagggttttgtagtcacctagattttaagctgatagcatagtgcttcagcggttcttctaaccggggtatgcaggaacatggctgcagacacgtttgggtaaacaggcaccttctgacttcttcattgtttcctgtagttctccctcttcccacaaagctgtcagcgcagtggaagaggttgcacttctccgagagaggacaggtttctgttaagatcaccaagtagctgtgctttaattagagccagacaagctttcaaggtcctttaagtatttgatgatcaactgaacacgtttctattcaaggagaaaacaccattcagtaagaagatggagtagatatcagatgaaacaattcacgtttaatatgtaaatgtaccaattatgtgattcagtttcaactttcaagtacttcctgagaggttagtacattattattgagctctcacagaaagcttaatcatagatataattaacctgatccaaatgagtaaactggaccttagaaaggctaagtgatctttctctggctatccagctagtagtaatgaagtcaggtcttgaaccccggttctgctgactgaattggatgcactatagtacaggcttttagcaccgaagtgtggtcctcagaccagtgcctgccaaccagatgttactggtctgtgaggaaataagtacagatactgacaggaagcttttataaacaatttattggagtgtttttgtttctgttgggtctaattaaaaaaattggagcttgtattttatgtgtctttggtcttattttgtctaggaattcatttttgctggnnnnnnnnnnnnncaactgtagtcccacaacagtctgaaaataacccagtcaccaaatatcttcctcaaatacagagggagaactttctttcacgcctcctttagcctgtcaactccttataataatgcctaaatattccaaattaatactgcctctttaacctgctaattgttttcacaatgttacaagaaaacttggatctgtgcattatcaccatctagtggctaaactcaggcaacacgaacttctaccaaactcaggaaattgctctggaaaaactacaggattttggatttccagaactgccttgaagagacaaagattctcgtaccaagttttggtcaactgcaaatcaaagaacttggttatgcagggaaaacaaatgaggatatctgtacctggaacttttaaacaagattctaatagttatgtgaaaaaagcattcaagatttttgagta

SEQ ID NO: 186683 - DNA, 1545 bp, Homo Sapiens
ggtctgtagagcccagtctctttcccctaaaccacaaacctctgagaaagaataaagcagtagaggaggacagggcggggcagaatcaggggacagttaaaggatgtgcataggacaaggagtagccacactacgtgattttcagaaagcaagggcaaaggccggggagggccgagggcgccaggcttctctctgctcccagccctagtcaaccacaagggtctcctggctgtaggggatggatttctcgtgcatctgttctccacccttgcccatgttggggccgggcccctggctgtgccccgaagagtagctggctgacttctccccactgctgctgtgggaggtgcctgcgcacctgctctggccacagcagagcatggaggtgcaggcctggcggaagcgggggtcgaaaaaggcatagaggaaggggttgaggcagctgttgacgtagctgatgcaggtgcagtaggggaagatgttcatgaggaagaggtcaaagtcacagggccagtgcagcaggctgcccagcatgtacagcgtcttcaccaggtggtagggcatccagcacagggcaaaggtcaccaccagcaccacgatgatgctgagcagccggcgccgcttccgcaggccctcgatgcgttccttgcggaagtggccagcgatggtttgggcgatgaagaagtaacaggtcagcatgatggtgaagggcaccacaaagcccacggtggtggacgagaccccaaggcccacctcccaggcccactctgagctcacagtggccaccatggagtagtccatgtagcactgcaccttagtggtgttctccaagtccccggtggtgcgtaacaccatgacaggcatggccaggagggcggccagcacccaaagaactgccgtggccacggccccgctgacccgcagcctcagccgagcattggccactggcctcacgatggccaggtagcggtcgaagctgaggccggtgaggcagaagacgctggcgtacatgttgacgaagatgaggtagctgctgagcttgcagaagaaggtcccaaagggccagtcatagtcccggtacgtgtaggtagcccacaggggcagcgtcaccacgaaggtcaggtcagccaccgccaggctagcaatgaagatatcagctgagcgcctcttctcccggctgctccgaaacacggtccagagcaccagaccgtttcccgtggtgcccaggaggaagaccaacatgtagatggcagggatgagggcccccgaggatttccagtctgtgtactcacactcagactggttgtctgccccatagtagttgtcaaaatcaccaccttcctccatgctggggagtggagagaagacgggcagagggtcccagggacaccagctccgtggctctgtcacccactctgcaagcagcctgaatttctggcttgagcctcagagagtaagaagggctgaagatgcccagagtccttcccagcactcaggaggagctgcctctgggttctccagaccctggaggaagcctgtctccaa

SEQ ID NO: 186684 - DNA, 2761 bp, Homo Sapiens
ttggggcagtttcctcctcacgtcaacgagtggcaggcaacacactaccttttcagcagaatcaagtcgaagccttttgatctgtctactttgggttctcaaaaatgcagatgaaacagttctacagaagtggtttacagatctctcagtcttgcagctaaaccggctattagatctgctttatctctgtgtgtcttgctttgagtataaagggaaaaaagtgtttgaacgaatgaatagcttgacctttaagaaatcaaaagacatgagagcaaagcttgaagaagctattcttgggagcataggtgccaggcaagaaatggtacggcgaagccgaggacagctcgagagaagcccatctggaagtgcctttggaagtcaagaaaatttgaggtggaggaaagatatgactcactggcgtcaaaacacagagaagcttgacaaatcaagagcagagattgaacacgaagcactgattgatggaaacctggctacagaagcaaacctaatcattttagatacattagagattgttgttcagaccgtttctgtaacggaatccaaagagagcattcttggtggagtgctaaaagtgctactacacagcatggcctgtaaccaaagtgcagtttatctacaacactgttttgctacacagagagccttggtttcaaagtttcctgaactcttatttgaagaagagacagagcagtgtgctgatttatgcctcaggcttctccgacactgtagcagtagcatcggtacaatacggtcacacgccagtgcctccctttacctactaatgaggcaaaactttgagattgggaataactttgccagggttaaaatgcaggtaacaatgtcactatcctccttggtgggcacatctcagaattttaatgaagaattcttaagacgttctctaaagactatattgacatatgctgaagaagatctggaattgagggaaacaacatttcctgatcaggtccaggatctggttttcaatctccatatgattctttctgatactgtgaaaatgaaggaacaccaggaggatcctgaaatgttgattgatctaatgtacagaattgccaagggttaccagacctctccagatctgcgactgacctggttgcagaacatggcaggcaagcactcagaacgaagcaatcatgctgaagctgcacagtgtctagtccactcagcagcacttgttgctgaatatttgagcatgctggaggaccggaaatatcttcctgtgggatgtgtaacatttcagatatttcatctatgttttaaagaatctgcggtctcagatgatgtggtatctccagatgaagaaggtatctgctctggaaaatactttactgagtcaggacttgtgggattactggaacaagcagctgcttccttctctatggctggcatgtatgaagcagttaatgaagtttacaaagtacttattcctattcatgaagctaatcgggatgcaaagaaactatccacaattcatggtaaacttcaagaagcattcagcaaaattgttcatcagagtactggctgggagcggatgtttggcacctattttcgtgttggtttttatggaaccaagttcggggatttggatgaacaagaatttgtttacaaggagcctgcaataaccaaacttgcagagatatctcacagattggagggattttacggagaaagatttggagaggatgtggttgaagtaatcaaagactctaatcctgtagacaagtgtaaattagatcctaacaaggcatatattcagattacctatgtggagccatactttgacacatatgagatgaaggacagaatcacctatttcgacaaaaattacaatcttcgtcgattcatgtactgtacaccctttactttagatggccgtgcccatggggaacttcatgaacaattcaaaaggaagaccattctgactacgtctcatgcctttccttatattaaaacaagggtcaatgtcactcataaagaagagatcatcttaacaccaattgaagttgctattgaggacatgcagaaaaagacacaggagttggcatttgcaacacatcaggatcccgcagaccccaaaatgcttcagatggtactccagggatctgtaggcaccacagtgaatcaggggcctttggaagttgcccaggtttttctgtctgaaatacctagtgacccaaagctcttcagacatcataataaactgcgactctgctttaaagattttactaaaaggtgtgaagatgccttaagaaaaaataagagcttaattgggccggatcaaaaggagtatcaaagggaactggagagaaactatcatcgccttaaagaggccctacagccactgatcaacagaaagatccctcagttatacaaggcagtattgcctgtcacctgccacagagattccttcagtcgaatgagccttcgcaaaatggatctctaaactgaatgcacttgttttattcatctgcaaagagccatgtattcaacatcgagtgtgaaaagatctattgggaaaacaacatggaatggaattctggaaattattattcattgaagaatgcagtggccaaagaaaatatcaaatgtagattgttaacgcttgagaatcatggctatggtttctaatgttctggtacagctgttatcttttaagacattttaatgactcaagtacactatacatttaccattatttataccatagctaagttaaaaa

SEQ ID NO: 186685 - DNA, 2134 bp, Homo Sapiens
  misc_feature (651)..(755): n is a, c, g, or t
tgaaccatcgcacccggcctggccaccctattttaaactgcaaacttctccccttcagtgcttagtttttctccacagcattatcaccatttcatatagtatatgtttttcttcatactgactccccttggagaaggaaaactccacgagagcaaggatttttgtcagtttttcattgttatttcctcagtgcttagacatgcatcaggctcaaagtagatgctcaatgtttgttgaatgaacagcaagagcaatggaggagtcctgaaatacacagcaagaagcaaggataattctggctttacttctgtggccagggtccttcatcccaaccttttagaagtagaaagacaagatcgagctcctcagaacccaggtcgatggctgcagagccttcgaccttccgagagcgaatggcgatcactctttccggttctctgcgaattccagctggaacaccgtccctttccgcgccccaactcagcggaggccatgccctgcacctgagcgccccgctccggcagctgcactctgcagcatccggaacgtttcggcgtggccgcagggcgcggcggaatgacttccggggcgcccctaaagcggcggagaggagtgtcgggctgagtttccggctgagagtccttctagcgnnnnnnnnnnnnnnnnnnnnnnnnnnnnnnnnnnnnnnnnnnnnnnnnnnnnnnnnnnnnnnnnnnnnnnnnnnnnnnnnnnnnnnnnnnnnnnnnnnnnnnnnnttattgaataataaaatacagttttgaaaaaaatggatgaagaacctgaaagaactaagcgatgggaaggaggctatgaaagaacatgggagattcttaaagaagatgaatctggatcacttaaagctacaatagaagacattctattcaaggcaaagagaaaaagagtatttgagcaccatggacaagttcgacttggaatgatgcgccacctttatgtggtagtagatggatcaagaacaatggaagaccaagatttaaagcctaatagactgacgtgtactttaaagttgttggaatactttgtagaggaatattttgatcaaaatcctattagtcagattggaataattgtaactaagagtaaaagagctgaaaaattgactgaactttcaggaaacccaagaaaacatataacgtctttgaagaaagctgtggatatgacctgccatggagagccatctctttataattccctaagcatggctatgcagactctaaaacacatgcctggacatacaagtcgagaagtactaatcatctttagcagccttacaacttgcgatccatctaatatttatgatctaatcaagaccctaaaggcagctaaaattagagtatctgttattggattgtctgcagaagttcgcgtttgcactgtacttgctcgtgaaactggtggcacgtaccatgttattttagatgaaagccattacaaagagttgctcacacatcatcttagtcctcctcctgctagctcaagttctgaatgctcacttattcgtatgggatttcctcagcacaccattgcttctttatctgaccaggatgcaaaaccctctttcagcatggcgcatttggatggcaatactgagccagggcttacattaggaggctatttctgcccacagtgtcgggcaaagtactgtgagctacctgttgaatgtaaaatctgtggtcttactttggtgtctgctccccacttggcacggtcttaccatcatttgtttcctttggatgcttttcaagaaattcccctagaagaatataatggagaaagattttgttatggatgtcagggggaattgaaagaccaacatgtttatgtttgtgctgtgtgccaaaatgttttctgtgtggactgtgatgtttttgttcatgattctctacactgttgccctggctgtattcataagattccagctccttcaagtgtttgattccagcatgtagtatacattgtatgtgttaaaaagaaatttgcaactgtgaataaaacgacttctttagagaaagcttcatttaaacatgaaaggataatctgacttagaactttttgctaagaaaaggtaatattttattaaattttaaatttgtgt

SEQ ID NO: 186686 - DNA, 2948 bp, Homo Sapiens
ttggagcataagtgcctcttactttgcctggatccctgattttttatttgaaagttgctttagaggaagctaagtggcatgttattgcctataatgttgaacatatgatattttgatagtgttacccctagagtaaatttagagggattctcagaaataaaatgtcctgagtttcatttcccgttttgcctcctggatgaaattcttcttatttacaatagtttgtatgtcatctggtgcctagaggaaggcaggccaacaaattcaactctgattatttcaagattcttaatgtaatgtcttaaaacgtaatcttcccttttgttttcaggcagtatccagtctgatagcagtgggtacatctcatggattggctttaatatttgatcagaatcaagctttgcgactctgtctgggtagcactagtgttggaggtcagtatggcgctatctctgccctcagtatcaacaatgattgctcaagacttctttgtggctttgctaaaggacagatcaccatgtgggatttggccagtggaaaacttctaagatcaataacagatgctcatcctccaggaacagcaatattgcatatcaagtttacagatgatccaactcttgcaatttgcaacgacagcggaggctctgtttttgaattgacatttaagagagtgatgggagtgagaacctgtgaatctagatgtctgttcagtggttccaagggtgaagtctgctgtattgagcctctgcattctaagcctgagttgaaagatcatcccatcacacagttttcattattggccatggcatccttgacaaaaatactggtcattggattgaaaccatccttgaaagtatggatgacttttccctatggccggatggatccttccagtgtgccactgctggcctggcactttgtagcagtacaaaattacgtgaatcccatgcttgccttctgcagaggagatgttgttcattttctattggtaaagagagatgaatctggagcaatacatgttactaagcaaaagcatcttcacctatactatgacctcatcaactttacctggataaattcacgcacagttgtgctcttagacagcgtagagaagttgcatgtgattgatcggcaaacacaagaggaattggagacagtggagatctcagaagttcagctggtctacaatagcagccatttcaaatcactagccactggaggaaatgttagccaggcactggctttggttggagagaaggcttgttatcaatccatcagtagctatggtggtcagatcttttatttggggacaaaatctgtttatgtgatgatgctgaggagctggagagagagagtggatcatctcctgaaacaagattgtcttacagaagcgttggctcttgcgtggtctttccatgaaggaaaagcaaaagcagtagtgggattatcaggggatgccagtaagcgaaaggctattgttgcagaccggatggtagaaatcctattccattatgcagatcgagctctgaaaaagtgcccagaccaaggaaaaatccaagtgatggagcagcattttcaggatatggtgcctgtcatagttgattactgccttctgctgcagcgaaaggatcttttatttagtcagatgtatgataaattaagtgagaattcagtggccaaaggagtatttttggagtgccttgagccatatattttaagtgataaattggtgggaatcacaccccaagtaatgaaagacttgattgttcatttccaagataaaaaattaatggaaaatgtggaagcgctcattgtacatatggatatcaccagcctagatattcagcaggtagttctcatgtgttgggaaaatcgtttatatgatgctatgatctatgtctacaacagaggcatgaatgaatttattagtccaatggagaaacttttcagagtcattgctcctcctctgaatgcaggaaaaacactaacagatgaacaagttgttatgggcaataagctccttgtatatattagctgttgtctagcaggtcgtgcctatccccttggtgacatccctgaagatctggttcccttggttaaaaaccaggtttttgaatttctaattcgcctgcattcaacagaggcttctcctgaggaagaaatctatccttacattcggactttgctacattttgacacaagagaatttctcaatgtattggcactgacttttgaagattttaaaaatgacaagcaagctgtggaatatcaacagcgaattgtggatattttgttgaaagttatggtggagaattcagactttaccccctcacaagtaggatgtctctttaccttccttgctcggcagcttgcaaagcctgacaacaccttgtttgtaaacagaacactttttgatcaggtccttgaattcctttgtagtcctgacgatgactcccgacactctgaaagacagcaggtccttttagaattgctgcaggctggaggcatagttcaatttgaagagagtcgactcatccggatggcagaaaaagctgagttctatcaaatttgtgaatttatgtatgaaagagaacaccaatatgacaaaattattgattgctacttacgtgaccctctgcgagaggaagaagtctttaattacattcacaatatcttatccattcccggacacagtgcagaggagaagcagtctgtatggcagaaagcaatggatcatattgaggaactcgtgtccctgaagccttgtaaagctgcggagctggttgccacccacttttctggacatattgaaacggtcattaaaaaacttcagaaccaggttttgcttttcaaatttttgaggagtcttcttgacccaaagggaaggtattcatgtaaatcaagaattactgcaatatctccttgtatcacagagcagttcattgagc

SEQ ID NO: 186687 - DNA, 927 bp, Homo Sapiens
actttgtacaaaaaagttggggtcttcctggtgctgcaggaaaagaaggtgcaaagggtgatccaggtcctcaaggtatctcagggaaagatggaccagcaggattacgtggtttcccaggggaaagaggtcttcctggagctcagggtgcacctggactgaaaggaggggaaggtccccagggcccaccaggtccagttggctcaccaggagaacgtgggtcagcaggtacagctggcccaattggtttaccagggcgcccgggacctcagggtcctcctggtccagctggagagaaaggtgctcctggagaaaaaggtccccaagggcctgcagggagagatggagttcaaggtcctgttggtctcccagggccagctggtcctgccggctcccctggggaagacggagacaagggtgaaattggtgagccgggacaaaaaggcagcaagggtgacaagggagaaaatggccctcccggtcccccaggtcttcaaggaccagttggtgcccctggaattgctggaggtgatggtgaaccaggtcctagaggacagcaggggatgtttgggcaaaaaggtgatgagggtgccagaggcttccctggacctcctggtccaataggtcttcagggtctgccaggcccacctggtgaaaaaggtgaaaatggggatgttggtcccatggggccacctggtcctccaggcccaagaggccctcaaggtcccaatggagctgatggaccacaaggacccccagggtctgttggttcagttggtggtgttggagaaaagggtgaacctggtagaagcaggaacccagggcctcctggggaagcatgtgtagccggtcccaaaggagaaagaggatagaaggggaagctggtccacctggagctgctggacctccggtgcccaaggggccacc

SEQ ID NO: 186688 - DNA, 2250 bp, Homo Sapiens
ttggatctccaacatctaaagaacatgtcccggtaaccccacagtgtaccctttcagatcagaatgcccaaggtcaaggcccagaaaaagtgaagaaaacaactcaggtcaaagactacagctttgtcactgaagacctccacctggtgtgctaccggaaattgatactgcgcttttggtgagacttatgaaaagtaatttacagttttatagaatatcaacttagcaactaactaattcagctgtggtggtttcatcatgaattgttctcctgggtttcatacctagctacttgttttagaccccacttcagtctccagcacaagtacttccaaacagcagtaaagactcttctcagccatcatgtgtggagcaaagcaccagctcagatgaaaatgaaatgtcagacaaaagcaaaaaacagtgcaagtccccatccagaagagacagttacagtgacagcagtgggagtggagaagatgacttagtgacagctccagcaaacatatcaaattcgacctggagttcagctttgcatcagactctaagcaacatggtatcacaggcacagagtcatcatgaagcacccaagagtcaagaagataccatttgtaccatgttttactatcctcagaaaattcccaataaaccagagtttgaggacagtaatccttcccctctaccaccggatatggctcctgggcagagttatcaaccccaatcagaatctgcttcctctagttcgatggataagtatcatatacatcacatttctgaaccaactagacaagaaaactggacacctttgaaaaatgacttggaaaatcaccttgaagactttgaactggaagtagaactcctcattaccctaattaaatcagaaaaaggaagcctgggttttacagtaaccaaaggcaatcagagaattggttgttatgttcatgatgtcatacaggatccagccaaaagtgatggaaggctaaaacctggggaccggctcataaaggttaatgatacagatgttactaatatgactcatacagatgcagttaatctgctccgggctgcatccaaaacagtcagattagttattggacgagttctagaattacccagaataccaatgttgcctcatttgctaccggacataacactaacgtgcaacaaagaggagttgggtttttccttatgtggaggtcatgacagcctttatcaagtggtatatattagtgatattaatccaaggtccgtcgcagccattgagggtaatctccagctattagatgtcatccattatgtgaacggagtcagcacacaaggaatgaccttggaggaagttaacagagcattagacatgtcacttccttcattggtattgaaagcaacaagaaatgatcttccagtggtccccagctcaaagaggtctgctgtttcagctccaaagtcaaccaaaggcaatggttcctacagtgtggggtcttgcagccagcctgccctcactcctaatgattcattctccacggttgctggggaagaaataaatgaaatatcgtaccccaaaggaaaatgttctacttatcagataaagggatcaccaaacttgactctgcccaaagaatcttatatacaagaagatgacatttatgatgattcccaagaagctgaagttatccagtctctgctggatgttgtggatgaggaagcccagaatcttttaaacgaaaataatgcagcaggatactcctgtggtccaggtacattaaagatgaatgggaagttatcagaagagagaacagaagatacagactgcgatggttcacctttacctgagtattttactgaggccaccaaaatgaatggctgtgaagaatattgtgaagaaaaagtaaaaagtgaaagcttaattcagaagccacaagaaaagaagactgatgatgatgaaataacatggggaaatgatgagttgccaatagagagaacaaaccatgaagattctgataaagatcattcctttctgacaaacgatgagctcgctgtactccctgtcgtcaaagtgcttccctctggtaaatacacgggtgccaacttaaaatcagtcattcgagtcctgcggggtttgctagatcaaggaattccttctaaggagctggagaatcttcaagaattaaaacctttggatcagtgtctattgggcaaactaaaggaaaacagaaagaagaacagatataaaaatatacttccctatgatgc

SEQ ID NO: 186689 - DNA, 989 bp, Homo Sapiens
ttgggatgtttcaggacccagtggcctttgaggatgtggctgtgaacttcacccaggaagagtggacattgctggatatttcccagaagaatctcttcagggaagtgatgctggaaactttcaggaacctgacctctataggaaaaaaatggagtgaccagaacattgaatatgagtaccaaaaccccagaagaagcttcaggagtctcatagaagagaaagtcaatgaaattaaagaagacagtcattgtggagaaacttttacccaggttccagatgacagactgaacttccaggagaagaaagcttctcctgaagtaaaatcatgtgacagctttgtgtgtgcagaagttggcataggtaactcatcttttaatatgagcatcagaggtgacactggacacaaggcatatgagtatcaggaatatggaccaaagccatataagtgtcaacaacctaaaaataagaaagccttcaggtatcgcccatccattagaacacaagaaagggatcacactggagagaaaccctatgcttgtaaagtctgtggaaaaacctttattttccattcaagcattcgaagacacatggtaatgcacagtggggatggaacttataaatgtaaattttgtgggaaagccttccattctttcagtttatatcttatccatgaaagaactcacactggagagaaaccatatgaatgtaaacaatgtggtaaatcctttacttattctgctacccttcaaatacatgaaagaactcacactggggagaagccctatgaatgtagcaaatgtgataaagcatttcatagttctagttcctatcatagacatgaaagaagtcacatgggagagaagccttatcaatgcaaagaatgtggaaaagcatttgcatataccagttctcttcgtagacatgaaggaccccactctgggaaaaaccgtatgaatgtaagcatatggggaagcttatcctatcttata

SEQ ID NO: 186690 - DNA, 1313 bp, Homo Sapiens
ttggattcctacctaaaggaattcatccacatactatatttcaggcatctattggtgaatcccagagaccgccgagttgtgattatcgaatcggtattatgtccttctcacttcagagagacactcactcgtgttcttttcaaatattttgaggttccatctgtcttgcttgctccaagtcatctaatggctcttctgacgcttggaattaattctgccatggtcctagattgtggatatagggaaagcctggtgttacccatatatgaaggaatcccagttctaaattgttggggagcactacccctaggaggaaaagctcttcacaaagagttggaaactcaactattggaacaatgtactgttgacacaagtgttgctaaagaacagagccttccctcagtgatgggttcagttccggaaggtgtcttagaggacattaaagcgcgtacttgctttgtaagtgatctgaagcgaggactaaaaatccaagcagcaaaatttaatattgatgggaataatgagcgtccctccccacccccaaatgttgactatccattagatggagagaagattttacatatccttggatcaatcagagattcagttgtggaaattctttttgaacaagataatgaagagcaatcagttgccactttaatattggattcccttatacagtgtccgatagacaccaggaagcaactagcagagaatttggtagtcataggtggcacttctatgttgccaggatttctccacagattgcttgcagaaataaggtatttggtagaaaaaccaaaatataaaaaagcacttggcactaagacatttcgaattcatactccacctgcaaaagctaattgtgtggcctggttgggaggggctatttttggagcattacaagatatacttgggagccgttctgtttcaaaggaatattataatcagacgggccgtatacctgattggtgttctctcaataacccacctttggaaatgatgtttgatgtcgggaaaactcaaccccctctgatgaagagagcattttccactgagaaatagaagtttgattaaaaatcaacccttgcttcatatcaaatattttacccaattataagcaaattgtacaaaagtatgtaggatgttttgttataaaagaactatagtggaagtgaaagcattctgtgtttactctttgcattaatatatattcttttgactttgtttctcttgtgtagtggtaaaatagtacctggtgcttattgaaattgctggatttatatcataagtatattaagcattttgatttt

SEQ ID NO: 186691 - DNA, 1252 bp, Homo Sapiens
ttggctctcggggaattggccttccagggccaaatccatctcccatgtcaagggctcctggccccataggccctaattcagctcatttctcaaggccagttggccccatgggggtaaatgccaatccctttcccaggggagcaggttcatctgccttttctcagtcttctggcacattggcatcaaacccagctaccttccaaaggtccgctggcctccagggctcaaatccaaccattttcccaagagcctctgggccacttggccccaacccagctaacttcccaagggccactggcctgcagggtccaagtccaactaccttcccaaggtctactggcccattaggccctggtcaagttactttccccaggccagctgccgggcatctgggcccttctccagctggccctgtgggtatcaacccagctcctttcacaaggccaactgggaccctgggtctcaacccagcttcctttccaaggatgaatggccctgcaggcaagagtttcgtcccatttcctagagtggggagcctccctggcacaaacccagctgctttccccagaccagggggtccaatggctgcaatgtacccaaatggaatgttgcccccttaaacaccattttccctccaggaccaccttggtttctaggcactgtggttcttggcaggggctgtcttaggtaaaagggtagttgtggagctacagtctgaagaacatagcttgggctcaagttcaaatgagccatctttttcctttgcgtttttcttgactgaaggtgagatgttatttgtggcatgtgaactgtggcaggtgggaataatcctgcccttgagagaaaggatctccagccctcccagaagcctgctgtgctttcgtcccacagctttctgcccattgtttcttactagtttcttgaattgttcttgtggacttttcctcagggatacattggcctgcatgtcccagttcacatgtagtcccctgctcaccattggagaatcagctcactgctctctagaaacgtggcgttgggtgaacgaaccatgcttccgtagctctgacttgggcagcttggacctggtcctcctctactgccatacctttccctggggggcttgaacacagaacagggagatggaccaccacttcaaagaaaagatcccccgtatgcatttttctgtttggatgaatggggcctgcagctcccttcccctgggaacttaaaggtgggccagatttaaagg

SEQ ID NO: 186692 - DNA, 1843 bp, Homo Sapiens
ttgggtcgttcgtggcaggggttattcggcggctggacgagacagtggtgaaccgcatcgcggcgggggaagttatccagcggccagctaatgctatcaaagagatgattgagaactggtacggagggagtcgagccgggctcacttaagggctacgacttaacgggccgcgtcactcaatggcgcggacacgcctctttgcccgggcagaggcatgtacagcgcatgcccacaacggcggaggccgccgggttccctgacgtgccagtcaggccttctccttttccgcagaccgtgtgtttctttaccgctctcccccgagaccttttaagggttgtttggagttttagatgcaaaatccacaagtattcaagtgattgttaaagagggaggcctgaagttgattcagatccaagacaatggcaccgggatcaggaaagaagatctggatattgtatgtgaaaggttcactactagtaaactgcagtcctttgaggatttagccagtatttctacctatggctttcgaggtgaggctttggccagcataagccatgtggctcatgttactattacaacgaaaacagctgatggaaagtgtgcatacagagcaagttactcagatggaaaactgaaagcccctcctaaaccatgtgctggcaatcaagggacccagatcacggtggaggaccttttttacaacatagccacgaggagaaaagctttaaaaaatccaagtgaagaatatgggaaaattttggaagttgttggcaggtattcagtacacaatgcaggcattagtttctcagttaaaaaacaaggagagacagtagctgatgttaggacactacccaatgcctcaaccgtggacaatattcgctccatctttggaaatgctgttagtcgagaactgatagaaattggatgtgaggataaaaccctagccttcaaaatgaatggttacatatccaatgcaaactactcagtgaagaagtgcatcttcttactcttcatcaaccatcgtctggtagaatcaacttccttgagaaaagccatagaaacagtgtatgcagcctatttgcccaaaaacacacacccattcctgtacctcagtttagaaatcagtccccagaatgtggatgttaatgtgcaccccacaaagcatgaagttcacttcctgcacgaggagagcatcctggagcgggtgcagcagcacatcgagagcaagctcctgggctccaattcctccaggatgtacttcacccagactttgctaccaggacttgctggcccctctggggagatggttaaatccacaacaagtctgacctcgtcttctacttctggaagtagtgataaggtctatgcccaccagatggttcgtacagattcccgggaacagaagcttgatgcatttctgcagcctctgagcaaacccctgtccagtcagccccaggccattgtcacagaggataagacagatatttctagtggcagggctaggcagcaagatgaggagatgcttgaactcccagcccctgctgaagtggctgccaaaaatcagagcttggagggggatacaacaaaggggacttcagaaatgtcagagaagagaggacctacttccagcaaccccagaaagagacatcgggaagattctgatgtggaaatggtggaagatgattcccgaaaggaaatgactgcagcttgtaccccccgggagaagatcattaacctcactagtgttttgagtctccaggaagaattaatgagcagggacatgaaggttctccgggagatgtgcataaccactccttcgtgggctgtgtgaatcctcagtggg

SEQ ID NO: 186693 - DNA, 939 bp, Homo Sapiens
aagcaggtcctggaactgcatccattgaacatttatttgtcaaaggcctggtctgtgccaggcagcatgtggaggcactgagtggggggtggagggggttgtacggtgggaatcaagggggtcaccactgtgcccatggggaggccacgccactctgcctgctgggtggatatttcagcctgtgcagccagatgtgttcccaggaggctctgctttccagccagatgtaaggcctggccacagtgtgggactgggtctgcacagtgtgggactgcaggacagggtcctgcaggtggccctgccaggagtcctgccatatccctaccagaataccacccagccaggccagggctgagctggacgcccagacccccagggccaggatacaccgggaccctccttcctctcaacctcggatcctctttgcccagaactgtgttcccaggtggctgacgagcctgtcacgtgccagccctgcgctgcctgcgctcctctgaccggctgtggtgctggcacaggccacactactagagacaaggcagtccccccacccccaggctctcctggaccctgacactggaggttggtgggatatgctttctccaccttgtaccacactgaagttttgtggggcacagtgtgtgccgaggtggggcccccgggagccaaggacccagaggtgggtgaggaggagccgcctgcctgcagccccactgtggcctgagtggtgggggagtaaggactgccctgtgtgcaggaggggagaccctcgtgggcacggtcccaaggctgagggggtctgaggccccagcccagggggcaggcctcagacgcaaccccagttgggcttccatgtggagagaagaagcaggcggctcccagggagtcactgtaggacaccccaggctccagccctgagccaacttttttgtacaaagt

SEQ ID NO: 186694 - DNA, 1640 bp, Homo Sapiens
ttgtacaaaaaagttggcgcgaatgacaccttgagctgctcaaggcgggaactctgagctaagcagtggaggtttctctggatctggagagaagagtgaccttggagccaataatgagccatcctgactacagaatgaacctccggtccctggggacccccagaggtgtgtctgctgtggctggtccacatgacattggtgcttcgccaggtgacaaaaagtcaaagaacaggtccacacgagggaagaaaaagagcatatttgaaacttacatgtccaaggaggatgtttcagaaggcttgaagagaggaacactcatccagggtgtattgagaattaatccaaagaagtttcatgaagccttcattccttccccggatggtgatcgagacatttttattgatggggttgttgctcgtaatagagccttaaatggggatctggtggtcgtgaaactgcttcccgaggagcattggaaggtagttaaaccagagagcaatgacaaagaaacagaagctgcgtatgaatcagatatccccgaggagctctgtggacaccatctcccgcaacagtccctgaaaagctataatgacagtcctgatgtcattgtagaggctcagtttgatggcagcgactcagaagatggacatggcatcacacaaaatgtgctggttgatgggttaagaaactctcagtttgtgtttctgagaaaggaagagaggatggtgatgcaccggttacaaaagatgagaccacctgcatttcacaagacacaagagctttatcggagaaatccctgcaaagatcagcaaaggtggtttacatcttggagaaaaaacattctcgagcagcaaccggcttcctcaaactcttggctgataagaacagcgaactgtttaggaaatacgccctgttttctccctcagaccaccgagtgcctagaatttatgtgcctctcaaggactgtccccaggactttgtggcacggcctaaagattatgccaacacactgttcatctgccgcattgtggactggaaggaggactgcaattttgccctggggcagctggctaagagtcttgggcaggctggtgaaattgagcctgaaacagaaggaatactaacagagtatggcgtggatttctctgatttctcttcagaagttctagaatgtcttcctcaaggcctgccatggacaattccaccagaggagttcagcaagagaagggatttaagaaaagactgtatcttcaccattgacccatcaaccgcccgagacctcgatgatgccctctcctgcaagccactcgctgacggcaacttcaaagtgggagttcacattgctgacgtgagttactttgttccggagggatctgatctggataaagtggctgccgagagggctacaagcgtctacttggttcaaaaggtggtccccatgcttcccaggctgctgtgtgaggagctgtgcagcctcaaccccatgtccgacaagctgaccttctctgtgatctggacactgactcagagggcaagatccttgatgaatggtttggccagaccatcatccgctcctgcaccaaacttagctacgagcatgcacagaagcatgattgaaagcccaactgagaaaatccctg

SEQ ID NO: 186695 - DNA, 1628 bp, Homo Sapiens
ggggggaggcgttccggtccccaagagacccgcggagggagacggaggctgtgagggactctgggaagccatggacgtcgacaggctccaggaggcgctggaagattttgagaagaggcaaaaaagaaagtctgtcctgtcctggatcagttcctttgtcatgtagccaagactggagaaacagattcagtggtcccaatttaaaggctattttattttcaaactggagaaagtgatagatgatttcagaacttcagctcctgcgccaagaggtcctcccaaccctaaagtcgaatatattccctttgatgaaacaaagggaagaatactgaaaactgtcactggatttaaccgtatcccttttactattcagcgactatgtgaattgttaacagatccaaggagaaactatacaggaacagacaaatttctcagaggagtagaaaagaacgtgatggttgttagctgtgtttatccttcttcagagaaaaacaattccaatagtttaaatcgaatgaatggtgtgatgtttcctggaaatgcaccaagctatactgagaggtctaatataaatgggcctgggacacccaggccacgtaatcgaccaaaggtttctctgtcagcccccatgacaacaaatgggtggcctgagagcacagacagcaaagaggcaaatttgcagcaaaatgaagagaaaactcacagtgactcttcgacatctgaatcagaagtttcctcagtgagccctttgagaaataaacatccagatgaagatgctgtggaagctgaggggcatgaggtaaaaagactcacgtttgacaaaaaggcgaagtcggagaaacagccagtcaagagacttgcagcgaaatttcttcagttatggtagaagaaacagaagcatcaccttcatctcacgataaagacaaagaaagccgtggtacccggcagcgcgttcagaagaagatgaagatgaagaggaagaagaagggattgagagaccatctgtaaaagggaggagtaaggagatcctcaaattcttgcattcattgttttcgtgaaagaattgtacatcatggaactccttgtaatgtcgacgctgggcttttctcccacctgtatgcagttgctgctgaatttcaggggatgtgatttgaactacagaacatcagaattcacaaaacttaactgtggaggtattttgaatataaaatttaagtacaacaacatttgcttatttttagagtcttttatgacatcaagagaaatggtcccagaaagaaaaaaccaagaaaaagaatctgatgatgcctcaactgtgaatgaagagacttctgaggaaaataatgaaatggaggaatctgatgtgtctcaagctgagaaagatttactacattctgaaggtagtgaaaacgaaggccctgaaagtagtggttcttctgactgccgtgaaacagaagaattagtaggatccaattccagtaaaactggagagattctttcagaatcatccatggataatgatgacgaagccacagaagtcaccgatgaaccactggaacaagactgttcaccgcaataatttttagcagctctcctgtgcaaagaagtctcatcaatcaatcagccaa

SEQ ID NO: 186696 - DNA, 1121 bp, Homo Sapiens
ttggatccattgtaagatgtgacttgctccgccttgccttctgccacgattgtgtgaggcttccccagccacatgtcactgggatatcattttcaatgcccaatacccagaactgcctcccgattttatctttggagaagatgctgaattcctgccagacccctcagctttgcagaatcttgcctcctggaatccttcaaatcctgaatgtctcttacttgtggtgaaggaacttgtgcaacaatatcaccaattccaatgtagccgcctccgggagagctcccgcctcatgtttgaataccagacattactggaggagccacagtatggagagaacatggaaatttatgctgggaaaaaaaacaactggactggtgaattttcagctcgtttccttttgaagctgcccgtagatttcagcaatatccccacataccttctcaaggatgtaaatgaagaccctggagaagatgtggccctcctctctgttagttttgaggacactgaagccacccaggtgtaccccaagctgtacttgtcacctcgaattgagcatgcacttggaggctcctcagctcttcatatcccagcttttccaggaggaggatgtctcattgattacgttcctcaagtatgccacctgctcaccaacaaggtgcagtacgtgattcaagggtatcacaaaagaagagagtatattgctgcttttctcagtcactttggcacaggtgtcgtggaatatgatgcagaaggctttacaaaactcactctgctgctgatgtggaaagatttttgttttcttgtacacattgacctgcctctgtttttccctcgagaccagccaactctcacatttcagtccgtttatcactttaccaacagtggacagctttactcccaggcccaaaaaaattatccgtacagccccagatgggatggaaatgaaatggccaaaagagcaaggcttatttcaaaacctttgtccctcagttccaggaggcagcatttgccaatggaaagctctaggaaacaccagtcttgagaggtggccagccagactgcctgtccacatgcgtgtcagcacatacagccgcttcctggaagccgcctggaatgtcttc

SEQ ID NO: 186697 - DNA, 1325 bp, Homo Sapiens
ttggctcagaaataccaaagcagcatttttcctggacttgttctgcagagcgctcagatttgaaagccatttctagcctttgaggattaccactgtcctcagccaaactgcagggactcctaagtagatcagagctcctggaactttctcatcttttcagcatctcaaccctgtggaatcttttaactcccaagtgctaccaggatatttgcgatgtactctggaatccctctggaaggagctgtcctcacagaatgaaggattagaggagttaataaataagcaaacccaacctttctcctggggaattgtggtcctctctagaagctaggctgtggacctgaatttgcaggagaagccaggagtcatctgtgatgctctgctgatagcatagaacagccctggcagggccaggactactgcacttgcactgcccttactttgaagcagaagctggtgaacatggggggctacactggggaggtgtgtgtcagggccaaggtcctctgcctgagtcctgagagcagcgcagaggccttggaggctgcagtgtctccgatggattaccctgcgtcctatagttttgcaggcacccagcacattggaagccctgctgcagtccctcgtgattgtcttgctcggcttcaggtctctcttgagtgacctgtgcagctatgaggttttaaatctgctcacagcccagcagtatgagatattctccagaagcttccacaagaacagagaattgtttgtccatggcttacctggcttaggaaagaccatcatggccatgaagatcatggagaagatcaggaatgtgtttcactgtgaggcacacagaattctctacatttgtgaaagtcagtttctgaggaatttcatcagaaccctggatcttgctttccaagtgcctgtcccgccggcgtcgggtctgagcggctccctgtgctcggatggtttgtgggcaaccgctcctttcccccaccgccgcagtccacactcagcgttctggggaagaggctgggtcggaacggagccatcgccgctggagtattcggggcccttttcatcgggtactgcatctacttcgaccgcaaaagactgaagtgaccccaacttaaagaataggcgtccagaataatgatcgaaacagaagctggccgaggagtgagttgagctttccaagttagctgaccttaggatgctgaagctgtccagaaattcttcctggaagagatatagctttgggtgaagagattctacctaaaggtgtataccacctgacaaatccaagtgctgtgtgtgaacagccacagtggttactg

SEQ ID NO: 186698 - DNA, 1116 bp, Homo Sapiens
ttggctaagcaacacggaaggtgtttttatatttttgttaaatcttggagtggtgatcctttccttaaagatggttctttcaattcccgcatttgcagccttagttcttcattatactgtagatctggcacctctgtgcttcacatgaattcaagacaggcattcgatttcctgaagaccaaggaaagacagtccaaatataatctgattaatgaagggtctccacctagtaaaattatgaaagctgtataccagaacatatctgagtcaaatcctgcatatgaagttttccaaactgacactattgaatatggtgaaatcctatcttttcctgagtctccatccatagagtttaaacagttctctacaaaacatatccaacaatatgtagaaaatataattccagagtacatctctgcatttgcaaacactgagggaggctatctttttattggagtggatgataagagtaggaaagtcctgggatgtgccaaagaacaggttgaccctgactctttgaaaaatgtaattgcaagagcaatttctaagttgcccattgttcatttttgctcttcaaaacctcgggtagagtacagcaccaaaatcgtagaagtgttttgtgggaaagagttgtatggctatctctgtgtgattaaagtgaaggcattctgttgtgtggtgttctcggaagctcccaagtcatggatggtgagggagaagtacatccgccccttgacaactgaggaatgggtagagaaaatgatggacgcagatccagagtttcctccagactttgctgaggcctttgagtctcagttgagtctatctgacagtccttcactttgcagaccagtgtattctaagaaaggtctggaacacaaagctgatctacaacaacatttatttccagttccaccaggacatttggaatgtactccagagtccctctggaaggagctgtctttacagcatgaaggactaaaggagttaatacacaagcaaatgcgacctttctcccagggaattgtgatcctctctagaagctgggctgtggacctgaacttgcaggagaagccaggagtcatctgtgatgctctgctgatagcacagaacagc

SEQ ID NO: 186699 - DNA, 1695 bp, Homo Sapiens
ttggctcaaacagtcccaccaggatatttgcgatatactccagagtcactctggagggacctgatctcagagcacagaggactagaggagttaataaataagcaaatgcaacctttctttcggggaattttgatcttctctagaagttgggctgtggacctgaacttgcaggagaagccaggagtcatctgtgatgctctgctgatagcacagaacagcacccccattctctacaccattctcagggagcaggatgcagagggccaggactactgcactcgcaccgcctttactttgaagcagaagctagtgaacatggggggctacaccgggaaggtgtgtgtcagggccaaggtcctctgcctgagtcctgagagcagcgcagaggccttggaggctgcagtgtctccgatggattaccctgcgtcctatagccttgcaggcacccagcacatggaagccctgctgcagtccctcgtgattgtcttactcggcttcaggtctctcttgagtgaccagctcggctgtgaggttttaaatctgctcacagcccagcagtatgagatattctccagaagcctccgcaagaacagagagttgtttgtccacggcttacctggctcagggaagaccatcatggccatgaagatcatggagaagatcaggaatgtgtttcactgtgaggcacacagaattctctacgtttgtgaaaaccagcctctgaggaactttatcagtgatagaaatatctgccgagcagagacccggaaaactttcctaagagaaaactttgaacacattcaacacatcgtcattgacgaagctcagaatttccgtactgaagatggggactggtatgggaaggcaaaaagcatcactcggagagcaaagggtggcccaggaattctctggatctttctggattactttcagaccagccacttggattgcagtggcctccctcctctctcagaccaatatccaagagaagagctcaccagaatagttcgcaatgcagatccaatagccaagtacttacaaaaagaaatgcaagtaattagaagtaatccttcatttaacatccccactgggtgcctcgaggtatttcctgaagccgaatggtcccagggtgttcagggaaccttacgaattaagaaatacttgactgtggagcaaataatgacctgtgtggcagacacgtgcaggcgcttctttgataggggctattctccaaaggatgttgctgtgcttgtcagcaccgcaaaagaagtggagcactataagtatgagctcttgaaagcaatgaggaagaaaagggtggtgcagctcagtgatgcatgtgatatgttgggtgatcacattgtgttggacagtgttcggcgattctcaggcctggaaaggagcatagtgtttgggatccatccaaggacagctgacccagctatcttacccaatgttctgatctgtctggcttccagggcaaaacaacacctgtatatttttccgtggggtggccattagaagaactccaaatcaaaatgctatgtaaatgtctatgggtgacagtctgctgatggtagaaacctttctttttagttcacaagtcagagatttggacggagctgacacaaagagtttggagctcccccatttctggctctcctttcaggggttccttccccaacccttttcagc

SEQ ID NO: 186700 - DNA, 673 bp, Homo Sapiens
atggcccaccaaaccatgaaagtaaatagaaaaaaaatcacagttcaagaataacataaaacttaactaggtgtgttatagagcaatgcatagaactaagctgagaagttaaaacataaactcattgatttttaaagacaatctttcccaagtctggttcaccttagggctgatacacaccttcagaaccagattttggtctctaatatcatcttccactgaaagccagggcaaacaggtttatgttcatttcatcttggcctataatttctccttaaagtgaccattaatattcactatcacaattaaggcttggtctgggccattctgagaacaagctctggagaccacaattttaaaggattaaataatcataacggtattctttgtcctgacaaaattattaatctgacagtgactgaattatcttcggactctcccaagccctaaatgaatacagcaaagataaatgtcaagaattcaggaaacaattgcttctgctacggccagtaagctcctaacagaccatgcttctgcagaaaacgattctggacaaatttttaaaagcaacaaactgcatgaagtcacttaaaaaaagaagcccagccttggaagaaagaaaggccacaggctgagtttcttatttttatggcttttacccaaaatgcaccaa

SEQ ID NO: 186701 - DNA, 1591 bp, Homo Sapiens
tggctacagcttcgccttattaggacagatgccggaagctttatgaaaagttcctggaatttggacctgaaaattgtacctcatggattaaattcgctgaattagagacaatccttggtgatattgacagagcacgggcaatctatgaattagccatcagtcagccacgtttagacatgccagaggtgctttggaaatcatatattgattttgaaattgagcaggaagaaacagaaagaacacgaaacctttaccggcggttgcttcaacggacgcagcatgtcaaggtatggatcagctttgctcagtttgagttgtcttcaggaaaagaaggaagtttgactaaatgcagacaaatttatgaagaagctaacaaaaccatgcgaaactgtgaagaaaaggaagagagacttatgctgctggaatcttggcgaagttttgaagaagaatttggaacagcttcagataaggagagagtagacaaactcatgccagagaaagtcaagaagagaagaaaggtccagactgatgatgggtctgatgcaggctgggaagaatactttgattacatctttccagaagatgctgccaaccaacctaacctcaactcctggccatggccaaactgtggaagaccagcagcaggaaaaggaggatgctgagcatcatccagatgaggacgtcgatgagagtgaatcctgatctttttttcatagacaaatgtttttgttatttttataaattaattgtttggaactcttgtgactcctggaagttcttatatatttcaccagtaagaaattgattggtatctttgatggctactttttaagttattttttaaatgctcttgggttagctaggggtagggattgcaagtaaaggacttttttaactgctggatttgtttttccaactgagtccaaacttttctaatgtctgtccacatcatgcattaggaaatgtaattaaggtaacattctacagttacttttcatgtcatacccataaagatagtttatgcattcatctgaaatgtgtaactttttcatgtcttcagagtcacagacttgagttcatttcccagctctgccactcatgattatataacttaattttcattttcctcattcacaaaatgggccaatagtttgacagctcattttgaagattacattataaaaggaatatacctggtgggtgcatagtaagtgctcagtaaattgtttgttctaagccacttttaaaaatggtttcattccttgtagaattgaatgcgagtggattaataatttaccttactttcttactagtgtccagttatattgttttttagaacaacacttggaaaataatttgcagtgattatatttctgaacaaggttcagaaaacattgtttactaagaatttagtctaataatttcagttaggcgctcatcagttctccagagtggttgagtttgtaataccttgtttaaagaataatggcttgttcacgtgtgtgctatgaaaaatgatgtcccatgttcacataaatttgggaaattctggactaagacttaagtctcgttaatcaaatctctttatagt

SEQ ID NO: 186702 - DNA, 2043 bp, Homo Sapiens
ttggcaatggaaagttaccagacagaagctcctaggcatgtttctgggacaaatgagccaaatccagttgaagaaatatttactgaagaatatctaacgggagaggattatgattcccagaggaaaaattctgaggatacactatatgaaaacaaagaaatagacggcagggattctgatcttctggtagatggagatttaggcgaatatgatttttatgaatataaagaatatgaagataaaccaacaagcccccctaatgaagaatttggtccaggtgtaccagcagaaactgatattacagaaacaagcataaatggccatggtgcatatggagagaaaggacagaaaggagaaccagcagtggttgagcctggtatgcttgtcgaaggaccaccaggaccagcaggacctgcaggtattatgggtcctccaggtctacaaggccccactggaccccctggtgaccctggcgataggggccccccaggacgtcctggcttaccaggggctgatggtctacctggtcctcctggtactatgttgatgttaccgttccgttatggtggtgatggttccaaaggaccaaccatctctgctcaggaagctcaggctcaagctattcttcagcaggctcggattgctctgagaggcccacctggcccaatgggtctaactggaagaccaggtcctgtgggggggcctggttcatctggggccaaaggtgagagtggtgatccaggtcctcagggccctcgaggcgtccagggtccccctggtccaacgggaaaacctggaaaaaggggtcgtccaggtgcagatggaggaagaggaatgccaggagaacctggggcaaagggagatcgagggtttgatggacttccgggtctgccaggtgacaaaggtcacaggggtgaacgaggtcctcaaggtcctccaggtcctcctggtgatgatggaatgaggggagaagatggagaaattggaccaagaggtcttccaggtgaagctggcccacgaggtttgctgggtccaaggggaactccaggagctccagggcagcctggtatggcaggtgtagatggccccccaggaccaaaagggaacatgggtccccaaggggagcctgggcctccaggtcaacaagggaatccaggacctcagggtcttcctggtccacaaggtccaattggtcctcctggtgaaaaaggaccacaaggaaaaccaggacttgctggacttcctggtgctgatgggcctcctggtcatcctgggaaagaatgccagtctggagaaaagggggctctgggtccccctggtccacaaggtcctattggatacccgggcccccggggagtaaagggagcagatggtgtcagaggtctcaagggatctaaaggtgaaaagggtgaagatggttttccaggattcaaaggtgacatgggtctaaaaggtgacagaggagaagttggtcaaattggcccaagaggggaagatggccctgaaggacccaaaggtcgagcaggcccaactggagacccaggtccttcaggtcaagcaggagaaaagggaaaacttggagttccaggattaccaggatatccaggaagacaaggtccaaagggttccactggattccctgggtttccaggtgccaatggagagaaaggtgcacggggagtagctggcaaaccaggccctcggggtcagcgtggtccaacgggtcctcgaggttcaagaggtgcaagaggtcccactgggaaacctgggccaaagggcacttcaggtggcgatggccctcctggccctccaggtgaaagaggtcctcaaggacctcagggtccagttggattccctggaccaaaaggccctcctggaccacctgggaaggatgggctgccaggacaccctgggcaacgtggggagactggatttcaaggcaagaccggccctcctgggccagggggagtggttggaccacagggaccaaccggtgagactggtccaaacggggaacgtggggcatcctggccctcctggccc

SEQ ID NO: 186703 - DNA, 1968 bp, Homo Sapiens
  misc_feature (1784)..(1845): n is a, c, g, or t
ctttgtacaaaaaagttgggacacatttcatcgtatccaaggcagcagagaacaaagaacagccaccatgcagctcttcctcctcttgtgcctggtgcttctcagccctcagggggcctcccttcaccgccaccacccccgggagatgaagaagagagtcgaggacctccatgtaggtgccacggtggcccccagcagcagaagggactttacctttgacctctacagggccttggcttccgctgcccccagccagaacatcttcttctcccctgtgagcatctccatgagcctggccatgctctccctgggggctgggtccagcacaaagatgcagatcctggagggcctgggcctcaacctccagaaaagctcagagaaggagctgcacagaggctttcagcagctccttcaggaactcaaccagcccagagatggcttccagctgagcctcggcaatgcccttttcaccgacctggtggtagacctgcaggacaccttcgtaagtgccatgaagacgctgtacctggcagacactttccccaccaactttagggactctgcaggggccatgaagcagatcaatgattatgtggcaaagcaaacgaagggcaagattgtggacttgcttaagaacctcgatagcaatgcggtcgtgatcatggtgaattacatcttctttaaagctaagtgggagacaagcttcaaccacaaaggcacccaagagcaagacttctacgtgacctcggagactgtggtgcgggtacccatgatgagccgcgaggatcagtatcactacctcctggaccggaacctctcctgcagggtggtgggggtcccctaccaaggcaatgccacggctttgttcattctccccagtgagggaaagatgcagcaggtggagaatggactgagtgagaaaacgctgaggaagtggcttaagatgttcaaaaagaggcagctcgagctttaccttcccaaattctccattgagggctcctatcagctggagaaagtcctccccagtctggggatcagtaacgtcttcacctcccatgctgatctgtccggcatcagcaaccactcaaatatccaggtgtctgagatggtgcacaaagctgtggtggaggtggacgagtcgggaaccagagcagcggcagccacggggacaatattcactttcaggtcggcccgcctgaactctcagaggctagtgttcaacaggccctttctgatgttcattgtggataacaacatcctcttccttggcaaagtgaaccgcccctgaggtggggcttctcctgaaatctacaggcctcagggtgggagatgaagggggctatgctatggcccatctgtatgctggtagctagtgatttacacaggtttagttgactaatgaggcattacaaataatattactctatgatgattgcttccacccacacgactgcaacatacaggtgccttggggaaatgtggagaacattcaatcttgccgtcactattcatcaatgaagattaacactgagatccagagaggctggatgacttgctcaagttcaccagcatggtagtggcaaagagaggtccagagtcctggcccttgatgcccagctcagtgccacaaagctcaataggagggatgttccagtggatgagggccaccaggaagcacaggtccaaggctggtcccacacttatcagcagcaacaactgtcagttcatcctgcatgggaaaaatgttggaatgggagtctgaaatggggctactgtttcagtcnnnnnnnnnnnnnnnnnnnnnnnnnnnnnnnnnnnnnnnnnnnnnnnnnnnnnnnnnnnnnntacaaggatcagattcttgctgtgaccaagaactcctgaaatcatatagaaaggctggggtgggccctgtcattcatggttgatttcatacactcaagtgccattcatcctttaagaaaaaca

SEQ ID NO: 186704 - DNA, 1820 bp, Homo Sapiens
  misc_feature (1285)..(1318): n is a, c, g, or t
ctttgtacaaaaaagttggcttagcttcaccacaagatcttccagataaaagttttctacctcttttcttaattattctgatcagggatgctaaattataatttgttatgtattatctcacataatgtgaagaggcttaatgtgaagttttgttattttggtctcttttttattaagtatctcacttagaaattcagtggtatactttaaagcacttggatctttttcagcatatcttcctagcaaatgttttaaaattgacatttatttttagcactttcacttggtgaaggtggccatataaaattaaggaacatttgaacaatataagagaaaagaacttttaaggaacaattcacaaagtttgtttgaaattgtcagatgacatttcttgagtaccttttgtgtgcatagttattttagacaatataagctgttatggtcagcataacttaaaagtgtttagttttctattttactgagccttaaaaatagcactgatgagcttatgatacttaatgtttggcaatcataatgtgttcaaattaatgggattgaaaatctctccacacctgactctcatctgatctggatggttttggttttgtatcttttttacttctcccagaaaatactaaatttaaaactgtaaattaagaatataccactagataacaattatcaaattgagctttatgcatcattactcagaaagcttgccttcctttctttgctacttcaggacacagagttgatatttgcttactacagctttagatctagaagtttattcgtgcaacaaatatttattgagtaatttatactgtgccaggcatgttttgatatgtttctgtcatatgttttgatatgttccaacataagtttctgtcactttatattcagtatatattttctacagtgggtaaatttaacaaatggaaaggaatagaacactgatattttacagaattaaaccccttcattgtaagggctttgtttacatattaagtgtcaagtatttattcaggggatcttatttcattgtattttatctgttatctaggttgtccatttaccggttggacactgatactctgtcaaattcctttcaaaaatgactctttagtctgctgaaatttagcactagtactttagtgttctgatcctggaaaattcaaggtgaagctttatttgtggaccatctgatttaattattgaggattaaaaacctaaacctttgctcattctaaactcaagcttttaagcctcacagaatttacagggnnnnnnnnnnnnnnnnnnnnnnnnnnnnnnnnnnactgtgcttattaaactcttggaattagttattaaagggagtaaattctcatcttgggaattttgaaaatctatggacttacaactttcaggaggattaaatgtcttaagttttgtactagagcagaatgaaatctttcctattcattgagtttttgcctgccatagaggaatttttttaaaaattaaaatgacagtttatattagtggcaaagtgaataaagacctcactttcccaccccacccttcttcctttctcttacttttctttggattaaaggtcaggtgtagtactatgaagattcactcctgaataaagtgatttcagaagctaaaatttaacatacctggaaattttgtgatgtgttagccaagtgaagacattagtgtgttccatcttttgctaatggttcatggttgatttcttcattgtttcccatgaaattagcatagtcaagtggtacccttgacgcttgactgctggtcagtttgaccctgtttta

SEQ ID NO: 186705 - DNA, 870 bp, Homo Sapiens
tccaaaatcatgactgtaatgaagtacggatatccctaatctatcccaagtccttgaaatggcatgtcaggatttacctttgtttcccttttcttttcagcaagcaaaatactagcatagtcctcttgagtattcatcttcctcttcatcagcagccgtggcagtgacaccatcaggcttggcctgtggtgttgcaggtgatttcttcttgattccccctcctggaaccaccaaactcaggcccagcttagcataatcattgtccatgtacttgaaaagcggtgagttgcagacatctgacacctgatcttggtcttgctggtcataaccttcaagaagctgttccagggcagcacagtcttcactgccattgaacccagggatgctatagctctcccggacacatctttctgcagctacatagtcatttctgtgtagatgaactaagacttgagcaattgttttcttataacaagttggataattctcaatttccttataaatatttttttctttctgaatagagagtgccgcctcatcaaacctacgtcctcgtactagtagtctggaggcttttcctagtaattcaactgcctgtcgtaagcgttcttcattttcaaacacattagctgtctgttgatataactgtacagccttctctggatcaacattttctataagctttccagctcgctccaaagccatggctgctgtgtctggggtgccgttttctagatacatcatgctggccttctcaattagctgaacggcctctggtagtttctgcatctcctttgggcaaaggatacagtagacaggtcagcaaatgcatcaattaaagaaaaacagagttaacaatctgaaatgcaa

SEQ ID NO: 186706 - DNA, 914 bp, Homo Sapiens
ttggcaccctctctccacgtcagagacctgactgtggagatggcggctcagaagataaacgaggggctggaacacctcgccaaagcagagaaatacctgaaaactggttttttaaaatggaagccagattatgacagtgccgcttctgaatatggaaaagcagctgttgcttttaaaaatgccaaacagtttgagcaagcaaaagatgcctgcctgagggaagctgttgcccatgaaaataatagggctctttttcatgctgccaaagcttatgagcaagctggaatgatgttgaaggagatgcagaaactaccagaggccgttcagctaattgagaaggccagcatgatgtatctagaaaacggcaccccagacacagcagccatggctttggagcgagctggaaagcttatagaaaatgttgatccagagaaggctgtacagttatatcaacagacagctaatgtgtttgaaaatgaagaacgcttacgacaggcagttgaattactaggaaaagcctccagactactagtacgaggacgtaggtttgatgaggcggcactctctattcagaaagaaaaaaatatttataaggaaattgagaattatccaacttgttataagaaaacaattgctcaagtcttagttcatctacacagaaatgactatgtagctgcagaaagatgtgtccgggagagctatagcatccctgggttcaatggcagtgaagactgtgctgccctggaacagcttcttgaaggttatgaccagcaagaccaagatcagtgtcagatgtctgcaactcaccgcttttcaagtacatggacaatgattatgctaagctgggcctgagtttggtggttccaggagggggaatcaagagaatcacctgcaacaccacaggccaagcctga

SEQ ID NO: 186707 - DNA, 882 bp, Homo Sapiens
gcctttccccctctttctatgtatcagtgtttggggggctttaatcagtttttaaacgattattaccacctctctctcccccccaacccccactttcacaacgcggccccccacctttacctccctaagttcttcatctctttcgacattttttttgaaggctgatgggggggagggtggaagagaaagagtgaagaaaagttgcgagcgtctcctctcttcctaagcctcccgccccaacccacccctcagagaaggagaagataatatactgaaaagaagaggaggaggagagcgacgggacgggacgcgagcgggagcgcagccgccctctcggctccgcggcggcgcctcgcaagtccgggaggcgaggggggcccgaggggagacgccgtgacaactttcgtttccctctgagggaattgggaggtcggcggccccaaaagctttcagtccagtgtaaagctgttggagcgcgggagcaaaggtaaagaatgatgtaatgcgctggctgctccaaagcatcttttgttgtggaatggttattccagtcatctctttatgaatcaaatgtgaggggctgctttgtggacggagtcctttgcaagagcacatcaacgggaaagagaaagagacattcacttggagggctcttgctgaaaatgggtttaactctccttttgccagtcaccaccagcctgacctcatacacttttagtacaatggagtggctgagcctttgagcacaccaccattacatcatcgtggcaaattaaagaaggacgtgggaaaagaggacttattgttgtcatggctcatgagatgattggaactcaaattgttactgagaggttggtggctctgctggaagtgacggaaaaa

SEQ ID NO: 186708 - DNA, 1825 bp, Homo Sapiens
ttggctcaggctcctggaaaggaccgtccacccctccgcgctggcggtgtggacgcggaactcagcggagaaacgcgattgagaaatggaaaagaaaatgaaataaatcagcagttatgaggcagagcctaagagaactatggcaacatcaggtgactgtcccagaagtgaatcgcagggagaagagcctgctgagtgcagtgaggcgggtctcctgcaggagggagtacagccagaggagtttgtggccatcgcggactacgctgccaccgatgagacccagctcagttttttgagaggagaaaaaattcttatcctgagacaaaccactgcagattggtggtggggtgagcgtgcgggctgctgtgggtacattccggcaaaccatgtggggaagcacgtggatgagtacgaccccgaggacacgtggcaggatgaagagtacttcggcagctatggaactctgaaactccacttggagatgttggcagaccagccacgaacaactaaataccacagtgtcatcctgcagaataaagaatccctgacggataaagtcatcctggacgtgggctgtgggactgggatcatcagtctcttctgtgcacactatgcgcggcctagagcggtgtacgcggtggaggccagtgagatggcacagcacacggggcagctggtcctgcagaacggctttgctgacatcatcaccgtgtaccagcagaaggtggaggatgtggtgctgcccgagaaggtggacgtgctggtgtctgagtggatggggacctgcctgctgtttgagttcatgatcgagtccatcctgtatgcccgggatgcctggctgaaggaggacggggtcatttggcccaccatggctgcgttgcaccttgtgccctgcagtgctgataaggattatcgtagcaaggtgctcttctgggacaacgcgtacgagttcaacctcagcgctctgaaatctttagcagttaaggggtttttttcaaagcccaagtataaccacattttgaaaccagaagactgtctctctgaaccgtgcactatattgcagttggacatgagaaccgtgcaaatttctgatctagagaccctgaggggcgagctgcgcttcgacatcaggaaggcggggaccctgcacggcttcacggcctggtttagcgtccacttccagagcctgcaggaggggcagccgccgcaggtgctcagcaccgggcccttccaccccaccacacactggaagcagacgctgttcatgatggacgacccagtccctgtccatacagggagacgtggtcacgggttcagttgtgttgcagagaaacccagtgtggagaaggcacatgtctgtggctctgagctgggctgtcacttccagacaagaccccacatctcaaaaagttggagaaaaagtcttccccatctggagatgacagttgatgctttatttggaaagcagtgtgcatatcttgaggggtgatgaacacaagcaaaccaagttgcacctggcttctgcacactcctgcgaaagtcggtgaacattcactccacattgacccctccctagcctggcaggtgacgtcagggtccttcacagacaaacacgcttgggctcggcaggagctgccgtggccacccccgctgcccagtgtctgccctctagaagtaggctgtgtttccaggtgttcacccgtggtgcccacagtgccgacccgtggctgggtcggagctccatgtttcctagctaggtctaggtctacactcctaggacgcaccgcatatcagcccgtgtaccctgtgacagtgactgtcccca

SEQ ID NO: 186709 - DNA, 1363 bp, Homo Sapiens
gagccgaggcatcccagagcctcccgcagagtcccaccccaagcctggaaactttcacgctacagccctgcgccaggccccgaggagcagtcaggggactcagggagtcacagcacaacggcagctcctcggtcccagacggaggagggggacagcaaccatgcgcccagcaagacacaagcgatgacaccgatttacacacacccggtttagacgccaaagctctgcggggagaggagcggccctcaagagtcctccgggagctccgggtgagggtggggccctaggagggggccccgcgcagctgctccaggccgtccgcgtactggaaggcccgcccggtctcgtgctcatacatgtccagagccacctcgcagctctcacgcaccacgcgctctgggtcgtccgcgtgagcctgcagcgcggccaggcaggcgggccgggcaatggcgcccagggcctccgcgcactcgtgccgcaccatggggttctcggtgcatcgggccagggcggccgccagctggggcaccgccgcctcgtgctgcagctgtcccaggacgtagccgacctcgtggcggaagagggcgctcccacagtgcagaccctcggccagcgccagggcggcctcctcgcctcccgcgttgcgcagggcgaacatggcgcggtatcgctcgaagagcggccgggactcatccagcagcgcctcccgcaggcgccccacgtcacgctcctcagccggcggggcagggtccacggagaggtagggtcccgccgccggctccccgccgtgctgctgcagccactccagcctgcgcacggccagctggcaggtctcggccacctcgatgacggggtccgaggaatactgcttcaggatctccagaacttccgggtccccgatggcccccagggcctcccctgcctcatggcgcaccatgggctcctgacgggtgtcttgcagcacgtccaccagcatggggatggcgcgggcatcctgcatctggcccaggcagtaggccagctcgtgcttgagcagggcggaatcgtcatcgaaggcctggctgatccatgcaatggcgcctgggccgccgagcccacgcagcgtgaacagcgcccggaagcgggcctgcaggggctgcttggggtccaccagcgtctgcccgatggcatccacctcctgctccgtcaccatcgtgctgtcaatgggtcccggccttccacaaccctgctcaggctaaacctggggacgcggggatgtaagaaccgagctctggagactcaggacccgtcggcccggccagtaaccgcaggcgcctctgccaccaccgcttcacctgccgcgacgcccgcagtgcggtcccaa

SEQ ID NO: 186710 - DNA, 814 bp, Homo Sapiens
tgtacaaaaaagttgggtcaacaagctctaggcatcagaagaagctcatgctgggggtgaagcggctggcggagcttcggcggggcctgctgcagggggaggccctcagcgaaggcgggcgccggctggccaagggtccggagctgatggccatcgagggactggagaacggagaaggcccagctacagctggcccacggctcctcaccttccagggcagcgaactaagcccagagctacaggcggccatggcagggggtggccctgaaccactccccctcccacctgcccgctctcccagccaggagagcatcggggcacgctcacgggggtctggccactcacaggaacagcctgccccacagcccagcggtggagatcccagccccccccaggagaggaacctcccagagggcacagagcggccccctaagctttgttcttcacttcctggccaaggacccccaccctatgtttttatgtacccccagggctcaccctctagcccggccccagggccacctcctggcgcaccctgggccttctcctacttggccgggccccctgccactcccccagacccgcctcgacctaagcgccggtcccacagcctaagccgccctggccccacagagggggatgctgagggggaggcccgaagggccagtgggcagcaccctaggcagttatgctacccttaccccggcggccaggacgcagtgcccttgtccggaccagtcctagtgtgactccaaccccagctcggggggactcctcgcagccgttcttttgccctgcgggcccggcgcaaagg

SEQ ID NO: 186711 - DNA, 2205 bp, Homo Sapiens
ttggttcattaggactggatgaaaatgtgtccaagagaattgaaccaagtgtttccctctggcagttttatctctctaaaatgatcagcatggatattgaacaagttattaccctaagtttagctctccttctggctgtcaagtacatcttctttgaacaaacagagacagaatctacactctcattaaaaaaccctatcacatctcctgtagtgacacaaaagaaagtcccagacaattgttgtagacgtgaacctatgctggtcagaaataaccagaaatgtgattcagtagaggaagagacagggataaaccgagaaagaaaagttgaggttataaaacccttagtggctgaaacagataccccaaacagagctacatttgtggttggtaactcctccttactcgatacttcatcagtactggtgacacaggaacctgaaattgaacttcccagggaacctcggcctaatgaagaatgtctacagatacttgggaatgcagagaaaggtgcaaaattccttagtgatgctgagatcatccagttagtcaatgctaagcatatcccagcctacaagttggaaactctgatggaaactcatgagcgtggtgtatctattcgccgacagttactttccaagaagctttcagaaccttcttctctccagtacctaccttacagggattataattactccttggtgatgggagcttgttgtgagaatgttattggatatatgcccatccctgttggagtggcaggacccctttgcttagatgaaaaagaatttcaggttccaatggcaacaacagaaggttgtcttgtggccagcaccaatagaggctgcagagcaataggtcttggtggaggtgccagcagccgagtccttgcagatgggatgactcgtggcccagttgtgcgtcttccacgtgcttgtgactctgcagaagtgaaagcctggctcgaaacatctgaagggttcgcagtgataaaggaggcatttgacagcactagcagatttgcacgtctacagaaacttcatacaagtatagctggacgcaacctttatatccgtttccagtccaggtcaggggatgccatggggatgaacatgatttcaaagggtacagagaaagcactttcaaaacttcacgagtatttccctgaaatgcagattctagccgttagtggtaactattgtactgacaagaaacctgctgctataaattggatagagggaagaggaaaatctgttgtttgtgaagctgtcattccagccaaggttgtcagagaagtattaaagactaccacagaggctatgattgaggtcaacattaacaagaatttagtgggctctgccatggctgggagcataggaggctacaacgcccatgcagcaaacattgtcaccgccatctacattgcctgtggacaggatgcagcacagaatgttggtagttcaaactgtattactttaatggaagcaagtggtcccacaaatgaagatttatatatcagctgcaccatgccatctatagagataggaacggtgggtggtgggaccaacctactacctcagcaagcctgtttgcagatgctaggtgttcaaggagcatgcaaagataatcctggggaaaatgcccggcagcttgcccgaattgtgtgtgggaccgtaatggctggggaattgtcacttatggcagcattggcagcaggacatcttgtcaaaagtcacatgattcacaacaggtcgaagatcaatttacaagacctccaaggagcttgcaccaagaagacagcctgaatagcccgacagttctgaactggaacatgggcattgggttctaaaggactaacataaaatctgtgaattaaaaaagctcaatgcattgtcttgtggaggatgaatagatgtgatcactgagacagccacttggtttttggctctttcagagaggtctcaattctttccatgcagactcctcagatctgaacacagtttagtgctttacatgctgtgctctttgaagagatttcaacaagaatattgtatgtttaaagcatcagagatggtaatctacagctcacctctgaaggcaaatataagctgggaaaaaagttttgatgaaattcttgaagttcatggtgatcagtgcaattgaccttctccctcacccctggcagttgaaaatggaattttaaat

SEQ ID NO: 186712 - DNA, 1445 bp, Homo Sapiens
  misc_feature (797)..(823): n is a, c, g, or t
tgagcaatgcttttactattaaagccaactttgtacaaaaaagttggcatttctttatttcaataaagaggaatagtgaagtgaaatatacagaagcatgttcaagttcatctgttgaatctggaattgtgaatagtgacaatattgagaaaaatactgactccaatctgcaaacttcaacttcatttgagccacatttcaaaaagaaaaaagtaagtgcaagacgttataatgaagattacttaaaatatggctttatccaatgtgaaaaaccctttgaaaatgacagacctcgttgtgttatttgtaataatattcttgccaatgaaagcttaaaaccttcaaaattaaaaaggcacttataaactcagcatgctgaacttattgataatcctcttgaatattttcaaagaaagaaaaaagacataaagttatcaacacaatttcttaattgttctactgctgttagtgagaaagccttattatcatcatatttagttgcatatcgtgtggcaaaagagaaaatagctaacacagctgctgaaaaaattattcttccagcatgtttggatatggtgcgtacaatatttgatgataaatcagctgataaattaaaaactatacctaatgataacacagtatctcttcgaatttgtactattgcagaacatttagaaacaatgcttattactcgtttacagtctggtatagattttgcaatccagcttgatgaaagcactgatattggaagctgcacaacacttttagtttatgtcagatatgcgtggcaagatgannnnnnnnnnnnnnnnnnnnnnnnnnnaaatttaacctcacacctaagtggattagatatttttacagaattagaaaggcgcatagttggccaatataaattaaactggaaaaactgtaaaggaattacaagtgatggcacagcaaccatgactggaaaacatagcagagtaattaaaaaattactagaagttactaataatggtgctgtgtggaatcattgttttatacatcgtgaaggtttagcatccagagaaattccacagaatctcatggaagtattgaaaaatgcagtgaaagttgttaattttattaaaggaagctcattgaatagccggcttcttgaaacattttgttcagagattggaactaatcatacccacttactatatcataccaaaattcgttggttgtctcaagggaaaatactaagcagggtttatgagctcacgaatgagattcacttttttctcattgaaaaaaaatctcatttggcaagtatttttgaagatgatacttgggtaacaaaattggcatatttaactgatatttttagcattcttaatgaactgagtttaaaactacaggggaaaaacagtgatgtattccaacatgttgaacgtatccagggatttcgaaagacattattg

SEQ ID NO: 186713 - DNA, 713 bp, Homo Sapiens
tggctcattttttctttaaaggagaaaacttgtaggtgtttaagaattggttttgggagggcgaggactgggccaggttagaggcagatggcacaggggcgtgtggcgggcgggtgaggctgctttgcacacctgtgttggtggctgtcccctgccgcccctccctgtggcagcagcaggacaggtgtgtgcccagcaccctccctacctgggcctggaagcagatgaggggaatacttcatgcaaagaaaaaagtaacatgtgcaaaagctccccgtccagctttgacagtcagttttgatgtcagctcctcggcagggtaggcctgatgacagccctgtccctccctgcctctgccttgcccaaggccacggagggcgtctgcagagaggcctgccttccggattccaggcgggcatgccctgcaaaccccgcctgggcctcccttggtctgcccagccctcggttagccctgcctgaatcagtagatacttgaacgagtccccagtctgcgggaggcagtggtggggccatggacccatgcggggggttccagggtcacacgccacataacagacaaaaatacacacacgtgtgtttttctttgcaatacttgaaatattgccactgtgcttggacttataaacgaaatccccgtgacttcttcctcatcaccttgatggctttattctcaccttgtggggcatgtttgt

SEQ ID NO: 186714 - DNA, 1198 bp, Homo Sapiens
ttggagacaagcagcgagattgtgcgaaccatgctccgaatgagtgagattaccacttcctctagtgctcccttcacccagccattgtcttccaatgagatcttcagatccctacctgttggctataacatctctaagcaagttcttgatcagtatctcactctgctggcagatgatccactagagtttgttggaaagtctggcgacagtggtggaggaatgtatgtcatcaaaagacctccataaggcattagcatccctagccacagccactctggagtccgtcgtacaggagagatttgggtctcgctgtgctagaatattccgtctagttttgcagaagaaacacatagagcagaagcaagtggaagactttgcaatgattcctgcaaaggaggcaaaggatatgctatataagatgctctcagaaaatttcatgtcactccaggaaattcccaaaacaccagaccatgccccatccaggaccttctatttatatactgtgaacatcctgtcagctgcccgaatgttgttgcacaggtgctacaagagcatagccaacttgatagaaaggaggcaatttgaaaccaaagagaataagcgtctactagaaaaatctcagagggtagaagccatcattgcatctatgcaggctactggtgcagaggaagcacagttacaagaaatagaggagatgatcacagctcctgaacgtcagcagctagagaccctgaaacgtaatgtcaacaagttggatgccagtgagatccaggtggacgaaaccatcttcctgctggagtcttacatttgagtgcaccatgaagagacagtgatccagaagaagcatcttcctcagaagatctggggggatggaaagcaaaataaaggaggtgcctggatgcattatttgcagtgggataagtcgcagagtcttcaactaaacccccctctctatcccctgcagcccaggatacacctgaaagaatttggcatatttagatccattgctgtagtctcccctcatcaaatcttggcagtgggaagaaccttaaatcaacaaggttaatcatctatcagatgcatctgttcccataaagaagttacccacacctatggttacctatatccctggcaataggaaacttcctaagaagttaattttattttcagatgtctatgcctgttctttattttgttg

SEQ ID NO: 186715 - DNA, 957 bp, Homo Sapiens
  misc_feature (815)..(860): n is a, c, g, or t
gaaacaaataatcataaaaaataaaagtataaatcgtccattgattatgtaatagcacttgtattggtacagggtgtgggtcttgaactcggtcaggcatcgtcaagcctgcccaggccctccaggcctctttgatagctactgagcccctgaaggcatcaagacatgaccacgcatggcagtgtcggtggagagtttgcgttttacacccagcgatgcttggggatggcagagagatggatggataatgagtacaactgcaaacagcactgtacacatgtggtgagccaggaggctgggacggaggttaggccaatgttgctgctgactcatagacccacagagagcagggacttcacaaagctgaattaatgtggttagttgtgttcactgtgcaaagtaaggaagccagtcaacactggacgatgtttagaaaacatcgctgtccccctccacttctcatcttgggtcacctcctcatcccataataaagttctcttaggataaaccgagcaaaatagctcagacatttaacttatccccaaacatgtgtcttgatcttagtttccacccagagaatgaagaaagcaagcaagcactgggttacccaagcaactaaatcactcagttgcatccaacttaattggactgactacattcagctaaatctttccattttcgctgaacccaatggtttcggttactgtaatgactgatttccaaaaagaaagaaaaacctaatttggcattttttcagaatatgggatgggctttcctgcatgggttcaaggatgtttatggcatgttctctgtcnnnnnnnnnnnnnnnnnnnnnnnnnnnnnnnnnnnnnnnnnnnnnnaggtcagcccgagacctcaagggcttatctggaaagaggttggcaggaaaggaatgcgtcttcaggacttggcagtgtttgggcagagctctgccaa

SEQ ID NO: 186716 - DNA, 1946 bp, Homo Sapiens
ttggcaggccaaggcgacggccgccgcccgcccgccccttccgtgcagaagcagctgctcctttccgcgcccgcccgcctgcgctcccggccctggagaccatgaggttccgcatctacaaacggaaggtgctaatcctgacgctcgtggtggccgcctgcggcttcgtcctctggagcagcaatgggcgacaaaggaagaacgaggccctcgccccaccgttgctggacgccgaacccgcgcggggtgccggcggccgcggtggggaccacccctctgtggctgtgggcatccgcagggtctccaacgtgtcggcggcttccctggtcccggcggtcccccagcccgaggcggacaacctgacgctgcggtaccggtccctggtgtaccagctgaactttgatcagaccctgaggaatgtagataaggctggcacctgggccccccgggagctggtgctggtggtccaggtgcataaccggcccgaatacctcagactgctgctggactcacttcgaaaagcccagggaattgacaacgtcctcgtcatctttagccatgacttctggtcgaccgagatcaatcagctgatcgccggggtgaatttctgtccggttctgcaggtgttctttcctttcagcattcagttgtaccctaacgagtttccaggtagtgaccctagagattgtcccagagacctgccgaagaatgccgctttgaaattggggtgcatcaatgctgagtatcccgactccttcggccattatagagaggccaaattctcccagaccaaacatcactggtggtggaagctgcattttgtgtgggaaagagtgaaaattcttcgagattatgctggccttatacttttcctagaagaggatcactacttagccccagacttttaccatgtcttcaaaaagatgtggaaactgaagcagcaagagtgccctgaatgtgatgttctctccctggggacctatagtgccagtcgcagtttctatggcatggctgacaaggtagatgtgaaaacttggaaatccacagagcacaatatgggtctagccttgacccggaatgcctatcagaagctgatcgagtgcacagacactttctgtacttatgatgattataactgggactggactcttcaatacttgactgtatcttgtcttccaaaattctggaaagtgctggttcctcaaattcctaggatctttcatgctggagactgtggtatgcatcacaagaaaacctgtagaccatccactcagagtgcccaaattgagtcactcttaaataataacaaacaatacatgtttccagaaactctatcagtgaaaagtttactgtggtagccatttccccacctagaaaaaatggagggtggggagatattagggaccatgaactctgtaaaagttatagaagactgcagtgaaaatcacagttacaaaagcgacagtcttctatttttgatatttgtccaaacaggacatacaattgaataaaagagtttaggaactggtttctgctttaatacaaaaacaaaatcttgtaaaaggtgtccaaatacatagtatcttttccagttatgtctgattaagatttaaaactgaaggtttcattttgggagtagggttttaaagctcaatctgttatctgctaaaattgattattgttgatatgagagaagaggggaaattttatttaaattgcatttattaatctttttatctgaaactttgtacacttttccactttcaaaacctattttaagtacagcaaaatttatttaaaactgtcatagcagtaaaaagtattacgatgaaattgttagggtattaatggaacaaaccccagtttcactctcttgacacacttattaaggaagggattgcttcactggtttaataaatttaaaagttatgtttgttaaacacccc

SEQ ID NO: 186717 - DNA, 2897 bp, Homo Sapiens
ttggcgcctgcagggatgggggacgagcggccccactactacgggaaacacggaacgccacagaagtatgatcccactttcaaaggacccatttacaataggggctgcacggatatcatatgctgtgtgttcctgctcctggccattgtgggctacgtggctgtaggcatcatagcctggactcatggagaccctcgaaaggtgatctaccccactgatagccggggcgagttctgcgggcagaagggcacaaaaaacgagaacaaaccctatctgttttatttcaacattgtgaaatgtgccagccccctggttctgctggaattccaatgtcccactccccagatctgcgtggaaaaatgccccgaccgctacctcacgtacctgaatgctcgcagctcccgggactttgagtactataagcagttctgtgttcctggcttcaagaacaataaaggagtggctgaggtgcttcgagatggtgactgccctgctgtcctcatccccagcaaacccttggcccggagatgcttccccgctatccacgcctacaagggtgtcctgatggtgggcaatgagacgacctatgaggatgggcatggctcccggaaaaacatcacagacctggtggagggcgccaagaaagccaatggagtcctagaggcgcggcaactcgccatgcgcatatttgaagattacaccgtctcttggtactggattatcataggcctggtcattgccatggcgatgagcctcctgttcatcatcctgcttcgcttcctggctggtattatggtctgggtgatgatcatcatggtgattctggtgctgggctacggaatatttcactgctacatggagtactcccgactgcgtggtgaggccggctctgatgtctctttggtggacctcggctttcagacggatttccgggtgtacctgcacttacggcagacctggttggcctttatgatcattctgagtatccttgaagtcattatcatcttgctgctcatctttctccggaagagaattctcatcgcgattgcactcatcaaagaagccagcagggctgtgggatacgtcatgtgctccttgctctacccactggtcaccttcttcttgctgtgcctctgcatcgcctactgggccagcactgctgtcttcctgtccacttccaacgaagcggtctataagatctttgatgacagcccctgcccatttactgcgaaaacctgcaacccagagaccttcccctcctccaatgagtcccgccaatgccccaatgcccgttgccagttcgccttctacggtggtgagtcgggctaccaccgggccctgctgggcctgcagatcttcaatgccttcatgttcttctggttggccaacttcgtgctggcgctgggccaggtcacgctggccggggcctttgcctcctactactgggccctgcgcaagccggacgacctgccggccttcccgctcttctctgcctttggccgggcgctcaggtaccacacaggctccctggcctttggcgcgctcatcctggccattgtgcagatcatccgtgtgatactcgagtacctggatcagcggctgaaagctgcagagaacaagtttgccaagtgcctcatgacctgtctcaaatgctgcttctggtgcctggagaagttcatcaaattccttaataggaatgcctacatcatgattgccatctacggcaccaatttctgcacctcggccaggaatgccttcttcctgctcatgagaaacatcatcagagtggctgtcctggataaagttactgacttcctcttcctgttgggcaaacttctgatcgttggtagtgtggggatcctggctttcttcttcttcacccaccgtatcaggatcgtgcaggatacagcaccacccctcaattattactgggttcctatactgacggtgatcgttggctcctacttgattgcacacggtttcttcagcgtctatggcatgtgtgtggacacgctgttcctctgcttcttggaggacctggagaggaatgacggctcggccgagaggccttacttcatgtcttccaccctcaagaaactcttgaacaagaccaacaagaaggcagcggagtcctgaaggccccgtgctccccacctctcaaggagtctcatgccgcagggtgctcagtagctgggtctgttcccccagccccttgggctcacctgaagtcctatcactgccgctctgcccctccccatgagccagatcccaccagtttctggacgtggagagtctggggcatctccttcttatgccaaggggcgcttggagttttcatggctgcccctccagactgcgagaaacaagtaaaaacccattggggcctcttgatgtctgggatggcacgtggcccgacctccacaagctccctcatgcttcctgtcccccgcttacacgacaacgggccagaccacaggaaggacggtgtttgtgtctgagggagctgctggccacagtgaacacccacgtttattcctgcctgctccggccaggactgaaccccttctccacacctgaacagttggctcaagggccaccagaagcatttctttattattattattttttaacctggacatgcattaaagggtctattagctttctttccgtctgtctcaacagctgagatggggccgccaaggagtgccttccttttgctccctcctagctgggagtgacgggtgggagtgtgtgtgcccaggtgggggtgtctcctggctgggaaggagggaaagggagggagagttttgcgggggttggcagtggagagcacgctggagaggagatgggctattagcctgtttaatgaaaacttgctgggctggaagggagttagg

SEQ ID NO: 186718 - DNA, 1737 bp, Homo Sapiens
ttggaggagcgaggcgcttgctggggtcggggctgcgcgacggcgcaggggctgcggggagcgccgcgcaggccgtgcagttcctagcgaggaggcgccgccgccattgccgctctctcggtgagcgcagccccgctctccgggccgggccttcgcgggccaccggcgccatgggccagtgcggcatcacctcctccaagaccgtgctggtctttctcaacctcatcttctggggggcagctggcattttatgctatgtgggagcctatgtcttcatcacttatgatgactatgaccacttctttgaagatgtgtacacgctcatccctgctgtagtgatcatagctgtaggagccctgcttttcatcattgggctaattggctgctgtgccacaatccgggaaagtcgctgtggacttgccacgtttgtcatcatcctgctcttggtttttgtcacagaagttgttgtagtggttttgggatatgtttacagagcaaaggtggaaaatgaggttgatcgcagcattcagaaagtgtataagacctacaatggaaccaaccctgatgctgctagccgggctattgattatgtacagagacagctgcattgttgtggaattcacaactactcagactgggaaaatacagattggttcaaagaaaccaaaaaccagagtgtccctcttagctgctgcagagagactgccagcaattgtaatggcagcctggcccacccttccgacctctatgctgaggggtgtgaggctctagttgtgaagaagctacaagaaatcatgatgcatgtgatctgggccgcactggcatttgcagctattcagctgctgggcatgctgtgtgcttgcatcgtgttgtgcagaaggagtagagatcctgcttacgagctcctcatcactggcggaacctatgcatagttgacaactcaagcctgagctttttggtcttgttctgatttggaaggtgaattgagcaggtctgctgctgttggcctctggagttcatttagttaaagcacatgtacactggtgttggacagagcagcttggcttttcatgtgcccacctacttacctactacctgcgactttctttttccttgttctagctgactcttcatgcccctaagattttaagtacgatggtgaacgttctaatttcagaaccaattgcgagtcatgtagtgtggtagaattaaaggaggacacgagcctgcttctgttacctccaagtggtaacaggactgatgccgaaatgtcaccaggtcctttcagtcttcacagtggagaactcttggccaaaggtttttggggggaggaggaggaaaccagctttctggttaaggttaacaccagatggtgcccctcattggtgtccttttaaaaaatatttactgtagtccaataagatagcagctgtacaaaatgactaaaatagattgtaggatcatatggcgtatatcttggttcatcttcaaaatcagagactgagctttgaaactagtggtttttaatcaaagttggctttataggaggagtataatgtatgcactactgttttaaaagaattagtgtgagtgtgtttttgtatgaatgagcccattcatggtaagtcttaagcttgttggaaataatgtacccatgtagactagcaaaatagtatgtagatgtgatctcagttgtaaatagaaaaatctaattcaataaactctgtatcagccccc

SEQ ID NO: 186719 - DNA, 1427 bp, Homo Sapiens
  misc_feature (1291)..(1299): n is a, c, g, or t
agcaatgcttttttataatagccaactttgtacaaaaaagttggatatttattcacatgccaaatctgattgagtaccttcaaagtttagaacaaattggtgttcaagacttttggattggtcgtgttcatcgtggtgcccctcccattagagataaaagcagcaaatactacgtgtcctatgaaatgtaccagtggccagcttaccctgactacacagccggagctgcctatgtaatctccggtgatgtagctgccaaagtctatgaggcatcacagacactaaattcaagtctttacatagacgatgtgttcatgggcctctgtgccaataaaatagggatagtaccgcaggaccatgtgtttttttctggagagggtaaaactccttatcatccctgcatctatgaaaaaatgatgacatctcatggacacttagaagatctccaggacctttggaagaatgctacagatcctaaagtaaaaaccatttccaaaggttttttttggtcaaatatactgcagattaatgaagataattctcctttgtaaaattagctatgtggacacatacccttgtagggctgcgtttatctaatagtacttgaatgttgtatgttttcactgtcactgagtcaaacctggatgaaaaaaacctttaaatgttcgtctataccctaagtaaaatgaggacgaaagacaaatattttgaaagcctagtccatcagaatgtttctttgattctagaagctgtttaatatcacttatctacttcattgcctaagttcatttcaaagaatttgtatttagaaaaggtttatattattagtgaaaacaaaactaaagggaagttcaagttctcatgtaatgccacatatatacttgaggtgtagagatgttattaagaagttttgatgttagaataattgcttttggaaaataccaaatgaacgtacagtacaacatttcaaggaaatgaatatattgttagaccaggtaagcaagtttatttttgttaaagagcacttggtggaggtagtaggggcagggaaaggtcagcataggagagaaagttcatgaatctggtaaaacagtctcttgttcttaagaggagatgtagaaaaatgtgtacaatgttattataaacagacaaatcacgtcttaccacatccatgtagctactggtgttagagtcattaaaatacctttttttgcatcttttttcaaagtttaatgtgaacttttaaaaagtgattaatgttgccctaatactttatatgtttttaatggannnnnnnnnaagtattagaaaatgacacataacacgggcagctggttgctcatagggtccttctctagggagaaaccattgttaattcaaataagctgattttaatgacgttttcactggtttttaaatattcaata

SEQ ID NO: 186720 - DNA, 865 bp, Homo Sapiens
ttggaaaagaaactattttgtaaaataagaagacttccatttttaatgaccaacatgtattaagatggacacctactctacgaaacacgaagttctatggtctcgaagaagcccgtgcctgtttaaaactgatcctaactaaaaacagacttgagtggatatgagaatgttggttagtggcagaagagtcaaaaaatggcagttaattattcagttatttgctacttgttttttagcgagcctcatgtttttttgggaaccaatcgataatcacattgtgagccatatgaagtcatattcttacagatacctcataaatagctatgactttgtgaatgataccctgtctcttaagcacacctcagcggggcctcgctaccaatacttgattaaccacaaggaaaagtgtcaagctcaagacgtcctccttttactgtttgtaaaaactgctcctgaaaactatgatcgacgttccggaattagaaggacgtggggcaatgaaaattatgttcggtctcagctgaatgccaacatcaaaactctgtttgccttaggaactcctaatccactggagggagaagaactacaaagaaaactggcttgggaagatcaaaggtacaatgatataattcagcaagactttgttgattctttctacaatcttactctgaaattacttatgcagttcagttgggcaaatacctattgtccacatgccaaatttcttatgactgctgatgatgacatatttattcacatgccaaatctgattgagtaccttcaaagtttagaacaaattggtgttcaagacttttggattggtcgtgttcatcgtggtgcccctcccattagagataaaagcagc

SEQ ID NO: 186721 - DNA, 1919 bp, Homo Sapiens
  misc_feature (321)..(329): n is a, c, g, or t
  misc_feature (1173)..(1234): n is a, c, g, or t
ttggtgaatatattgttagaccaggtaagcaagtttatttttgttaaagagcacttggtggaggtagtaggggcagggaaaggtcagcataggagagaaagttcatgaatctggtaaaacagtctcttgttcttaagaggagatgtagaaaaatgtgtacaatgttattataaacagacaaatcacgtcttaccacatccatgtagctactggtgttagagtcattaaaatacctttttttgcatcttttttcaaagtttaatgtgaacttttagaaaagtgattaatgttgccctaatactttatatgtttttaatggannnnnnnnnaagtattagaaaatgacacataacacgggcagctggttgctcatagggtccttctctagggagaaaccattgttaattcaaataagctgattttaatgacgttttcaactggtttttaaatattcaatattggtctgtgtttaagtttgttatttgaatgtaatttacatagaggaatataataatggagagacttcaaatggaaagacagaacattacaagcctaatgtctccataattttataaaatgaaatcttagtgtctaaatccttgtactgattactaaaattaacccactcctccccaacaaggtcttataaaccacagcactttgttccaagttcagagttttaaattgagagcattaaacatcaaagttataatatctaaaacaatttatttttcatcaataactgtcagaggtgatctttattttctaaatatttcaaacttgaaaacagagtaaaaaagtgatagaaaagttgccagtttggggttaaagcatttttaaagctgcatgttccttgtaatcaaagagatgtgtctgagatctaatagagtaagttacatttattttacaaagcaggataaaaatgtggctataatacacactacctcccttcactacagaaagaactaggtggtgtctactgctagggagattatatgaaggccaaaataatgacttcagcaagagtgactgaactcactctaaggcctttgactgcagaggcacctgttagggaaaatcagatgtctcatataataaggtgatgtcggaaacacgcaaaacaaaacgaaaaaagatttctcagtatacacaactgaatgatgatacttacannnnnnnnnnnnnnnnnnnnnnnnnnnnnnnnnnnnnnnnnnnnnnnnnnnnnnnnnnnnnngaggcttgtttacattgcttagataatttagaatttttaactaatgtcaaaactacagtgtcaaacattctaggttgtagttactttcagagtagatacagggttttagatcattacagtttaagttttctgaccaattaaaaaaacatagagaacaaaagcatatttgaccaagcaacaagcttataattaatttttattagttgattgattaatgatgtattgccttttgcccatatataccctgtgtatctatacttggaagtgtttaaggttgccattggttgaaaacataagtgtctctggccatcaaagtgatcttgtttacagcagtgcttttgtgaaacaattatttatttgctgaaagagctcttctgaactgtgtccttttaatttttgcttagaatagaatggaacaagtttaaatttcaaggaaatatgaaggcacttcctttttttctaagaaggaagttgctagatgattccttcatcacacttacttaaagtactgagaagagtatctgtaaataaaagggttccaaccttttaaaaaagaaggaaaaaactttttggtgctccagtgtagggctatctttttaaaaaatgtcaacaaaaggaaaataaactatcagcttggatggtcacttgaatagaagataggttatacacagtgttattgttaaaa

SEQ ID NO: 186722 - DNA, 1615 bp, Homo Sapiens
  misc_feature (330)..(338): n is a, c, g, or t
  misc_feature (1198)..(1243): n is a, c, g, or t
acaaaaaagttggtgaatatattgttagaccaggtaagcaagtttatttttgttaaagagcacttggtggaggtagtaggggcagggaaaggtcagcataggagagaaagttcatgaatctggtaaaacagtctcttgttcttaagaggagatgtagaaaaatgtgtacaatgttattataaacagacaaatcacgtcttaccacatccatgtagctactggtgttagagtcattaaaatacctttttttgcatcttttttcaaagtttaatgtgaacttttagaaaagtgattaatgttgccctaatactttatatgtttttaatggannnnnnnnnaagtattagaaaatgacacataacacgggcagctggttgctcatagggtccttctctagggagaaaccattgttaattcaaataagctgattttaatgacgttttcaactggtttttaaatattcaatattggtctgtgtttaagtttgttatttgaatgtaatttacatagaggaatataataatggagagacttcaaatggaaagacagaacattacaagcctaatgtctccataattttataaaatgaaatcttagtgtctaaatccttgtactgattactaaaattaacccactcctccccaacaaggtcttataaaccacagcactttgttccaagttcagagttttaaattgagagcattaaacatcaaagttataatatctaaaacaatttatttttcatcaataactgtcagaggtgatctttattttctaaatatttcaaacttgaaaacagagtaaaaaagtgatagaaaagttgccagtttggggttaaagcatttttaaagctgcatgttccttgtaatcaaagagatgtgtctgagatctaatagagtaagttacatttattttacaaagcaggataaaaatgtggctataatacacactacctcccttcactacagaaagaactaggtggtgtctactgctagggagattatatgaaggccaaaataatgacttcagcaagagtgactgaactcactctaaggcctttgactgcagaggcacctgttagggaaaatcagatgtctcatataataaggtgatgtcggaaacacgcaaaacaaaacgaaaaaagatttctcagtatacacaactgaatgatgatacttacaatttttagcaggtagcnnnnnnnnnnnnnnnnnnnnnnnnnnnnnnnnnnnnnnnnnnnnnngaggcttgtttacattgcttagataatttagaatttttaactaatgtcaaaactacagtgtcaaacattctaggttgtagttactttcagagtagatacagggttttagatcattacagtttaagttttctgaccaattaaaaaaacatagagaacaaaagcatatttgaccaagcaacaagcttataattaatttttattagttgattgattaatgatgtattgccttttgcccatatataccctgtgtatctatacttggaagtgtttaaggttgccattggttgaaaacataagtgtctctggccatcaaagtgatcttgtttacagcagtgcttttgtgaaacaattatttatttgctgaaagagctc

SEQ ID NO: 186723 - DNA, 1376 bp, Homo Sapiens
ttggatacaaacgtttttgcaggttctgctgtgaaatgtggtttgatttttttggtgtgttaattttgatcataaatgcattcatactcataatccagtttaatccttttatttgcttcctccaactatttaaagtggtccaaaaacacttttctgtaagtttctatactgtctaaaaccttatggtgaccagaattgtttattaatatcaaacttttttatatatgagaactaattcttgaataaaccccaaagttcactctcttgtttaagtagcagcagctttttacttaaaatttaattttaactacattgatactttacacatcctagtttggtaacacagctttaactatgtcatgcaacatatatatgttggtaggatgttattagagagatatgtgtgcatatatatttttttgcacctgaatcacccagcttttcataagtggtatgtttaattggtcattcagccaaccatcagtattttccccccacaacatgtgtaacacttttcagtctgtggatatctgatacattaagatttctttttataagtattcattttgaatgtgcatatagttatttgaccccttccaaatacttgtagccaaacattggctagaacatcccaagatatgctgacactgtcctgttagcttcatattatacttgctagtttaggtctctatagaagccctatataatttagaatatgcccactgaatatctttaatagaaagtaacataaagctagtattcaatgtagagtattttcatatgtttttcacagcccgttacaaattggcaatgtttggttaatgtttgtattacttggaaatcgctacagcttggactatttttttctaaatttttagcattagtccatttctgctgctaacaattgaatccagaaatctactttctccatcttccactgttagtgccagtgagcaatactgttgtgcaacaaaaatgtcactttatctcagtgtgaatgagtagtctaaattccctttctaccattgatttaaatatatatattggtaagagagactgcccatgtgtttagaatagaattttttaaatgaaatgatcaacaggtggaatttgaaatatattcttctacaaaagagatttctttcccttttatattttgatgattgttttcttaagattaagatatgttcttgctcttttataagattatttaaattatgtttccctctgattttttttcaccattgtatttactaagttattggatttacatgaaatctggcactttagggtgttctttttctcacagagtatatttaataaaaatgctgtgtatatagaaatgtgtttatatttatttcatttgaagaaaaata

SEQ ID NO: 186724 - DNA, 2231 bp, Homo Sapiens
  misc_feature (2174)..(2187): n is a, c, g, or t
ttggcggccggcgcctcctcctggattcattcactcgctcttttcattcacgaaggtagtgaggcctagtggaaagccatggagagcgctctccccgccgccggcttcctgtactgggtcggcgcgggcaccgtggcctacctagccctgcgtatttcgtactcgctcttcacggccctccgggtctggggagtggggaatgaggcgggggtcggcccggggctcggagaatgggcagttgtcacaggtagtactgatggaattggaaaatcatatgcagaagagttagcaaagcatggaatgaaggttgtccttatcagcagatcaaaggataaacttgaccaggtttccagtgaaataaaagaaaaattcaaagtggagacaagaaccattgctgttgactttgcatcagaagatatttatgataaaattaaaacaggcttggctggtcttgaaatcggcatcttagtgaacaacgtgggaatgtcgtatgagtatcctgaatactttttggatgttcctgacttggacaatgtgatcaagaaaatgataaatattaatattctttctgtttgtaagatgacacaattggtactgcctggcatggtggaaagatccaaaggggctattctgaacatttcatctggcagtggcatgctccctgtcccactcttgaccatctattctgcaaccaagacttttgtagatttcttctctcagtgcctccatgaggagtataggagcaagggcgtctttgtgcagagtgtcctgccatacttcgtagctacaaaactggctaaaatccggaagccaactttggataagccctctccggagacgtttgtgaagtctgcaattaaaacagtcggcctgcaatcccgaaccaatggatacctgatccatgctcttatgggctcgataatctcaaacctgccttcttggatttatttgaaaatagtcatgaatatgaacaagtctacacgggctcactatctgaagaaaaccaagaagaactaagcattgataactgccttgtaacttggccaggtgctccagcatatgcacgttcactgcaaagcaccctactggttttgaaaatctgaccttgtcatttcaatagttattaacatgactaaatattatcttaattaagaggaaaatagaagttgcttttaggggtttctgacatatattctggatactatccgaggtaattttgaagtttaatataaatgctcatatcaaatgaatatagaactaatattgtcgggaacacctaatagaaaggaatactattatagcaaatcacagaatgatagactcaagcataaaacttggcagttttatctgcttcaaaatgccattgatcattattcctgtattttctctgaaactgattataaaaaccaatgtccagctactcttttgtttttgacacttgaagaaatggagatcgatttgatttgtttataagcagacacactgcaatttacaaagatctctttacggttttataaaattatcttccagtttgtacatttatatggaattgttctttatcaagggtagctaatgacatgaaaataattgtgaaatatggaattatttctgacacatgaagcccactaaactatgctttcttataatgcatatttcttctcagtttaaatgtatgtaaatatcgaagctatatggtatgatttataaagataaatgggccaaagtgtacattgagactggcagccatctatggtaccactgaaaccctgacccagaaaagtggcttgcttggacacccagctgcctttgtttctgcattaaaccaatattgatcacacatatgacacaggctagtcctataaaagtaatgacttcatagaaatggcattataatttttaagttgatactctacaggtagctattgatataattagttttaataaaacatgctgcaaccatggtatacaacaaaaatacatttctttggtgattgaaattaaggccgtatttacaatgacttaatataagactgacttttatcctgcttcataacttgtatggagaactcaccaagaaagaattcaatactgtgaaatatgcagcaagaagattggtctttacctaggctgtgtttcctaagctctgagttttcagcaccagtagatttgtattnnnnnnnnnnnnnntggggccttagcttctggcttttaattttgccagctaaagacat

SEQ ID NO: 186725 - DNA, 969 bp, Homo Sapiens
ttggctttcatatcatcccaatcacggatagaaaggagaccatgtcaaacattataaaattcgcaaacttgacaatggtggatactacattaccacccgggcccagtttgaaacacttcagcagcttgtacaacattactcagagagagctgcaggtctctgctgccgcctagtagttccctgtcacaaagggatgccaaggcttaccgatctgtctgtcaaaaccaaagatgtctgggaaatccctcgagaatccctgcagttgatcaagagactgggaaatgggcagtttggggaagtatggatgggtacctggaatggaaacacaaaagtagccataaagactcttaaaccaggcacaatgtcccccgaatcattccttgaggaagcgcagatcatgaagaagctgaagcacgacaagctggtccagctctatgcagtggtgtctgaggagcccatctacatcgtcaccgagtatatgaacaaaggaagtttactggatttcttaaaagatggagaaggaagagctctgaaattaccaaatcttgtggacatggcagcacaggtggctgcaggaatggcttacatcgagcgcatgaattatatccatagagatctgcgatcagcaaacattctagtggggaatggactcatatgcaagattgctgacttcggattggcccgattgatagaagacaatgagtacacagcaaagacaggtgcaaagttccccatcaagtggacggcccccgaggcagccctgtacgggaggttcacaatcaagtctgacgtgtggtcttttggaatcttactcacagagctggtcaccaaggaagagtgccatacccaggcatgaacaacccgggaagtgctgggagcaagtggaggcgaggctaccggatgccctggcccgcaagactgccccatctctctgcatgagctcatgatccactgctgggaaaaagggac

SEQ ID NO: 186726 - DNA, 827 bp, Homo Sapiens
gcttttttataatagccaactttgtacaaaaaagttggcaaggctgtcgtggcaaccttgggatcgagtttgagactaaaggatgtcatgagatccctggcttctccccatgttgttcccggacaagggcagaagggaggcatggcaagggacctctgctgtccttactcaacagtggtcctcatccctccccacctcccactgcttcctgcaagggcaccagttgtatgagaaagttggcctttggacttaggatttcttattgtagctaagagccatctgaagcagcaggttgcaggacaaatgcttcagtccaccgagagcagtaccgtgtggccaagaggtggactcagagccttccttgagctaaactcggccaaccaaggcacgcagcatgtcccctcaggtctccagtcagtccaggttgaccctcagttctggacgtgtgtatatagctgtatttaatacctcaaggtcattgtggctctggggatgccggggcaggaggacgagggtgcgctgtggacacagcagtccgcggaattccgttctgggaagccaatggtcgccggcaccccttgcttcctccctctgttgtctgcctgtgtgacacacatcaatggcaataacttcttccaactcctcgcagaaatgggagaggccggcagcctgcccgagagggactttcctctctcttgctccccgcttcgttctgttttggctgcagagagtggttcatccatactctcattccctcgcctccccttgtggacgggggtcttgcctttttcaattcctgtgttttggtgtcttccccttatctgcta

SEQ ID NO: 186727 - DNA, 2591 bp, Homo Sapiens
  misc_feature (95)..(136): n is a, c, g, or t
  misc_feature (794)..(871): n is a, c, g, or t
  misc_feature (1482)..(1505): n is a, c, g, or t
ttgggtgttttctatagaggaggaaaggccctccctcaccctgctccccacccaggcagggcagcatgggacccagtgtctcagtgccttcaaannnnnnnnnnnnnnnnnnnnnnnnnnnnnnnnnnnnnnnnnngaggccttgcctgggcaaccctaagcccctgtccctcgccatacactgatgcctggcagctagagcaaatggctcgtgttctttgtcgaaggcctgtggtgagattgttttgtttccttttgttttgtgagtttgtttaaaattgaaattagttattttcttctgctggacagtattaaatagagcaggatgttgagttaatctgctagattgcagtactaatggtagtggtttagtgtcttcatgttaatattatttgtacttatttgaacaataatgataaagaagtggttcattattttttaattaatgcactttaaataaggtagaatggaaaaaacccagagagcaaagtgcattacttaaagatgcagtatatacttttctcatttttaaacagcacatatttattaagagaaaaaaagtaatttatgactatttaaaataaaatttaaaagtagagtgactgtcaggtaaagaaccttcaatgtagctatcttccagggggagggccctgcagcctcgctcctcagatgtctgcactgagccagttcagtcactagtgcgccagccaggccaggagggagtgcagagcatgtctgccaagcacagagcatctcagttggactggaccacagtgctcccgagagcctgcctnnnnnnnnnnnnnnnnnnnnnnnnnnnnnnnnnnnnnnnnnnnnnnnnnnnnnnnnnnnnnnnnnnnnnnnnnnnnnnagtgctgtaagtaatagagtcattaaaatgcaggactgaaagagacctcagaggtctctatcccatcccttcctgttactgcggcccaaggacaggaaacaacttttccaaaatcccacagctagttaatgacagatctccccactacattaatcccgtgctcctcctcactgccattatagtttattgtgtggtcatgtttacattgtgacatccagccccaaggatggctgggagttgctcaggcatccaggaaaagtggggaatgctgccatctggtgacagcatgtagatttgggcagtgaacagggattgccatgccccagtcttcgcacctcgccccctcaccccctaactcacagcacaaaccctgcaaacccaaagagaatattaatacttgaagcaagaagggtgcatgccagtccttctccgacatggccagggggtaccaggccttgtgcgcctggcctcctagccctagccagggcgagagggcctttcccttgagctactgagctgctttgtgatgctgaaggatactgccggcagcaggcagaggagggagggggcctagggctctgacccatctggaggaaaaccagatcggactnnnnnnnnnnnnnnnnnnnnnnnntctctgcagtgtccaaacctagtttcccatgagttgcgactgaaaatgtgaaacgacactgtattgctgtatactgcaactttaaccataatgagcccttctgaggtcattattgaggttcatataatgctcgaagatgcagcatttggtgctttgttttcctttccgtttcaagacctttttcttttattgcaaggggaaaaaaatgtcatctcctcctacctcatccctctttgtgacagcagacctggctgtgttgcccctctcctcctcactattctcaccaggccatgggactttgggggcagtgagagagagctggaaaggggcaaccctgagcagcaggtgtgccccatgccctgtgggtttcccctatgtccagtgactgtagatgggctgtcttgccaggcctcagccccgtctaccctaagcctggccccaaaggtttctctttcttcctccttgattttccatcttgacgaaggcattatatagaatcattttaatcactttcagatgttagagcagcgtattttacaggcatttatatccattgctttcctcagcaaggcatgttactacttttatcatctaaggaaaaaagacaagggaattccagtcaggcattattttcctattactagtgtttgcagaataggtgtaggactatttaagtttagaccttggtttggtagttcttgtttttaataaggggaaaaagataaaataacccctatttttcctgttattgtatttaactaatatattatttctttaaggttactcacttcccctacccctccaaataccttgcattctcaatcaaaaatggaaacaatctgagagacaggaaaagtgcaatattaccaagatggatgccagggctcattggggacaatggagggaataccagtggcgctcagagagcaagaggcagggagcggggtgctgaaggaatcctagctgtggaacaggtgggtgggttggtggagtttgatcttgtggcgttctcctctcccccttctttgggaagatgataggggtccctgccagatccacccagaagaaagggattcaagcatgggg

SEQ ID NO: 186728 - DNA, 950 bp, Homo Sapiens
  misc_feature (436)..(574): n is a, c, g, or t
  misc_feature (576)..(605): n is a, c, g, or t
tttgtacaaaaaagttgggtcactagtaccagactatctatctagtgagttgtattataagcgatgaaatactttaaaagctacccagtaactcttgggattaattttatgaaataaattctgagctgctgcttttgatatagtcagacttaagactgaaccccagtagacaggcaatagatatagaattctggttagctaattgaacttttgtgacctgtttaaaaacaaatcaaatttattgaacaaatgacaaggcacaaatactttcagaattgtatttcagttttgaagatttaaaaaaaatgtgaaaataaatatatattagtatcctttattttaaagtcaattgtaaaccagaagtactgttattttggtgattaaaatccaaaactttagctgtatttcagtaacaaaaacataccttactagactnnnnnnnnnnnnnnnnnnnnnnnnnnnnnnnnnnnnnnnnnnnnnnnnnnnnnnnnnnnnnnnnnnnnnnnnnnnnnnnnnnnnnnnnnnnnnnnnnnnnnnnnnnnnnnnnnnnnnnnnnnnnnnnnnnnnnnnnnnntnnnnnnnnnnnnnnnnnnnnnnnnnnnnnngtatcttactgactaaactggaatggaaatcttataattagtgttgtatttttctgcaaaatagtgaattggtacttgggagacttctgttctttgttgaaaaaaattgcctttgttttgaaattatatcacctgtgttctgaactaaaatgatgggagttcattttgtatttactttgcagtaagtatcatgtaaatatgcaaatgttgaatgtaatatagattgtgtcctcattgagtttttgggtgatacagtttataaatatacaattatacaccctcatacattcgtctgattttgagcttgtaagatgagaactgctttttacacatttattaaaaaaa

SEQ ID NO: 186729 - DNA, 1635 bp, Homo Sapiens
ttggctagtctgtttgtgaaagatgggtactatcatgatttcctcttctattcctatattcttttctggattttttttaataattagtgatataagcattgtttttattgcagccatatccacttatccatcttaagatctgtagctgggattttctgacttgtaatgagcagggggattgctttttcactttgtgacactctttagagctttaatgcttcacagtatatggcctggtctcatccttgcgtgttccacttgaggccctttggtgtcttgccccattcttgtgtttataaaatgtttgagtatttctgatgagtgatgcttgccttagtctcatgaattcagatcccttcatgtcctttaagtatgctcctcaatgtgtaaacaggaacaactttatgatttgaaagctttaaaggagattcttctcccacccccaactttatttgcaatgggatttttcctaggagagttatgaaaagttgaaggcttctaagggaatactgtaaacatgacccacttatatttatcacagtgaaaggcaaaattattcactcagaagtaatataaattacctctttaaaaagtaaccagaatttgtcctttttggttttatacattcacaaacatatacatttttcttgagtctcaaggtattttatatttttagtcagaaaaaataatttttcatttcagttttccataaactgttacacaaaatataaacctaacgtgtatttttcaggactgcgtgatcgtgcactttgtgtggtaagaggtttgagtagtcctatatgtcacctagggaacagacattatagcttcctagcaaatgaatattcatgccttgtttttgatacctcctggcagcttccatgtcaccacttgttcatacctgcccagagctagttttagacatggcaaaatagaaatcatctgtaatttattagctaacaatgtaaaaccatcttttaaagccttcagactgtcaagacgacatgagcagctcaccatatgataaaaatacataaatttgacattccctcttccataaacctttgtttgtagatttaatgttgaacagtacttttccataaagttctagtcacttctgttggcctgagccaccagattatgatgttgccagaattcactcaatttgaataaagatgaacagtatttgttttcttgtttccatgaattatatcagtattctaaaacatcgcttcagaaagagaactgtttatttctgcaggcttcctgtccttttgtggtatggttttttggccttattttcactggcttttccttctccaaactttgaggcgtgatttcattcattgaagaatcaatacatattttgtttcaaaatgtttgaaacaaaagacatagatggtagacttttattaaaacatatatggatgtggaaagcacatatattaatgcagtcatcccttttcaggtgggaagagagcaaaccagttgattttttaattcatccttagtacacagagaatatacttttcctcaagtaatatacctgtttgaagctttaagagagatgtttttggtaactatttcattttcccaaagaagtttgctattcttgtgttaattgtgtatacctga

SEQ ID NO: 186730 - DNA, 1013 bp, Homo Sapiens
ctttgtacaaaaaagttgggaccggaaggcacccccaagagacggccaagctcttttcagtgccagactttgtaggtgatgcctgcaaagccatcgcatcccgggtgcggggggccgtggcctctgtcactttcgatgacttccataagaactcagcccgcatcattcgcactgctgtctttggctttgagacctcggaagcgaagggccccgatggcatggccctgcccaggccccgggaccaggctgtcttcccccaaaacgggctggtggtcagcagtgtggacgtgcagtcagtggagcctgtggatcagaggacccgggacgccctgcaacgcagcgtccagctggccatcgagatcaccaccaactcccaggaagcggcggccaagcatgaggctcagagactggagcaggaagcccgcggccggcttgagcggcagaagatcctggaccagtcagaagccgagaaagctcgcaaggaacttttggagctggaggctctgagcatggccgtggagagcaccgggactgccaaggcggaggccgagtcccgtgcggaggcagcccggattgagggagaagggtccgtgctgcaggccaagctaaaagcacaggccttggccattgaaacggaggctgagctccagagggtccagaaggtccgagagctggaactggtctatgcccgggcccagctggagctggaggtgagcaaggctcagcagctggctgaggtggaggtgaagaagttcaagcagatgacagaggccataggccccagcaccatcagggaccttgctgtggctgggcctgagatgcatgtaaaactgctccagtccctgggcctgaaatcaacccctcatcaccgatggctccactcccatcaacctcttcaacacagcctttgggctgctggggatggggccccgagggtcagcccctgggcagaaagggtggccagtgggcccagccctggggaggggatatccccccagtctgctcaggcccct

SEQ ID NO: 186731 - DNA, 1417 bp, Homo Sapiens
ttggcgcttcccggctctgccctcttggccgaagtgcccgctgccgggcgcgggcctcagacaatacaatggtgggtgaagagaagatgtctctaagaaaccggctgtcaaagtccagggaaaatcctgaggaagatgaagaccagagaaaccctgcaaaggagtccctagagacacctagtaatggtcgaattgacataaaacagttgatagcaaagaagataaagttgacagcagaggcagaggaattgaagccattttttatgaaggaagttggcagtcactttgatgattttgtgaccaatctcattgaaaagtcagcatcattagataatggtgggtgcgctctcacaaccttttctgttcttgaaggagagaaaaacaaccatagagcgaaggatttgagagcacctccagaacaaggaaagatttttattgcaaggcgctctctcttagatgaactgcttgaagtggaccacatcagaacaatatatcacatgtttattgccctcctcattctctttatcctcagcacacttgtagtagattacattgatgaaggaaggctggtgcttgagttcagcctcctgtcttatgcttttggcaaatttcctaccgttgtttggacctggtggatcatgttcctgtctacattttcagttccctattttctgtttcaacattgggccactggctatagcaagagttctcatccgctgatccgttctctcttccatggctttcttttcatgatcttccagattggagttctaggttttggaccaacatatgttgtgttagcatatacactgccaccagcttcccggttcatcattatattcgagcagattcgttttgtaatgaaggcccactcatttgtcagagagaacgtgcctcgggtactaaattcagctaaggagaaatcaagcactgttccaatacctacagtcaaccagtatttgtacttcttatttgctcctacccttatctaccgtgacagctatcccaggaatcccactgtaagatggggttatgtcgctatgaagtttgcacaggtctttggttgctttttctatgtgtactacatctttgaaaggctttgtgcccccttgtttcggaatatcaaacaggagcccttcagcgctcgtgttctggtcctatgtgtatttaactccatcttgccaggtgtgctgattctcttccttactttttttgcctttttgcactgctggctcaatgcctttgctgagatgttacgctttggtgacaggatgttctataagattggtggaactccacgtcatactccaactattatagaacctggaatgtggtggtccatgactggctatattactatgcttacaaggactttctctggtttttctccaagagattcaaatctgctgccatgtta

SEQ ID NO: 186732 - DNA, 959 bp, Homo Sapiens
actttgtacaaaaaagttggccatgactggctatattactatgcttacaaggactttctctggtttttctccaagagattcaaatctgctgccatgttagctgtctttgctgtatctgctgtagtacacgaatatgccttggctgtttgcttgagctttttctatcccgtgctcttcgtgctcttcatgttctttggaatggctttcaacttcattgtcaatgatagtcggaaaaagccgatttggaatgttctgatgtggacttctcttttcttgggcaatggagtcttactctgcttttattctcaagaatggtatgcacgtcagcactgtcctctgaaaaatcccacatttttggattatgtccggccacgttcctggacttgtcgttacgtgttttagaagcttggactttgtttcctccttgtcactgaagattgggtagctccctgatttggagccagctgtttccagttgttactgaagttatctgtgttatttggaccactccaggctttacagatgactcactccattcctaggtcacttgaagccaaactgttggaagttcactggagtcttgtacacttaagcagagcagaactttttttgtggggctgggtggggggagaagaccgactaacagctgaagtaatgacagattgttgctgggtcatatcagctttatcccttggtaattatatctgttttgtttcttgactctgtccaatcagagaataaacatcatagtttcttggccactgaattagccaaaacacttaggaagaatcacttaaatacctctggcttagaaattttttcatgcacactgttggaatgtatgctaattgaacatgcaattgggggaaaaaaaatgtagaatgatttttgctatttctagtaaaaaaaaatgtctgttttccaagataatgttatacatcctattttgtaattttttt

SEQ ID NO: 186733 - DNA, 1790 bp, Homo Sapiens
  misc_feature (1553)..(1577): n is a, c, g, or t
ttgggtctgcggtcgttccctcggctgtggaccgggcggcacgcacgcggtgcagggtaacatggcggatgcggaagtaattattttgccaaagaaacataagaagaaaaaggagcggaagtcattgccagaagaagatgtagccgaaatacaacacgctgaagaatttcttatcaaacctgaatccaaagttgctaagttggacacgtctcagtggccccttttgctaaagaattttgataagctgaatgtaaggacaacacactatacacctcttgcatgtggttcaaatcctctgaagagagagattggggactatatcaggacaggtttcattaatcttgacaagccctctaacccctcttcccatgaggtggtagcctggattcgacggatacttcgggtggagaagacagggcacagtggtactctggatcccaaggtgactggttgtttaatcgtgtgcatagaacgagccactcgcttggtgaagtcacaacagagtgcaggcaaagagtatgtggggattgtccggctgcacaatgctattgaaggggggacccagctttctagggccctagaaactctgacaggtgccttattccagcgacccccacttattgctgcagtaaagaggcagctccgagtgaggaccatctacgagagcaaaatgattgaatacgatcctgaaagaagattaggaatcttttgggtgagttgtgaggctggcacctacattcggacattatgtgtgcaccttggtttgttattgggagttggtggtcagatgcaggagcttcggagggttcgttctggagtcatgagtgaaaaggaccacatggtgacaatgcatgatgtgcttgatgctcagtggctgtatgataaccacaaggatgagagttacctgcggcgagttgtttaccctttggaaaagctgttgacatctcataaacggctggttatgaaagacagtgcagtaaatgccatctgctatggggccaagattatgcttccaggtgttcttcgatatgaggacggcattgaggtcaatcaggagattgtggttatcaccaccaaaggagaagcaatctgcatggctattgcattaatgaccacagcggtcatctctacctgcgaccatggtatagtagccaagatcaagagagtgatcatggagagagacacttaccctcggaagtggggtttaggtccaaaggcaagtcagaagaagctgatgatcaagcagggccttctggacaagcatgggaagcccacagacagcacacctgccacctggaagcaggagtatgttgactacagtgagtctgccaaaaaagaggtggttgctgaagtggtaaaagccccgcaggtagttgccgaagcagcaaaaactgcgaagcggaagcgagagagtgagagtgaaagtgacgagactcctccagcagctcctcagttgatcaagaaggaaaagaagaagagtaagaaggacaagaaggccaaagctggtctggagagcggggccgagcctggagatggggacagtgatatcaccnnnnnnnnnnnnnnnnnnnnnnnnncaaaagaggtagaattggtttctgagtagtgaagaccacttgaagctggaggagaaactaaagccttattgagaaaacatgttatagatccttttgttgctgagagagtggaacatagtcctagacagggtgaagagttctggcacattttagctgctactttgagacctcggtgatgttacctggtgtggtcatcccatcttgtcctgtttt

SEQ ID NO: 186734 - DNA, 1375 bp, Homo Sapiens
ttggaaaaagaagaacctttgaattctaacggctgagctcttggaagacttgggtccttgggtcgcaggtgggagccgacgggcatcatggaccgatctaaagaaaactgcatttcaggacctgttaaggctacagctccagttggaggtccaaaacgtgttctcgtgactcagcaatttccttgtcagaatccattacctgtaaatagtggccaggctcagcgggtcttgtgtccttcaaattcttcccagcgcgttcctttgcaagcacaaaagcttgtctccagtcacaagccggttcagaatcagaagcagaagcaattgcaggcaaccagtgtacctcatcctgtctccaggccactgaataacacccaaaagagcaagcagcccctgccatcggcacctgaaaataatcctgaggaggaactggcatcaaaacagaaaaatgaagaatcaaaaaagaggcagtgggctttggaagactttgaaattggtcgccctctgggtaaaggaaagtttggtaatgtttatttggcaagagaaaagcaaagcaagtttattctggctcttaaagtgttatttaaagctcagctggagaaagccggagtggagcatcagctcagaagagaagtagaaatacagtcccaccttcggcatcctaatattcttagactgtatggttatttccatgatgctaccagagtctacctaattctggaatatgcaccacttggaacagtttatagagaacttcagaaactttcaaagtttgatgagcagagaactgctacttatataacagaattggcaaatgccctgtcttactgtcattcgaagagagttattcatagagacattaagccagagaacttacttcttggatcagctggagagcttaaaattgcagattttgggtggtcagtacatgctccatcttccaggaggaccactctctgtggcaccctggactacctgccccctgaaatgattgaaggtcggatgcatgatgagaaggtggatctctggagccttggagttctttgctatgaatttttagttgggaagcctccttttgaggcaaacacataccaagagacctacaaaagaatatcacgggttgaattcacattccctgactttgtaacagagggagccagggacctcatttcaagactgttgaagcataatcccagccagaggcaatgctcagagaagtacttgaacacccctggatcacagcaaattcatcaaaaccatcaaattgccaaaacaaagaatcagctagcaaacagtcttaggaatcgtgcaggggggagaatccttgagccagggctgccatataacctgacaggaacatgctactgaagtttatttt

SEQ ID NO: 186735 - DNA, 2801 bp, Homo Sapiens
  misc_feature (190)..(202): n is a, c, g, or t
  misc_feature (2428)..(2442): n is a, c, g, or t
ttggctactgtatccagctatctttcttggatccttttggtcattatttcagtgtgcataagttcttaatgtcaaccatctttaaggtattgtgcatcgacactaaaaactgatcagtgtaaaaaggaaaacccagttgcaagtttaaacgtgttcgaaagtctgaaaatagaacttgccttttaagttnnnnnnnnnnnnngctatcttgaaaatgttttggaactgcgataactgagaaactcttaccagtccacatgcaattagacatattcagcatatttgttattttaaaagggagggttgggaggtttcttattggtgattgtcacacggtataccatactcctctccttcaaagaatgaaaggccttgttaaggagttttttgtgagctttacttctttggaatggaatatacttatgcaaaaccttgtgaactgactccttgcactaacgcgagtttgccccacctactctgtaatttgcttgtttgttttgaatatacagagccttgatccagaagccagaggatggactaagtgggagaaattagaaaacaaaacgaactctggttggggtactacgatcacagacacagacatacttttcctaaagttgaagcatttgttcccaggatttattttactttgcatttctttttgcacaaagaacacatcaccttcctgaattctttaaatatgaaatatcattgccagggtatggcttacagtgactactattataatactaaaactcagagaatcaaagatggattaaactcagtggttgatgaaagccaaaacctgtttgtactgttctatactattcaggtatctttttatttctgatagttttatattataatagaaagccagccactgcttagctatcatagtcaccattttctcactgttaacattaggaaaatcaaggctactatgcttcaggattgtctggttaaatagtatgggaaaaaaactgaagagtttcacataattacacacgtgaaataattaaagcttaaactgaatttgtatttcattttattgtcagatggtggtgttcaccagcctgtatcttgtctgagactgcattcgtatctgagcaggttttctatgcctactgatgtcagtatgtttatactaaccttcatgcttttttcccagaatccctcatctgccagaaaacttgaaaagtttattgcttgtagagttgtactgctttgatttttgaagttggggtagtagttagaactagatttaactagtctataatgaacatgaaggcttttatatatgaagttgtatacctttttgtgtttagagaattatgggaaacctggtaagcaaactttcctcccagataattgcttccaaattcgaagagttagtcaccaagagagccatatgtatgaaagcgtatctgtgaaaggtaggaaacttaccccccctaagtgtaatgttgctttaggcaactcttgtaaatagtgagacttgtttggtctcttacatgtagagatttgagtgcagttggtacagtactttggtgtctccaccactgtcccttctccccgcttcaaaataagtgtaatccacggtagcagccacacttccttcagaaggaactgttataatttatttaaaagttgaaaaaccacccaagatgactaccaactttcacttttttcttctgccatccaccctcatttttcctttagcaagatttttatatctaactttccttccctccattgagtacgtgctttgagaaaacatttcttaaaacagtgtgtgccacctaaggctggatgggaaagtgcagtcttgttgttcatataaaaacacacttcttattagtttaccacttgcctttttctattgttaatgttctgaatttccttttcttggcttgtttctacttcattttaccctgggtcacttgctgccagcagtttgtgaatggtgtctttcaaataacttagttcttatggcttcacttaaagactgtctcaaaaatactttgctctcttcttcttttttgttcatgggacatggtacctaagcaaataggagttgggtttggtttttctcctaaaataatgctcaatacttacctaatcaaatggcatccatttgaataaaatgacaataactaaagctagttaatgtcagtgacattaaactaactccaggattcaggagttttaatgttagaatttagatttaacagatagagtgtggcttcatttgtccatggtagcccatctctcctaagaccttttctagtctgtcttcctgccttcgaacttgatgacagtaaaaccctgtttagtattctcttgtgcatttggtttgttggttagccgactgtcttgaaactattcattttgcttctagttttattttacagaggtagcattggtgggnnnnnnnnnnnnnnnctgtctctgtgtttgaagtttcagtttctgttttctaggtaaggcttatttttgattagcagtcaatggcaaagaaaaagtaaatcaaagatgacttcttttcaaaatgtattgtttagcacttaactcagatgaatttataaattattaatcttgatactaaggatttgttacttttttgcatattaggttaatttttaccttacatgtgagagtcttaccactaagccattctgtctctgtactgttgggaagttttggaaacccctgccagtgatctggtgatgatctgatgatttatttaaagagccgttgatgcctccaggaaacttaagtattttattatatatatataggaa

SEQ ID NO: 186736 - DNA, 1218 bp, Homo Sapiens
tatacaaaaaagttgggaagtatgtcagaaatgatcagaacaaaagaaaatttctattttcatgcaaatatttttcatcagtcatcactctcaaatataaattaaaatataacactcctgaatgcctgaggcacgatctggattttaaatgtgtggtattcattgaaaagaagctctccacccacttggtatttcaagaaaatttaaaacgatcccaaggaaagatgatttgtatgttaaagtgactgcacaagtaaaagtccaatgttgtgtgcatgaaaaggattccttggttatgtgcagggaatcatctcacatgctgtttttcctatttggtttgagaaacaggctgacactattctctttgattagaaaataaactcataaaactcataatgttgatataatcaagatgtaaccactataaatatgtagaagaggaagttttaaaagaccttaagctggcattgtgaaggaacaccatggtagactctttttgtaaatgtattttgtatttaatgaaatgcagtataaaggttggtgaagtgtaatataattgtgtaaacaaatcctgttaatagagagatgtacagaatcgttttgtactgtatcttgaaacttgtgaaataaagattccacctctggttatcctgtatgctgtaatataccacaaccaagcacctttccagacagactttttttaagctgaatgattcaattttttaatgttttttggaaattcagaagcttctgaaaacattcacttgtggcaatttgaatttatctttcattttaaactcctgaaattcagatttttacaagtccaatattgccctagggagaacatgaatttgctaagaaatgttatcttttaaatctctgatatctttgtcttgaagcagccttgatatgtagtaagcgtgattcactttagcctgattataatattatttatctaaagtttgtttatgcattgccttgtcccaggaattttttaagaggacttgcagagacacgtaccacacagtaacatttagactaaatatgctctgagtaaaggagaaatgaaaaaatattaaatcaagagtgaacatgtacacaaagtgcaattggaagtgggctacaaatttgggctctcagcttctcagcagctactcaaagaggtaactgagtaaatgttccagctcagaagcattggatcttggataaaaagcctac

SEQ ID NO: 186737 - DNA, 1645 bp, Homo Sapiens
  misc_feature (82)..(110): n is a, c, g, or t
  misc_feature (683)..(693): n is a, c, g, or t
  misc_feature (917)..(929): n is a, c, g, or t
ttgggctattataaattagtagcttaattcctcagacacattattttgagcttcagttgaaggcttttaaaaccgctttaannnnnnnnnnnnnnnnnnnnnnnnnnnnnttgcaaaacgtttttaaaacaaattattttaatttctgtacttacttctggtgatgtaactttcccagttccttgcctgacattttagtgataataatggtttctatattattttcattaagattcgagatatgttcacccaacttgatatggaccagcttttgggacctgagtgggacctttacctcatgaccatcattgcgctgctgttgggaacagtcatagcttacaggcaaaggcagcaccaagacatgcctgcacccaggcctccagggccacggccagctccaccccagcaggaggggccaccagagcagcagccaccacagtaataggcactgggtccagccttgatcagtgacagcgaaggaagttatctgctgggaacacttgcatttgatttaggaccttggatcagtggtcacctcccagaagaggcacggcacaaggaagcattgaattcctaaagctgcttagaatctgatgcctttattttcagggataagtaactcttacctaaactgagctgaatgtttgtttcagtgccatatggaataacaactttcagtggcnnnnnnnnnnncttttctggaaacatatgtgagacactcagagtaatgtctactgtatccagctatctttcttggatccttttggtcattatttcagtgtgcataagttcttaatgtcaaccatctttaaggtattgtgcatcgacactaaaaactgatcagtgtaaaaaggaaaacccagttgcaagtttaaacgtgttcgaaagtctgaaaatagaacttgccttttaagttnnnnnnnnnnnnngctatcttgaaaatgttttggaactgcgataactgagaaactcttaccagtccacatgcaattagacatattcagcatatttgttattttaaaagggagggttgggaggtttcttattggtgattgtcacacggtataccatactcctctccttcaaagaatgaaaggccttgttaaggagttttttgtgagctttacttctttggaatggaatatacttatgcaaaaccttgtgaactgactccttgcactaacgcgagtttgccccacctactctgtaatttgcttgtttgttttgaatatacagagccttgatccagaagccagaggatggactaagtgggagaaattagaaaacaaaacgaactctggttggggtactacgatcacagacacagacatacttttcctaaagttgaagcatttgttcccaggatttattttactttgcatttctttttgcacaaagaacacatcaccttcctgaattctttaaatatgaaatatcattgccagggtatggcttacagtgactactattataatactaaaactcagagaatcaaagatggattaaactcagtggttgatgaaagccaaaacctgtttgtactgttctatactattcaagtatctttttattttctgatagttttatattataatagaaagccagccactgcttagctatcatagtcaccaattttctcactgtt

SEQ ID NO: 186738 - DNA, 2053 bp, Homo Sapiens
  misc_feature (132)..(146): n is a, c, g, or t
  misc_feature (507)..(520): n is a, c, g, or t
  misc_feature (1519)..(1557): n is a, c, g, or t
ttggcttcgaacttgatgacagtaaaaccctgtttagtattctcttgtgcatttggtttgttggttagccgactgtcttgaaactattcattttgcttctagttttattttacagaggtagcattggtgggnnnnnnnnnnnnnnnctgtctctgtgtttgaagtttcagtttctgttttctaggtaaggcttatttttgattagcagtcaatggcaaagaaaaagtaaatcaaagatgacttcttttcaaaatgtattgtttagcacttaactcaaatgaatttataaattattaatcttgatactaaggatttgttacttttttgcatattaggttaatttttaccttacatgtgagagtcttaccactaagccattctgtctctgtactgttgggaagttttggaaacccctgccagtgatctggtgatgatctgatgatttatttaaagagccgttgatgcctccaggaaacttaagtattttattaatatatatataggaannnnnnnnnnnnnngctttgtctttctctcccttcttttatcctcatgttcattcttcaaaccagtgttttggaagtatgcatgcaggcctataaatgaaaaacacaattctttatgtgtatagcatgtgtattaatgtctaactacatacgcaaaaacttcctttacagaggttcggactaacatttcacatgcacatttcaaaacaagatgtgtcatgaaaacagcccctttacctgccaagacaagcagggctatatttcagtgacagctgatatttgttttgaaagtgaatctcataatatatatatgtattacacattattatgactagaagtatgtaagaaatgatcagaacaaaagaaaatttctattttcatgcaaatatttttcatcagtcatcactctcaaatataaattaaaatataacactcctgaatgcctgaggcacgatctggattttaaatgtgtggtattcattgaaaagaagctctccacccacttggtatttcaagaaaatttaaaacgatcccaaggaaagatgatttgtatgttaaagtgactgcacaagtaaaagtccaatgttgtgtgcatgaaaaggattccttggttatgtgcagggaatcatctcacatgctgtttttcctatttggtttgagaaacaggctgacactattctctttgattagaaaataaactcataaaactcataatgttgatataatcaagatgtaaccactataaatatgtagaagaggaagttttaaaagaccttaagctggcattgtgaaggaacaccatggtagactctttttgtaaatgtattttgtatttaatgaaatgcagtataaaggttggtgaagtgtaatataattgtgtaaacaaatcctgttaatagagagatgtacagaatcgttttgtactgtatcttgaaacttgtgaaataaagattccacctctggttatcctgtatgctgtaatataccacaaccaagcacctttccagacagacnnnnnnnnnnnnnnnnnnnnnnnnnnnnnnnnnnnnnnnggaaattcagaagcttctgaaaacattcacttgtggcaatttgaatttatctttcattttaaactcctgaaattcagatttttacaagtccaatattgccctagggagaacatgaatttgctaagaaatgttatcttttaaatctctgatatctttgtcttgaagcagccttgatatgtagtaagcgtgattcactttagcctgattataatattatttatctaaagtttgtttatgcattgccttgtcccaggaattttttaagaggacttgcagagacacgtaccacacagtaacatttagactaaatatgctctgagtaaaggagaaatgaaaaaatattaaatcaagagtgaacatgtacacaaagtgcatttggaagtgggctacaaatttggcccccagcttcccagcggcaactcaaagaggtaactgaggtaaaatgttccagctcagaagcattggatcttggataaaagcctacatgatgcaactg

SEQ ID NO: 186739 - DNA, 2406 bp, Homo Sapiens
tctggctggaaaaggtggttcacagacgagttctggggctcaggcggcccgtcatatagacctttccacaggggagggcagaagcaacaggcgggtcccaggagaccccagcaggtcctccaccgtccagccttcacagcaccgggcagaatttacacagagaggatcagtctcaagccaaagtcaggtggaggcatggtggtggtggtagagaaacgctgggctggcttccagctagaagccaggctggaggcaggaaggctcagtcgtctgtttcctgcttgatgttctcgacggagacaggcagctctggacttgaagccttgtcgggcgaggccacgtctagatgctcttccttcacacgcacagcaatgatctcgccaggaacaggctccgacgagatcttcctggcaccctgagggtcgtcctccagcaggggcttcttggacccctgtctgaggggtcgcgtcttagtgggcgggattcttttccttttcttcccaaactgtttctttttcttctttgtggcctctttggccttcagcggtgtggccggttctgcggccacaggaggctggagctggtagccggtgagctcacaccagccgacggggtagatgtctggggactcgcagtccacccactggtcgtactcgctgtcccagccgtcaaagtggatgctgaggagccgatgcaccactcgtttcaccgtggccacacagatgagccggggctccatcaggtccacggcctccagcttcatgcccaccttgaagccatggtttgggcaatccatgttaaagagtctcgatggagcggctttcgacttggtcttctccaagtagttctcccagttgaaagtctgtgcctcataaccttttggcggtgtgagctcaatgtcattcttctgacagaaggtggccgggaagatggcgtgggaagaggcatggtagcagaaccagtccaagccatctgtggagggccccccgtccacacagatcatcaggtatccatccaggagaaccttacagacagttgccacgcagatgttgcccagattcagggggtcaatggcctccagcttcatcccttcctcaaaccaaccgccttctgtgtagactgctcgtaccttcttgaagaggtaaggaacggcatcacagtagatcttccggaaggtggggtgatgggccatgtcacttcgcctctctgacatcttgatgccgtggcccacacgtcgtgaccaacccactgggtggatcagggggctccacatgtggcaccagaagtcgtcgtcactgtcaccatcctcgtagaggagccgtaggcgacccccgattactgtgtccaccacagccatgcgagtgcgtgacacctgggacttgtccaccacttccagccgcatgccctgcctaaaggggtacttcatgctctccaccatcttgatgtggaaatccacgggaagcgtcctggagcccaccagccgtttcatgaggtagcccttccagtcggtgaacttggcatggatggtccgtgggggcactaggatcttgctgttgatggcacaccagccaatggggtggacatccactgttcccaggttgcaccagaagtcatggctggcgtcattttcaaagccttcataccgaagcagcacccgataccctgctgtctggatgacagaggcgatccagtacacccggctggggagcacagcatcactgttgagcacctccaccttcatccctttcatcacatcctcccactggtcatagagtgggacgtgcttgaaacagctgacaggagcagccttgtaactgtgatccttcaggaacttcccccagtcgaagcccaagaccagagcgtcttgtcctgttggtgtcccatctgccagctgtcctgtcccttgagagtggaggaaggctccaattttggcagaccaggcagccttgtgcaggactttggcttttttggtcggtggttttccctgtaacctagccaagatactggctttcttggagttggaggagtagctcctggagcaggagacgctgcagaacctcttggtcttggagaagaaggcttcccttgtacccacgataccacacatctcacagacagctggctcagaaccactgccatccaaggagcgaggagtcccagggctgagcaaatgcagcggggaggtcggcagttcccctgcttcccgatcctcattttctgcttcacttgactcctccagataggagctgctctcactgcccacactgctgttataactccggaaactatcatagccaccaaacagctccaagtcgtcatcttcctcttcctccattggttctgaagatggggtctcctcaatactccggggcttctccatgagacctcagtttcgccaagcgccaa

SEQ ID NO: 186740 - DNA, 1676 bp, Homo Sapiens
tttgtacaaaaaagttggcccaactgggagatgaggaaacagcaacccagagaggagaactaacccacacaggatcatttcgcgaaggagcaaggctgaagaaccagacctggactttcttaggacaaacttactgcagcttgaaggagccaaccatggatttgaggcgtgtgaaggaatatttctcctggctctactatcaataccaaatcattagctgctgtgctgttttagagccctgggagcgatctatgtttaacaccatcttactaaccattattgctatggtggtatacactgcctatgtctttattccaatccacattcgcctggcttgggaatttttctcaaaaatatgtggatatcacagtacaatttctaattgatcctgttcacattcagtgaaatggcattgcatatttatatgttgcttacagcttattgatttaggtaactattgtgtcttccttcactatctgacctgaaaagcactctcttctctatgcactcttatattctgcctttctgcctggagtttgaaatacatgtctctttagtttcttttgcacatgctacattgtgctttagaccggagataatacagtgactttacctcacaaatcatattctgtcaacacaaatctatgaatttagtttatttaaaatcagaacaatttcctacaaaatttttctggaaaatagactcctaacagacctaccagaatcatgcttaaagtgctcccttgacacttattctatactgaaggataaattttaaaaaatctttataggctactgtcagaagtatcctatccttgtttacgatgtataaaaagatgtgaataaattatatggaccccctaagtcttattttctagtaaactgatgatactggaaattcttttacttcaaatgcaaaagaataagctggaggcaattatttcctttcatacagagttcatgaattgttttaaatgcttcttaaagtctggctttataaccgtttaaaatcaacaatgttgattttagataaccaagtaagtattataatacaaaataattttaagtgtaagaaactaaagtataatcaaagtaaattcagttattgtatttgtggtgttgccttgccttgcatgatgctgggggaaaaagagaaaagaaatggttttctttttgtactttcattcagtgtagagggaaaaaagcatgtattgggccaccggaagacaagctaataaataggctggaagtaatattctaccagcaggaactcaacagctccagttaaatgctttgatatagtggctcctttgcagagccaaaacaagatttattaaatttccttcaaactgtttatctttaaaacaaatataaggttttaattatactgctgaagcaaatgtgaatgccaaagactacgttttgcagttttgctttcctcccaataaatattaatgtatgtaattctagagggtaaaaatgtaaataggtttggacaatatttgcacccttgtttgtgttatgaaaaaaatttttccaaggtgagctagagagaaagatgtttggcatgccaaattaacttgcatgtttgttaaaaaacaaacacatgttttgaagagaaaccagatctgaacatgtatttgttgagttttgcaaataaaattaattttgtaagt

SEQ ID NO: 186741 - DNA, 1151 bp, Homo Sapiens
gagcaatgcttcctttaaaatagccaactttgtacaaaaaacatctacctcttcctcctcagaggacagtgacactgatgaaagctcctctagttcctcatcctcagcctcctccacaacctcttcctcctcctctgattcagactcagattccagctcttccagtagcagtagcaccagcacagatagcagctctgacgatgaaccaccaaagaagaagaaaaagaaatagagttgctccattcatattggaccgatggactgaaaacattgatgtgattcttgaaagggaatttagaatatgttaaggccaagtaggttaactggtgaacatttctagaattcaaaagtttctaaatgttttacattgtaagagcatagagaatattaataatggcttatagagagagacttttatttgaagggtgaatcttgttttttttatctttaaaatatatctctagaacttaaagctgaaatctgcaaatctgtttgtgtgatgaaactatcttttctctctgtgaaataaatgccatactttgttatatatgttagtggtatgtatcagacatattttcaggatggtgcgtcaggatatctggcagtggatttctaatgcttttggctgtatgttatgtaagatttaatatgttgttactgtaagcttaggagttttcctactattaataaatgtgctctatttttacatttatgttcagaaagttatctgactttttgtcctaagtggtatgttcaaggagcctattaatatatttatagtttttgaatgctgtaagtttcaaattgctgtgttacgtcattcattttcttctggttccttaagtttttcaagttatccttttctgaggaaaattattctagaggaacctaaaaagggacaaaaaaattgaaacttcttagagtctaatcttggtgccttctgttaaagtcagtgtatcagaaaagaaagcagccatgtaagaggctaacttaagtagaagtgctagaaatatctttgtgtattaacatgcaataaaagtaccattcaaagcaggggaaaggtaggaagagaggtaatttttactgaaataagggcaatgttggtcaccttttattaaaagctttttttaagctttcataagatgcttttt

SEQ ID NO: 186742 - DNA, 784 bp, Homo Sapiens
ttggcgactcccatgcatcggctaatagcccggagacaagctgaagcaaataagcaacatgtaagatgtcagaaatgcttggaatttggacattggacttatgaatgcacaggaaaaagaaaatacctacataggccctcaaggacagcagaactaaagaaagctttaaaagaaaaagaaaacagattattattgcaacaaagcattggagaaaccaatgtagaaagaaaggccaagaaaaaaaggtctaagagtgtaaccagttccagtagcagtagcagtgacagttctgccagtgattcttcatcagagagtgaagaaacatctacctcttcctcctcagaggacagtgacactgatgaaagctcctctagttcctcatcctcagcctcctccacaacctcttcctcctcctctgattcagactcagattccagctcttccagtagcagtagcaccagcacagatagcagctctgacgatgaaccaccaaagaagaagaaaaagaaatagagttgctccattcatattggactgatggactgaaaacattgatgtgattcttgaaagggaatttagaatatgttaaggccaagtaggttaactggtgaacatttctagaattcaaaagtttctaaatgttttacattgtaagagcatagagaatattaataatggcttatagagagagacttttatttgatggtgaatcttgttttttttatctttaaaatatatctctagaacttaaagctgaaatctgcaaatctgtttgtgtgatgaa

SEQ ID NO: 186743 - DNA, 1463 bp, Homo Sapiens
gaagtaactatcaggaagcttagcctactgtggattaagacatcaaaattgcagcaggctttaacaaagctatactactacaaggatagttcacacttgaattagcttgaaacattacctatccatgtcatcttggaaagcagaaaatggaactttattggagtgggacactggatggccagggtttagcagagcctgcccaacaaaagtagcttcagaattggctttattctcaggaaggctcttcctggacagtggcaaacatagccatagcaaatactggctcactttctatcagccagcaaccctggtggaaagagggcctcttactcagttgtaccagcaagctgtctccaggagccggggctggagagacacccagtgctgctctaggccagtgtggctgagggtctgtctagtctgtccttgtactcacggcttccttttctcttgcagacgcccactattgcttggttctacttcctttatcccgattggccgtcggacttatgccagtgcggcggagccggttggcagcaaagctgtcctggtcacaggctgtgactctggatttgggttctcattggccaagcatctgcattcaaaaggcttccttgtgtttgctggctgcttgatgaaggacaaaggccatgatggggtcaaggagctggacagcctaaacagtgaccgattgagaaccgtccagctcaatgtctgcagcagcgaagaggtggagaaagtggtggagattgtccgctcgagcctgaaagaccctgagaaaggcatgtggggcctcgttaacaatgccggcatctcaacgttcggggaggtggagttcaccagcctggagacctacaagcaggtggcagaagtgaacctttggggcacagtgcggatgacgaaatcctttctccccctcatccgaagggccaaaggccgcgtcgtcaatatcagcagcatgctgggccgcatggccaacccggcccgctccccgtactgcatcaccaagttcggggtagaggctttctcggactgcctgcgctatgagatgtaccccctgggcgtgaaggtcagcgtggtggagcccggcaacttcatcgctgccaccagcctttacagccctgagagcattcaggccatcgccaagaagatgtgggaggagctgcctgaggtcgtgcgcaaggactacggcaagaagtactttgatgaaaagatcgccaagatggagacctactgcagcagtggctccacagacacgtcccctgtcatcgatgctgtcacacacgccctgaccgccaccaccccctacacccgctaccaccccatggactactactggtggctgcgaatgcagatcatgacccacttgcctggagccatctccgacatgatctacatccgctgaagagtctcgctgtggcctctgtcatggatccctggtggaaggggaggggagggaggaa

SEQ ID NO: 186744 - DNA, 1369 bp, Homo Sapiens
ttgggttcaggatccacaatcggaatggaaagagttacctgttcctactgtcctcggactacgagaggtcagagtggagagaagcaattcagaaactacagaagaaggatctccaggcctttgtcctgagctcagtggagctccaggtgctcacaggatcctgtttcaagcttaggactgtacacaacattcctgtcaccagcaataaagacgacgatgagtctccaggactctatggcttccttcatgtcatcgtccactctgccaagggatttaagcaatcagccaacctgtactgtaccctggaggtggattccttcggctattttgtcagcaaagccaaaaccagggtgttccgggacacagcggagcccaagtgggatgaggagtttgagatcgagctggagggctcccagtccctgaggatcctgtgctatgagaagtgctatgacaagaccaaggtcaacaaggacaacaatgagatcgtggacaagatcatgggcaaaggacagatccagctggacccacaaaccgtggagaccaagaactggcacacggacgtgattgagatgaacgggatcaaagtggaattttccatgaaattcaccagccgagatatgagcctgaagaggaccccgtccaaaaagcagaccggcgtcttcggtgtgaagatcagcgtggtgacgaagcgggagcgctccaaggtgccctacatcgtccggcagtgtgtggaggaggtggagaagaggggtatcgaggaggttggcatctacaggatatcgggcgtggccacggacatccaggcgctcaaggccgtcttcgatgccaataacaaggacatcctgctgatgctgagtgacatggacatcaacgccatcgccgggacgctcaagctgtacttccgggaactgcccgagccgctcctcacggaccgactctacccagccttcatggagggcatcgccctgtcagaccctgctgccaaggaaaactgcatgatgcacctgctccgctccctgcccgaccccaacctcatcaccttcctcttcctgctggaacacttgaaaagggttgccgagaaggagcccatcaacaaaatgtcacttcacaacctggctaccgtgtttggacccacgttactgagaccctcagaagtggagagcaaagcacacctcacctcggctgcggacatctggtcccatgacgtcatggcgcacgtccaggtcctcctctactacctgcagcacccccccatttccttcgcagaactcaagcggaacacactgtacttctccaccgacgtgtagcccgaggcaggtggctgcgggcgggtggtggaaccagcctcctccagcctggggtccaactc

SEQ ID NO: 186745 - DNA, 1163 bp, Homo Sapiens
  misc_feature (1012)..(1028): n is a, c, g, or t
ttggcacagaatctttcctgaccagccagtgggtctcctacaccattgattttaaagatatccttgaaaggaactgtgaagagaaggactataccatatggctggcacactccacagaccctgaagattatgaagatggctgcattttgggctacaaagaacagtttctgcggctacgcaagtcatccgtgtgtcagaatggtcgagactatgttgtgaccaagcagccctccatctgcctctgttccctggaggactttctctgtgattttggctactaccgtccagaaaatgactccaagtgtgtggaacagccagaactgaagggccacgacctggagttttgtctgtacggaagagaagaacacctaacaacaaatgggtaccggaaaattccaggggacaaatgccagggtggggtaaatccagttcgagaagtaaaagacttgaaaaagaaatgcacaagcaactttttgagtccggaaaaacagaattccaagtcaaattctgttccaattatcctggccatcgtgggattgatgctggtcacagtcgtagcaggagtgctcattgtgaagaaatatgtctgtgggggaaggttcctggtgcatcgatactctgtgctgcagcagcatgcagaggccaatggtgtggatggtgtggatgctttggacacagcctcccacactaataaaagtggttatcatgatgactcagatgaggacctcttggaatagctcttcagaggagctggacccagcatggatggtggaaccacagtacctcttacactccctgtggctccaacttcaggaaataaatttcccattgcgagggacccagctctgtttctgctgcttccatcaaagccaaaaggacctacactaaagaaatgcagggtgggggtggggaaccctgagcacttttttacaattggctctgagaaaaagggagacattttaaattctttaacttcttatttctcgtcctgtctctttgcaaagtatgggcnnnnnnnnnnnnnnnnnaagggaaacgaaaatggaattcgaagggaccttttcactaaccccacttctgtgtgttctgcatggtgcctgccccaagggcatctgccaactccagtatcagctctcacagtgtacttggtaccattccctggg

SEQ ID NO: 186746 - DNA, 2316 bp, Homo Sapiens
  misc_feature (1862)..(1945): n is a, c, g, or t
ttggcccagcacctgcggagggagcgctgaccatggctccctggcctgaattgggagatgcccagcccaaccccgataagtacctcgaaggggccgcaggtcagcagcccactgcccctgataaaagcaaagagaccaacaaaaataacactgaggcacctgtaaccaagattgaacttctgccgtcctactccacggctacactgatagatgagcccactgaggtggatgacccctggaacctacccactcttcaggactcggggatcaagtggtcagagagagacaccaaagggaagattctctgtttcttccaagggattgggagattgattttacttctcggatttctctactttttcgtgtgctccctggatattcttagtagcgccttccagctggttggaggaaaaatggcaggacagttcttcagcaacagctctattatgtccaaccctttgttggggctggtgatcggggtgctggtgaccgtcttggtgcagagctccagcacctcaacgtccatcgttgtcagcatggtgtcctcttcattgctcactgttcgggctgccatccccattatcatgggggccaacattggaacgtcaatcaccaacactattgttggctcatgcaggtgggagatcggagtgagttcagaagagcttttgcaggagccactgtccatgacttcttcaactggctgtccgtgttggtgctcttgcccgtggaggtggccacccattacctcgagatcataacccagcttatagtggagagcttccacttcaagaatggagaagatgccccagatcttctgaaagtcatcactaagcccttcacaaagctcattgtccagctggataaaaaagttatcagccaaattgcaatgaacgatgaaaaagcgaaaaacaagagtcttgtcaagatttggtgcaaaacttttaccaacaagacccagattaacgtcactgttccctcgactgctaactgcacctccccttccctctgttggacggatggcatccaaaactggaccatgaagaatgtgacctacaaggagaacatcgccaaatgccagcatatctttgtgaatttccacctcccggatcttgctgtgggcaccatcttgctcatactctccctgctggtcctctgtggttgcctgatcatgattgtcaagatcctgggctctgtgctcaaggggcaggtcgccactgtcatcaagaagaccatcaacactgatttcccctttccctttgcatggttgactggctacctggccatcctcgtcggggcaggcatgaccttcatcgtacagagcagctctgtgttcacgtcggccttgacccccctgattggaatcggcgtgataaccattgagagggcttatccactcacgctgggctccaacatcggcaccaccaccaccgccatcctggccgccttagccagccctggcaatgcattgaggagttcactccagatcgccctgtgccactttttcttcaacatctccggcatcttgctgtggtacccgatcccgttcactcgcctgcccatccgcatggccaaggggctgggcaacatctctgccaagtatcgctggttcgccgtcttctacctgatcatcttcttcttcctgatcccgctgacggtgtttggcctctcgctggccggctggcgggtgctggttggtgtcggggttcccgtcgtcttcatcatcatcctggtactgtgcctccgactcctgcagtctcgctgcccacgcgtcctgccgaagaaactccagaactggaacttcctgccgctgtggatgcgctcgctgaagccctgggatgccgtcgtctccaagttcaccnnnnnnnnnnnnnnnnnnnnnnnnnnnnnnnnnnnnnnnnnnnnnnnnnnnnnnnnnnnnnnnnnnnnnnnnnnnnnnnnnnnncgctgcagcaagtgctgcgaggacttggaggaggcgcaggaggggcaggatgtccctgtcaaggctcctgagacctttgataacataaccattagcagagaggctcagggtgaggtccctgcctcggactcaaagaccgaatgcacggccttgtaggggacgccccagattgtcagggatggggggatggtccttgagttttgcatgctctcctccctcccacttctgcaccctttcaccacctcgaggagatttgctccccattagcgaatgaaattgatgcagtcctacctaactcgattccctttggcttggtgggtaggcctgcaaggcacttttattccaacccctggtcactcagtaatctttta

SEQ ID NO: 186747 - DNA, 1539 bp, Homo Sapiens
ttggcaatgggaatccgcgggtcccccacctctcctccgccgggcagcacctctacagccccgcgccacccctctcccacactggagtcgccgaatatcagccgccaccctactttccccctccctaccagcagctggcctactcccagtcggccgacccctactcgcatctgggggaagcgtacgccgccgccatcaaccccctgcaccagccggcgcccacaggcagccagcagcaggcctggcccggccgccagagccaggagggagcggggctgccctcgcaccacgggcgcccggccggcctactgccccacctctccgggctggaggcgggcgcggtgagcgcccgcagggatgcctaccgccgctccgacctgctgctgccccacgcacacgccctggatgccgcgggcctggccgagaacctggggctccacgacatgcctcaccagatggacgaggtgcagaatgtcgacgaccagcacctgttgctgcacgatcagacagtcattcgcaaaggtcccatttccatgaccaagaaccctctgaacctcccctgtcagaaggagctggtgggggccgtaatgaaccccactgaggtcttctgctcagtccctggaagattgtcgctcctcagctctacgtctaaatacaaagtgacagtggctgaagtacagaggcgactgtccccacctgaatgcttaaatgcctcgttactgggaggtgttctcagaagagccaaatcgaaaaatggaggccggtccttgcgggagaagttggacaagattgggttgaatcttccggccgggaggcggaaagccgctcatgtgactctcctgacatccttagtagaaggtgaagctgttcatttggctagggactttgcctatgtctgtgaagccgaatttcctagtaaaccagtggcagaatatttaaccagacctcatcttggaggacgaaatgagatggcagctaggaagaacatgctattggcggcccagcaactgtgtaaagaattcacagaacttctcagccaagaccggacaccccatgggaccagcaggctcgccccagtcttggagacgaacatacagaactgcttgtctcatttcagcctgattacccacgggtttggcagccaggccatctgtgccgcggtgtctgccctgcagaactacatcaaagaagccctgattgtcatagacaaatcctacatgaaccctggagaccagagtccagctgattctaacaaaaccctggagaaaatggagaaacacaggaaataaaattggaacgaagaaaggttaggagagtagggaaggaacaggactgcaaaaatccttctccaccgcacagactgggaacccctcctggcctgggggaagagtttgttacctaccttactatttaaagagccttcactggttctgcatcacccgcccctggacttcttagttgtttctctagcgctgagctatctcctaactttggacctattatcagaaggtgacagtactggctctttattcattaagc

SEQ ID NO: 186748 - DNA, 1741 bp, Homo Sapiens
ttggggctgtgcgtgctcctcgctttctccgcggtcttccgagcggtcgcgtgaactgcttcctgcaggctggccatggcgcttcacgttcccaaggctccgggctttgcccagatgctcaaggagggagcgaaacacttttcaggattagaagaggctgtgtatagaaacatacaagcttgcaaggagcttgcccaaaccactcgtacagcatatggaccaaatggaatgaacaaaatggttatcaaccacttggagaagttgtttgtgacaaacgatgcagcaactattttaagagaactagaagtacagcatcctgctgcaaaaatgattgtaatggcttctcatatgcaagagcaagaagttggagatggcacaaactttgttctggtatttgctggagctctcctggaattagctgaagaacttctgaggattggcctgtcagtttcagaggtcatagaaggttatgaaatagcctgcagaaaagctcatgagattcttcctaatttggtatgttgttctgcaaaaaaccttcgagatattgatgaagtctcatctctacttcgtacctccataatgagtaaacaatatggtaatgaagtatttctggccaagcttattgctcaggcatgcgtatctatttttcctgattccggccatttcaatgttgataacatcagagtttgtaaaattctgggctctggtatcagttcctcttcagtattgcatggcatggtttttaagaaggaaaccgaaggtgatgtaacatctgtcaaagatgcaaaaatagcagtgtactcttgtccttttgatggcatgataacagaaactaagggaacagtgttgataaagactgctgaagaattgatgaattttagtaagggagaagaaaacctcatggatgcacaagtcaaagctattgctgatactggtgcaaatgtcgtagtaacaggtggcaaagtggcagacatggctcttcattatgcaaataaatataatatcatgttagtgaggctaaactcaaaatgggatctccgaagactttgtaaaactgttggtgctacagctcttcctagattgacacctcctgtccttgaagaaatgggacactgtgacagtgtttacctctcagaagttggagatactcaggtggtggtttttaagcatgaaaaggaagatggcgccatttctaccatagtacttcgaggctctacagacaatctgatggatgacatagaaagggcagtagacgatggtgttaatactttcaaagttcttacaagggataaacgtcttgtacccggaggtggagcaacagaaattgaattagccaaacagatcacatcatatggagagacatgtcctggacttgaacagtatgctattaagaagtttgctgaggcatttgaagctattccccgcgcactggcagaaaactctggagttaaggccaatgaagtaatctctaaactttatgcagtacatcaagaaggaaataaaaacgttggattagatattgaggctgaagtccctgctgtaaaggacatgctggaagctggtattctagatacttacctgggaaaatattgggctatcaaactcgctactaatgctgcagtcactgtacttagagtggatcagatcatcatggccaaaccagctggtgggcccagcctcccagtgggaagaaagactgggatgatgaccaaaatgattgaaattggcttaatttttactg

SEQ ID NO: 186749 - DNA, 1432 bp, Homo Sapiens
ttggggccgccgctaggctcgcactccggacgcgcctcgcagtgcgcagggtgggtgccccgcgcctgcagcgtccgccggggcggcgcggcgggaggtggccgacaggctccgggcctcgcagcctcagcccccggcccagcgcgctttccgacggcggcgccgcgccgagccacccgcccgcccaaggtctctcgcgggcgggagaacggaaaactcccaacttcctgagttctaaagttcctgttgcttcagacaatggatgagcaatcacaaggaatgcaagggccacctgttcctcagttccaaccacagaaggccttacgaccggatatgggctataatacattagccaactttcgaatagaaaagaaaattggtcgcggacaatttagtgaagtttatagagcagcctgtctcttggatggagtaccagtagctttaaaaaaagtgcagatatttgatttaatggatgccaaagcacgtgctgattgcatcaaagaaatagatcttcttaagcaactcaaccatccaaatgtaataaaatattatgcatcattcattgaagataatgaactaaacatagttttggaactagcagatgctggcgacctatccagaatgatcaagcattttaagaagcaaaagaggctaattcctgaaagaactgtttggaagtattttgttcagctttgcagtgcattggaacacatgcattctcgaagagtcatgcatagagatataaaaccagctaatgtgttcattacagccactggggtggtaaaacttggagatcttgggcttggccggtttttcagctcaaaaaccacagctgcacattctttagttggtacgccttattacatgtctccagagagaatacatgaaaatggatacaacttcaaatctgacatctggtctcttggctgtctactatatgagatggctgcattacaaagtcctttctatggtgacaaaatgaatttatactcactgtgtaagaagatagaacagtgtgactacccacctcttccttcagatcactattcagaagaactccgacagttagttaatatgtgcatcaacccagatccagagaagcgaccagacgtcacctatgtttatgacgtagcaaagaggatgcatgcatgcactgcaagcagctaaacatgcaagatcatgaagagtgtaaccaaagtaattgaaagtattttgtgcaagtcatacctccccatttatgtctggtgttaagattaatatttcagagctagtgtgctttgaatccttaaccagttttcatataagcttcattttgtaccagtcacctaaatcacctccttgcaacccccaaatgactttggaataactgaattgcatgttacgagagaaatgaaacatgatggttttgatggctaaaggtttatagaatttc

SEQ ID NO: 186750 - DNA, 1439 bp, Homo Sapiens
ttggcaacatcctgcgcttaatattgtgtgcaaaatcagagaggggtgcaagatcctgatttttcaggagttcaagcgacaatggcagcccaatacggcagtatgagcttcaaccccagcacaccaggggccagttatgggcctggaaggcaagagcccagaaattcccaattgagaattgtgttagtgggtaaaaccggagcaggaaaaagtgcaacaggaaacagcatccttggccggaaagtgtttcattctggcactgcagcaaaatccattaccaagaagtgtgagaaacgcagcagctcatggaaggaaacagaacttgtcgtagttgacacaccaggcattttcgacacagaggtgcccaatgctgaaacgtccaaggagattattcgctgcattcttctgacctccccagggcctcatgctctgcttctggtggttccactgggccgttacactgaggaagagcacaaagccacagagaagatcctgaaaatgtttggagagagggctagaagtttcatgattctcatattcacccggaaagatgacttaggtgaccgctactgtgcgttaaacaacaaggcaacaggcgctgagcaggaggcccagagggcacagttgctgggcctgatccagcgcgtggtgagggagaacaaggaaggctgctacactaataggatgtaccaaagggcggaggaggagatccagaagcaaacacaagcaatgcaagaactccacagagtggagctggagagagagaaagcacggataagagaggagtatgaagagaaaatcagaaagctggaagataaagtggagcaggaaaagagaaagaagcaaatggagaagaaactagcagaacaggaggctcactatgctgtaaggcagcaaagggcaagaacggaagtggagagtaaggatgggatacttgaattaatcatgacagcgttacagattgcttcctttattttgttacgtctgttcgcggaagattaaacttaatgaaaatctgtttgtattttctgcatattctctggcaaccttgccccatacttacttatttagcatagtcgagtgctctagtttctgtctctcaggcactcgtaactaaggaccaccattggccattggtagatgtttgattgacttaacaagagagggacaaattttcaatttgtgaaactccaaagcagaaagtattggtgcttgctaccttgtgaattcttccttagacatgcagagaaaatgtatgcaagagaccaaaaagatggctccaagctatgtcatgttacctgtaataaatcttttcttctagattctttctatggttggcagataatctccccttggtaccttccactcacttattcttgcattcagagtcacaatgatcatcttacccatgtggttttgagaaataaaatcaattcttt

SEQ ID NO: 186751 - DNA, 1628 bp, Homo Sapiens
  misc_feature (407)..(453): n is a, c, g, or t
  misc_feature (1555)..(1564): n is a, c, g, or t
ttggctagcactcacggctgcgttgtctcctggctgtctcggactttctcacgctgggtctgtggcccagaggtcttgggctaggtccctcctctctacgcgatgtcatcttggtccccggagccctgcagtcatgttgactctgcaccaagggcagagcagagctcccttctgagacagcaccctgtgtcccttcccccaacacactgatgcaagccctgtcccctccacagggagcgtggctgtgctgtctgcagagcagaaccacaaggttgacacgtccgtccactacaacattcctgagctgcagtcctccagccgcgcccctccaccccagcacaatgggcagcaggagccccccactgcaaggaagggccccccaacccaggagttggaccgggactcgnnnnnnnnnnnnnnnnnnnnnnnnnnnnnnnnnnnnnnnnnnnnnnnagtccccaagcgcaagtggcaagggatcgaggccgtttttgaagcttaccaggaacacatagaagagcaaaatctggagcggcaggtgttacagacacaatgtagacgactggaggcccggcactacagcctcagcctgacggcagagcagctctcccacagcgtggcggagttgaggagccagaaacagaagatggtctcagaaagggagcggctccaggcagaactggaccacttacgaaagtgccttgccttgcctgcaatgcactggcctaggggctacctgaagggatatcccaggtgacggtttcccttgcactaggccgaacctatagtatagaaatattatctattttattaccttgaatatttaatatttttcactgggaggtttgaagcttacaaaatgagaatgtgccatgcatgaagcaaaggattccaggctccagaaaaaatgaatgaactcaccttgacgtcaatgcaattgaatcaccgttgtcattcagcgagcaaccaatgtaggattgcccacagtttttctttttaaaggtggttttcgcccttcctctcccacattatttcttaatctgaacatgaaggctccattagcaacactaaaacttgatcattaacagccccctgtgcatatgagtggatcaaaccggttctgttctttcttgtgttgccatgttactatgcctcaagcccagtttgcttttgccgcagcgatggggccagtctcattcctccccaggagtgaaacttgcttcagctgaaaaggttgggtgcattgtcagtaaaaagggcttatttgtttcattttactttcctgcaaaattttcttcaaagcaacaagtcctaggagcacacaaagcaacccaaaggcttttccctggaaaagctctttcttacctaaagataaaaccaattcacaaactgaaggtagctttttattactccgtggggagcatgtacagagctctgtgtatacacagcttcacacccaccagattgttactacagtgggttgggttttcatacagacgtaaattttgagagaaaagtcaaaggtgcttcagccttgtactgtgtatatatattnnnnnnnnnncaaagttttgtatgtttttattactttaactattgttataaaaagcctgccatttttaatatgt

SEQ ID NO: 186752 - DNA, 1318 bp, Homo Sapiens
ttggcggagagaacgccggtggcggggctggtagcccggcagccgcaggtggggccacgagcgctggctgagggaccgagccggagagccccggagcccccgtaacccgcgcggggagcgcccaggatgccgcgcggggactcggagcaggtgcgctactgcgcgcgcttctcctacctctggctcaagttttcacttatcatctattccaccgtgttctggctgattggggccctggtcctgtctgtgggcatctatgcagaggttgagcggcagaaatataaaacccttgaaagtgccttcctggctccagccatcatcctcatcctcctgggcgtcgtcatgttcatggtctccttcattggtgtgctggcgtccctccgtgacaacctgtaccttctccaagcattcatgtacatccttgggatctgcctcatcatggagctcattggtggcgtggtggccttgaccttccggaaccagaccattgacttcctgaacgacaacattcgaagaggaattgagaactactatgatgatctggacttcaaaaacatcatggactttgttcagaaaaagttcaagtgctgtggcggggaggactaccgagattggagcaagaatcagtaccacgactgcagtgcccctggacccctggcctgtggggtgccctacacctgctgcatcaggaacacgacagaagttgtcaacaccatgtgtggctacaaaactatcgacaaggagcgtttcagtgtgcaggatgtcatctacgtgcggggctgcaccaacgccgtgatcatctggttcatggacaactacaccatcatggcgggcatcctcctgggcatcctgcttccccagttcctgggggtgctgctgacgctgctgtacatcacccgggtggaggacatcatcatggagcactctgtcactgatgggctcctggggcccggtgccaagcccagcgtggaggcggcaggcacgggatgctgcttgtgctaccccaattagggcccagcctgccatggcagctccaacaaggaccgtctgggatagcacctctcagtcaacatcgtggggctggacagggctgcggcccctctgcccacactcagtactgaccaaagccagagctgtgtgtgcctgtgtgtaggtcccacggcctctgcctccccagggagcagagcctgggcctcccctaagaggctttcctcgaggcagctctggaatctgtgcccacctggggcctggggaacaaggccctcctttctccaggcctgggctacagggagggagagcctgaggctctgctcagggc

SEQ ID NO: 186753 - DNA, 977 bp, Homo Sapiens
ctgttcttttgcaacaaattgaccaaccaatgcttttttataatgccaactttgtacaaaaaagttggcttgggatctgcctcatcatggagctcattggtggcgtggtggccttgaccttccggaaccagaccattgacttcctgaacgacaacattcgaagaggaattgagaactactatgatgatctggacttcaaaaacatcatggactttgttcagaaaaagttcaagtgctgtggcggggaggactaccgagattggagcaagaatcagtaccacgactgcagtgcccctggacccctggcctgtggggtgccctacacctgctgcatcaggaacacgacagaagttgtcaacaccatgtgtggctacaaaactatcgacaaggagcgtttcagtgtgcaggatgtcatctacgtgcggggctgcaccaacgccgtgatcatctggttcatggacaactacaccatcatggcgggcatcctcctgggcatcctgcttccccagttcctgggggtgctgctgacgctgctgtacatcacccgggtggaggacatcatcatggagcactctgtcactgatgggctcctggggcccggtgccaagcccagcgtggaggcggcaggcacgggatgctgcttgtgctaccccaattagggcccagcctgccatggcagctccaacaaggaccgtctgggatagcacctctcagtcaacatcgtggggctggacagggctgcggcccctctgcccacactcagtactgaccaaagccagggctgtgtgtgcctgtgtgtaggtcccacggcctctgcctccccagggagcagagcctgggcctcccctaagaggctttccccgaggcagctctggaatctgtgcccacctggggcctggggaacaaggccctccctttctccaggcctgggctacaggggagggagagcctgagctctgctcagggcccatttcatc

SEQ ID NO: 186754 - DNA, 1553 bp, Homo Sapiens
  misc_feature (125)..(181): n is a, c, g, or t
ttggcgcggcgcgatggaggcgccggccgagctactggccgcgctgcctgcgctggccaccgcgctggcccttctgctcgcctggctactggtgcggcgtggggcggccgcgagcccggagcctnnnnnnnnnnnnnnnnnnnnnnnnnnnnnnnnnnnnnnnnnnnnnnnnnnnnnnnnntcccgcccctgcgcccccgagccggcggcctcgcccgcggggccggaggagcctggagagcccgcggggctgggggagctcggggagcctgcgggaccgggggagcccgaagggccaggggatcccgcggcggcgccagcggaggcggaggagcaggcggtggaggcgaggcaggaagaggagcaggacttggatggtgagaaggggccatcatcggaagggcctgaggaggaggacggagaaggcttctccttcaaatacagccccgggaagctgaggggaaaccagtacaagaagatgatgaccaaagaggagctggaggaggagcagagaactgaagaataacgaagttatccttagcgtcctcctaaaggcttttccttttggcatcttaaaagcttgagagataaaacggaaacccccagagaggagtctgggcaggctcccagggtgcatgctgcctccataaatctgctgagctctagaccctcaatcacccgacttgtcccttggctagcaggatcctgggaacacctttggccctgccctgtgtagagatgttcatgtctgttcctgtgggtcactttgttaagctgaagagttttaagaggtagagctcagaccctggactgggatttttcttaccactcaaacttgctatccacacaccctgcacaccttagataaaaagaacattttaaaagcagagttcactttcactccagtctcccctcttttgccctcactgaagccaaaccacagaagactttgaggaatgagagacaaatgaggtagagctcacctgtgctcaccagctccgtcagggtggtcagccgacccctttccctgggaaccccacttctctctgtggctggcttggttgtcgggggtgagatgccatattgattacagggcagcaaagaaccagtaccaggaatttacttgaccattccccttatttttcatctagaggaatctcggattcagccctttcattgctaagacaccttttcactgaggttcttaccagctcagccaaatctccactctgctatagcagaagcaataatgtttgctttaaaaagatttcttgacctatgccttttcttagaaagtttgatagattagttagaacttcagatcatcagatcagtctcaaatgggtttcttggaattttatatttgacaatatttatactataccaaactcatttgcagttcttaggtttgttggttaaaacatttttttaaagcagtaagtttatagaaaatgtttttcatttaatggaaaggctggggaatgtcccagcatcaaccccctatggcatgcattcccagtggccttctcatctgggcccggaacctttggttt

SEQ ID NO: 186755 - DNA, 1125 bp, Homo Sapiens
  misc_feature (95)..(103): n is a, c, g, or t
  misc_feature (896)..(906): n is a, c, g, or t
ttgggattgacactttggtgctggggttttgtgggggcggggggtagtttttgtttagcttttgtggagattgtgtgtgtgagaggagatttgannnnnnnnncttcttttcctttgtgagctgatggctgaagtgtaacagtacatcttcaggtaaagagagggatttctcaatctactttctgttatgtcagactataagagaaaccctttcagctgctttctagatgtacctaaattcagtcagacattggggattaagaaacctaaagtcctgatacattacatactccaaggaaatatatcagggacagacaattggctgaaacactgatacttcaatgtgacacatttttatagaacatttctaccagggggtactgaccttgatttctcctacaaggaccacactgcctttgtgtttaatgtaatgcaatttgtgtaccttctaatcatatatctgcagttcctcatttttataaaactttgatatcatgccagtaagctagatgttgaatgtatgtaagtagcatttggtaactgctaagaggttacaaaaacattattggtaaaaaaaatttccttagttctgatctggttggataagattttatcataacttttctgggtctcaggctctgatgtttgaaaaagaagggaatatattgggttttaaaaaagtgtattgtgacttaaactgttataagttatccttccacagaatacatcagagctatcagtgctttgtacatttagatgtttttacttgattattgtttaagaaaaatatactgaatttatagaaagcaagtattctcctaattagcaaaagttaaaattttatctctaccattaaaattacaatagattttgataaataaccagaaaaaacgccnnnnnnnnnnncacacctagcaatcctcccgtttttattgtaaggactttcttttttccctaagagactttctgttagactctttatatatgagatgcttgtttaaatatggtggtctgtaacatttttccagctcatgtgaaaatggaaaactagaacctgaactagtatctacaacattgccaaagtccagggtaaagctaaaagttgataagtagacaatttatgtt

SEQ ID NO: 186756 - DNA, 2041 bp, Homo Sapiens
ttgggtctcgcagcagccgcccggaccgggcatggtgttgggcgccgggcccgcctcgcctgtctcggggagcccagggtaaaggcagcagtaatgctaacgctagcaagtaaactgaagcgtgacgatggtctcaaagggtcccggacggcagccacagcgtccgactcgactcggagggtttctgtgagagacaaattgcttgttaaagaggttgcagaacttgaagctaatttaccttgtacatgtaaagtgcattttcctgatccaaacaagcttcattgttttcagctaacagtaaccccagatgagggttactaccagggtggaaaatttcagtttgaaactgaagttcccgatgcgtacaacatggtgcctcccaaagtgaaatgcctgaccaagatctggcaccccaacatcacagagacaggggaaatatgtctgagtttattgagagaacattcaattgatggcactggctgggctcccacaagaacattaaaggatgtcgtttggggattaaactctttgtttactgatcttttgaattttgatgatccactgaatattgaagctgcagaacatcatttgcgggacaaggaggacttccggaataaagtggatgactacatcaaacgttatgccagatgataaaaggggacgattgcaggcccatggactgtgttacagtttgtctctaacatgaaacagcaagaggtagccccctctcccgtcctcatgctccctctcagtcccctggattgccccagtcctgtgaccatgttgccctgaagaagaccatcttcatgactgctcattgtagatggagaattcaacataaatacagcaagaaaatgtgtttgggcttctgaagagttgtctgcttaccttaacatgtttacttttttgaacttgtactgtataggctgttggtgaaattcttaagaagttgtaatgaactcaaaattgaggccagagcttgctttcccttttcccaaacaaaattggttttctgcacaagcgatgctaatgatgtgttcagtgtaactcgcagattggcaataagatacccgctacaaactgtgattggatgcaaaatctcttagcttctttcacgaatgttggccctgcctagatgttgtgaagcctcccagaatgcatagagtcattcactgtagatctcttattgaaatgcgtattttatttaatgtaagtatattttggaacagatttgtaatttgtacaattcaatgctttaattattttttctattctcatttagtttgtattttcattgtatagagcagacagaaagatgttgggtcaagcaactattgaagagaaatacaaagaaaatatgaaaggcacattattcattttgtccaaatgcaatgagaatctcactcttaaaaatcagctcttgctttcgggtccggatgtggtgagcacattttggagccctttgaagctagatttggatgatcaaaacaaaaaggcagggagcccattctaacatgctgcccagaggaaactggctggagcctggaccagctggggctgatgcttttgcagtggtcatgtgattgtgacctggtagctacttatcagagagccagaccctgctgtcctgggagacaggagcgatgcctcaggaatcagcccaatgtctgatgtcactgagactgtacctgtggccttcttctgagtttgctatggctccaggccctgccggtggggtgagcctcctaggccttggaggaccaggagtcaacagtggcatatgccatcctcggccaggttaatatactgcagaggaaaagccctgaagagaggcaagtggatttactccagcatgtagacatttgaaccagtgaaatcaaacacaaaataaatgtctgtctagtttcatttgctgcctgcctaacactctcaaacttaactgccagcttccttagacctctggattcccccatctgccatctactgggtttagtttgtttttcttaatttatagaatctctgattgtgagatcagtctgtc

SEQ ID NO: 186757 - DNA, 1739 bp, Homo Sapiens
gccaactttgtacaaaaaagttggctcgccattaatagtgagggaaatattctctctcgtgctaaggagacaggctcacatattgagggagtgaccggtgcccgcgagacagaaagaacaatgtcagccacatcaggaccgctggggcttcgagtctgccctaatttgggtttgtctaggagctccagcctgatcttggattgtcaggcgtctctcaacactgccagccacctgagatgctgaccagcagtgaaggctgcactagttttctacactacaggaattactgttgatgatttttgctgttgtttcatgaatgtgccgagtgacttctgactctgccagcatctttgacctctgactctgcccgcgtctttgtttggcctattgaggtttagcgttttaaccttaactgttgttttggacttgaactttctctagccttgaaaatggagtgaacaggaggcaaagccacgcgtggtttgtgttggtggtatgttccacaaatggaagagatcattgcattttgctttggtaatgagtttacagagagtgggtcatctttgaagcatcaaatcctgatcaaatgctcaagctggaccgagctgcaagcctgccttggacaaagaatccctctgttcactgtggtgggaaagatcacactacatgcctgttgattggctcagtcactctgtgtctgatctaaacgtcattcagccctagaagcatgaattgcttcaaattattgtcaacttgttctcttccattttcattcaaattacctttgactcctggaagtattgagtcttcctttcaaggaccataaggtacatcagttatcttgaacattctgacgtgtaaaggaccataaggtacatcatttatcttgaacattccgacgtgtaactcacagccgaagcactccatcccagatttgttgtctgggaactttaggatcctctaggaagctaatctgcttagtctatttttagaggattgatctctggcacaaccagcttcctggagttacctcagcagaagactagaattagagaaaagggaaagaccttttcttctattaagtgtcaagtacagatgctctttgacttatgatggggttatgtcccagtaaacccattggaagtcaaatgcatttaatacccctgactggacaccacagcttagcctcgtccaccctaaatgtactcagaacacttagaattgcccacagttgggcagaatcatctaacacaaactctattttataatcgagtgttgaatatatcatgtaatttattgaatattgtacattatgttgaaattgcaaccatttcacaccattgtaaagtccaaaaatcagaagctgaggactgtctgtacatgacattgaatcacatgaatggattactagggcctgaggggtgtccgttctttagaaaaatgtagagtatatatatcttcagggctgtgaattccatactagttatcaatattttaagatcattctgtatatacatattttaaattatgcaagcaaactatgaggagaatgtgcaattttgagggatacctaatttgcattcgggttaggggatatttttcaacctcttgctttatactctgatatggggtgtgtttatgaaccttgttaatgttatttaatcatgcagattccagtcagtgtattgctcatttactgacaaaaaagggaaatacgaaacccagaaagggaaaataaa

SEQ ID NO: 186758 - DNA, 1746 bp, Homo Sapiens
acaaaaaagttggcagaattggcaagagctggtttttattatataggacctggagatagggtagcctgctttgcctgtggtgggaagctcagtaactgggaaccaaaggatgatgctatgtcagaacaccggaggcattttcccaactgtccatttttggaaaattctctagaaactctgaggtttagcatttcaaatctgagcatgcagacacatgcagctcgaatgagaacatttatgtactggccatctagtgttccagttcagcctgagcagcttgcaagtgctggtttttattatgtgggtcgcaatgatgatgtcaaatgcttttgttgtgatggtggcttgaggtgttgggaatctggagatgatccatgggtagaacatgccaagtggtttccaaggtgtgagttcttgatacgaatgaaaggccaagagtttgttgatgagattcaaggtagatatcctcatcttcttgaacagctgttgtcaacttcagataccactggagaagaaaatgctgacccaccaattattcattttggacctggagaaagttcttcagaagatgctgtcatgatgaatacacctgtggttaaatctgccttggaaatgggctttaatagagacctggtgaaacaaacagttcaaagtaaaatcctgacaactggagagaactataaaacagttaatgatattgtgtcagcacttcttaatgctgaagatgaaaaaagagaagaggagaaggaaaaacaagctgaagaaatggcatcagatgatttgtcattaattcggaagaacagaatggctctctttcaacaattgacatgtgtgcttcctatcctggataatcttttaaaggccaatgtaattaataaacaggaacatgatattattaaacaaaaaacacagatacctttacaagcgagagaactgattgataccattttggttaaaggaaatgctgcggccaacatcttcaaaaactgtctaaaagaaattgactctacattgtataagaacttatttgtggataagaatatgaagtatattccaacagaagatgtttcaggtctgtcactggaagaacaattgaggaggttgcaagaagaacgaacttgtaaagtgtgtatggacaaagaagtttctgttgtatttattccttgtggtcatctggtagtatgccaggaatgtgccccttctctaagaaaatgccctatttgcaggggtataatcaagggtactgttcgtacatttctctcttaaagaaaaatagtctatattttaacctgcataaaaaggtctttaaaatattgttgaacacttgaagccatctaaagtaaaaagggaattatgagtttttcaattagtaacattcatgttctagtctgctttggtactaataatcttgtttctgaaaagatggtatcatatatttaatcttaatctgtttatttacaagggaagatttatgtttggtgaactatattagtatgtatgtgtacctaagggagtagtgtcactgcttgttatgcatcatttcaggagttactggatttgttgttctttcagaaagctttgaatactaaattatagtgtagaaaagaactggaaaccaggaactctggagttcatcagagttatggtgccgaattgtctttggtgcttttcacttgtgttttaaaataaggatttttctcttatttctccccctagtttgtgagaaacatctcaataaagtgcttt

SEQ ID NO: 186759 - DNA, 1078 bp, Homo Sapiens
ttggatctctgaggagatggatcggtacctgctgctggtgatctggggggaaggaaaattcccgtcggcggccagtagggaggcagaacatgggccagaggtgtcgtcgggtgagggtactgagaatcagccggacttcacagcagcaaatgtttatcacctcttgaaaagaagcattagtgcttcaattaatccagaagatagtactttccctgcctgttcagtgggaggtatacctggttccaagaagtggttctttgcagtgcaggcaatatatggattttatcagttttgtagttctgattggcaagagatacattttgatacagaaaaagataaaattgaagatgttcttcaaacgaatatcgaagaatgtttgggtgctgttgagtgttttgaagaagaagacagtaatagcagggaatcattatccttggctgatctctatgaagaagctgcagaaaatttgcatcagctgtcagacaagcttcctgctcctggtagagcaatggtagatataatactgttgctttctgacaaagatcctcctaaattgaaagactatttacctactgtaggagcattaaaacatttgagagaatggtattcagcaaagatcactatagcaggaaatcattgtgaaataaactgtcagaaaattgcagaatacctttctgctaatgttgtatctttagaagatctcagaaatgttattgactcaaaggaattatggagggggaaaatacagatatgggaaagaaagtttggatttgaaattagttttcctgaattttgtttaaagggagtcacacttaagaattttagtacttctaatttaaatactgacttccttgccaaaaagatcataccatcaaaggataagaatattttgccaaaggttttccattattatggccctgctttagaatttgtgcagatgataaaattatcagatctaccctcctgctatatgtcggatattgaatttgagtaggattgacaaacagtaccaaacagaattctgtgttgctgttggagcagatttcttctctgtgtagcaaagttggtgctctttttg

SEQ ID NO: 186760 - DNA, 1536 bp, Homo Sapiens
caggcgaacactccacatgggcacgtgtgagcaggcaggcactcccacatcggcacgtgtgagcaggcgagcactccacatgggcacgtgtgatcaggcgggcactccacgttggcacgtgtgagcaggcgggcactccacatgggcacgtgtgagcaggcgggcactccacgtcggcacgtgtgagcaggcgggcactccacgtcggcacgtgtgagcaggcgggcactccgcatgggcacgtgtgagcaggcgggcactccgcatgggcacgtgtgagcaggcgggcactccgcatcggcacgtgtgagcaggcgggcactccacatgggcacgtgagcaggcgggcactccacatgggcacgtgtgtgagcaggcggcactccacatcggcacatgtgagcaggtgggcactccacatgggcacatgagcaggtgggcactccacatggacacgtgtgtgagcaggcgggcactccacatgggcacgtgtgagcaggcgggcactccacatgggcatgtgtgagcaggcgggcactccgcatcgacatgtgtgagcaggcgggcactccacatgggcacatgagcaggcgggcactccacatgggcacgtgtgagcaggcgggcactccacattggcacaaagcgagggctcatgcataagaggtgcagggacacctggacagctatttgaaatttaaaaactgggtttcctggctcacattttgtatcaaaaactagaagtagatcaatgatttcaatatgaaaatgaaacccataaaagtactagaagaaaacatggaaaacatttcaaatataatctttaagggggaagagcattctaactagaacacaaaacttagaagccaagaaagattgataattcaactacataactcatgaaaggaagatctgaggaacgagatgcccacagtggccgctgagaagctctgccacactcctggaggcatggaaggctgtgcccacacaggcacagagctgtgtgtgtgcccgagaggaacctgagctgccctggccctcacctctggctggctttgtggctgtgtgcaagtaagaagtgaaggcaaaggcacagttggcagctgcctgctggagcactgaccacatatcaactgcgtgtcagcagaaccgcgatggagcgctgaaggcacactcaccacgcatcaactgcgtgtcggcagaaccgtgagagttactggtgcaaagcacttaaaggggtcctctgtccagtcactggctgaacatgaagctgatgaggtggacacttcaaattagtccagaacacacactaaacaaaaggtaacagcaacagaacaacaataaactcgtggagagggtatctgatttccagagttgcacagcacattattaaagtgtccagtcttcaaaaaatacatatatatgagaccacaaagaaagagtatgttatttccttggctctgacatgggaaaaaaggtcatcaataggaacttcccctgaataagccctgatgttgaacttagtagacaagtcac

SEQ ID NO: 186761 - DNA, 1736 bp, Homo Sapiens
ttggctctcggtctgtggcagcagcgttggcccggccccgggagcggagagcgaggggaggcggagacggaggaaggtctgaggagcagcttcagtccccgccgagccgccaccgcaggtcgaggacggtcggactcccgcggcgggaggagcctgttcccctgagggtatttgaagtataccatacaactgttttgaaaatccagcgtggacaatggctactcaagctgatttgatggagttggacatggccatggaaccagacagaaaagcggctgttagtcactggcagcaacagtcttacctggactctggaatccattctggtgccactaccacagctccttctctgagtggtaaaggcaatcctgaggaagaggatgtggatacctcccaagtcctgtatgagtgggaacagggattttctcagtccttcactcaagaacaagtagctgatattgatggacagtatgcaatgactcgagctcagagggtacgagctgctatgttccctgagacattagatgagggcatgcagatcccatctacacagtttgatgctgctcatcccactaatgtccagcgtttggctgaaccatcacagatgctgaaacatgcagttgtaaacttgattaactatcaagatgatgcagaacttgccacacgtgcaatccctgaactgacaaaactgctaaatgacgaggaccaggtggtggttaataaggctgcagttatggtccatcagctttctaaaaaggaagcttccagacacgctatcatgcgttctcctcagatggtgtctgctattgtacgtaccatgcagaatacaaatgatgtagaaacagctcgttgtaccgctgggaccttgcataacctttcccatcatcgtgagggcttactggccatctttaagtctggaggcattcctgccctggtgaaaatgcttggttcaccagtggattctgtgttgttttatgccattacaactctccacaaccttttattacatcaagaaggagctaaaatggcagtgcgtttagctggtgggctgcagaaaatggttgccttgctcaacaaaacaaatgttaaattcttggctattacgacagactgccttcaaattttagcttatggcaaccaagaaagcaagctcatcatactggctagtggtggaccccaagctttagtaaatataatgaggacctatacttacgaaaaactactgtggaccacaagcagagtgctgaaggtgctatctgtctgctctagtaataagccggctattgtagaagctggtggaatgcaagctttaggacttcacctgacagatccaagtcaacgtcttgttcagaactgtctttggactctcaggaatctttcagatgctgcaactaaacaggaagggatggaaggtctccttgggactcttgttcagcttctgggttcagatgatataaatgtggtcacctgtgcagctggaattctttctaacctcacttgcaataattataagaacaagatgatggtctgccaagtgggtggtatagaggctcttgtgcgtactgtccttcgggctggtgacagggaagacatcactgagcctgccatctgtgctcttcgtcatctgaccagccgacaccaagaagcagagatggcccagaatgcagttcgccttcactatggactaccagttgtggttaagctcttacacccaccatcccactggcctctgataa

SEQ ID NO: 186762 - DNA, 1864 bp, Homo Sapiens
gagcctcccgaggtagcagcaacatccctgcagcagggggacgggcaggttgtaggcagttagattggagcagggtcccatggcactgtattcagtatcagacacaggtctgaagaactctggggtcaccctggcaatggtcctggacaactggtgggatccttttgctcatcctgggtctaaggtcctggactccagcagcagctgggctatagagtggaggcagggtacttaagaaaggctgcacctgcaatacctgtacctatggctgccatatcatcgggccagagccgccctgggctccaggagaggagaagccccagagtgcaggggcttgctaggtttcccatcaaagcacaaaccatgctcctggtatgggaagctcagatgaagtggcttgctcccaggatgtgtgtttggggactctatccctatcctcagctctggtgttttgtgtgataccccaaaccattctgggaacactcaaaggaccccgaatgctagtcctgagacctcctctctgacatcagggtcagatatcacatccttagagtgagaaagaatgtacacgtaagccctgctcactctaccagggcctgcaggtgccctactgcagtgactcctacgagggaggggagacagtttgtggtgagcacgtggtgaaacctggctttctgggagaaggaagacaatggaaggcaaggtagaagggaaagtggtgggagggccatggcaaggccacacagctgcagaagcaagcatgcaggaaggaacccacatcctagcaatcctgctgaggctcctagttgtgtaggagttagcatggccattttatatggcagtggtggtgggaaggggagcagaggcttggagatgagaagagctgggaagcaagccctgggtatcccagagcttatgggtgggaagccaaacaatgaatagaacaggggaggccacaggaatcccaggaggaggatgccgcaccgcctgccctggccggacgtgccattcccagccttctcccagggaaccggccaccttgttcaagaaaaagaacgttctcctcttgctgcaaagagccccagaattaggatcacccccttacaggatctgctggtcacaggaagacagcacaataggcccctggtgggagacctaaaagtgggttgcaggaaccagttaaggctggatgaacctggtcagtcccttacatggatcctgaagcaggaaaaagcccaccagcatcagcataaaagaaaggcaggcaagggcagggcggggccgctccagtgaggtccagagctgcaggaggcccaggcaacttcagcacaagcacaaagcacttccacttaattaaaactggtttccccccacagttcttctcacattccaatcttgcacatgcttcattctggctctcacagcaggcccaggccctgaaacggcattattttaggctgcaaggtggcccctgaaaagctgttctgatccccagtggtcgctcttctctgtcccatcctcactcccttctccctgcttctgctctgggtttttagcaccagctctgaatgccaagaccacccccaagttcctgggccctccccacaaaaccaaatcagagtgtgctaggccgcatctgctggggcctggctctccctgtcttcacacactcagcaagagaagcctgatctttccttccgtgcagaatgcccacattttgtgttcgacatctgaccagatgggagaaaccttgggaaccctgggtggcagcgttcaaaccctgggtgaactctcaaggtctcaggcctggtaagcatctcctctggcctccaccccaggggcagagcaaacatggcaaccccaa

SEQ ID NO: 186763 - DNA, 841 bp, Homo Sapiens
  misc_feature (103)..(115): n is a, c, g, or t
  misc_feature (703)..(722): n is a, c, g, or t
ttggcactccttccccaagtaattgtaggaagataaaaaaactgttaccagataacaaacactgaactcctatttgaccagaactttttcctctcgagatagnnnnnnnnnnnnnaatgaaaaaagcataggaattggagattggcttgtctcacgcagccagtgcacatttggaattgacggaaacaacgttgctatttccacccatttgttttcggcagccttaaggccctcattctcatttcgggtgaatctgtctatctgtgaacgtggcccgcatgtgcattcttttttttatatatataaagtcagtgacgaggaactcccgagacgtgtaatgacaccacacttgttttctttgtttctttgttttatttaggcaagaagaggtgtgagtaattgaggaaaaactgacagatgcttttgctaataccaaaattgagcttacaattaggaactgagtatgtgtaacaggatacaggtgacagtgaagatagaagaaccacgatgaccacagactcaatgtgctctgtaacatcgcacagtttacccagcatgactttccttaggaggccccctcctcacgctagagtaaaagtcccagttaagtgaagcctaccagaagaactagtagaagaagctttgccgcttttgtgcctctcacaggcgcctaaagtcattgccatgggaggaagacgatttnnnnnnnnnnnnnnnnnnnncagggtaggtggggctttccctatttatcttcatgtccagtgagcagtgttgcgtttttccttgtagcatttggaaatgatttactggaattacaaaacctatttttcctgtaaatttc

SEQ ID NO: 186764 - DNA, 1290 bp, Homo Sapiens
  misc_feature (487)..(504): n is a, c, g, or t
  misc_feature (927)..(967): n is a, c, g, or t
ttgggccttaaggccctcattctcatttcgggtgaatctgtctatctgtgaacgtggcccgcatgtgcattcttttttttatatatataaagtcagtgacgaggaactcccgagacgtgtaatgacaccacacttgttttctttgtttctttgttttatttaggcaagaagaggtgtgagtaattgaggaaaaactgacagatgcttttgctaataccaaaattgagcttacaattaggaactgagtatgtgtaacaggatacaggtgacagtgaagatagaagaaccacgatgaccacagactcaatgtgctctgtaacatcgcacagtttacccagcatgactttccttaggaggccccctcctcacgctagagtaaaagtcccagttaagtgaagcctaccagaagaactagtagaagaagctttgccgcttttgtgcctctcacaggcgcctaaagtcattgccatgggaggaagacgatttnnnnnnnnnnnnnnnnnncagggtaggtggggctttccctaatttatcttcatgtccagtgagcagtgttgcgtttttccttgtagcatttggaaatgatttactggaattacaaaacctatttttcctttaaatttcagctttggctctggctgctttttagaataatgcaagataaaaatcacacctgagggctgaaaacggagagggaatgggagacttgatatttaagcagcttgaatggtttttcttttctttatttttaaagaaatgcacttgcctatgatactgtctctccagtgaaatgattactcctccattactctattgatacaatattgtgcatgctagtgttgtatttctatacagtagcttgaaattgattaacttatactgtaggtgttatgtattcctatgacaaaaaaaattaagtcttcaaannnnnnnnnnnnnnnnnnnnnnnnnnnnnnnnnnnnnnnnngggggtaaagtttgctctaccaaatagtgattgtaacaaattgatctgttttggatgttgctatagtgacatgcagttatatattttgtttttaaaagggggggagcaaaagaaacaccagtgttagcttaatcttaatgtctggtgtttgtcatggtgaaattataactattacagtgttggagaacaacaaatatgttctctgaatgagcctttgtgctttttgtcatgttatgcagtgaactattttttaggtctaatcagtgattatttttccagctccgtgtttctctaaggaattatttcacacacggaaccatctt

SEQ ID NO: 186765 - DNA, 2613 bp, Homo Sapiens
  misc_feature (650)..(661): n is a, c, g, or t
  misc_feature (1772)..(1791): n is a, c, g, or t
  misc_feature (2214)..(2254): n is a, c, g, or t
ttggcgcctctttgacatttttgccaaaataccactagtggaaagtcaggctagctgtgctggtattggaatagcagcctcacactggcgtctggactgttctgtagattcatgcaagtggagctgtctgtctctaatttaacttattgctagataatagggttttcagatgaaaagaaaacttaaagaggaatggccctcattcagtaagttctgtggttccagtaaggatttttatgtacatacgctctcgtctctcgttttgggtactttctatctcatctgtctcggctctgcatgttttccagggtgtagcctacagacatggaacagtgtaaatcccagactgacagacttagaacctgaggtctcattcatccttatggtttaggccttgccagttttccgaagtctctgattagttgacagtattaacactaaattgcagtttacagtatttctacattacagccatatgtaacatcaagccatcgattgtgtacttttcctttgctagttgtttgggctttaacatccttattcagccttatccaggttggttttgctgttgatcggtctcctaggctaaatgagaatgaaagcgacttcaggtttttggttcataggtgctcggcaggtggctgtgggannnnnnnnnnnnggtccttctttcctcttaacgtaaatccaccaccaaaattattaatcctcttgagagaaacgtgaaacgccacaaaaatagagaaaattcaggtctgtatgtcatggatcgtgttggtattttcagagaacatcccgcttctgaagctgctgcagctccctcctcagggatcacactgccgtcacccactctgcactggggcgtttcctactgcgcctcgtgctggcggacgcagctgggtgcagaagctgtggggtcggagaggcgtttggagaaggtctgtggtgcagtgtgtgaaaattcaggtgctagaagcctactggtagaaaaacccaaaaggaagagctatatccttaaccattctgtccaatttcgggagccttgtcagtgtgtcagtttttcctccccgaagacactccttccccaagtaattgtaggaagataaaaaaactgttaccagataacaaacactgaactcctatttgaccagaactttttcctctcgagatagttttttctttttaatgaaaaaagcataggaattggagattggcttgtctcacgcagccagtgcacatttggaattgacggaaacaacgttgctatttccacccatttgttttcggcagccttaaggccctcattctcatttcgggtgaatctgtctatctgtgaacgtggcccgcatgtgcattcttttttttatatatataaagtcagtgacgaggaactcccgagacgtgtaatgacaccacacttgttttctttgtttctttgttttatttaggcaagaagaggtgtgagtaattgaggaaaaactgacagatgcttttgctaataccaaaattgagcttacaattaggaactgagtatgtgtaacaggatacaggtgacagtgaagatagaagaaccacgatgaccacagactcaatgtgctctgtaacatcgcacagtttacccagcatgactttccttaggaggccccctcctcacgctagagtaaaagtcccagttaagtgaagcctaccagaagaactagtagaagaagctttgccgcttttgtgcctctcacaggcgcctaaagtcattgccatgggaggaagacgatttnnnnnnnnnnnnnnnnnnnncagggtaggtggggctttccctaatttatcttcatgtccagtgagcagtgttgcgtttttccttgtagcatttggaaatgatttactggaattacaaaacctatttttcctttaaatttcagctttggctctggctgctttttagaataatgcaagataaaaatcacacctgagggctgaaaacggagagggaatgggagacttgatatttaagcagcttgaatggtttttcttttctttatttttaaagaaatgcacttgcctatgatactgtctctccagtgaaatgattactcctccattactctattgatacaatattgtgcatgctagtgttgtatttctatacagtagcttgaaattgattaacttatactgtaggtgttatgtattcctatgacaaaaaaaattaagtcttcaaannnnnnnnnnnnnnnnnnnnnnnnnnnnnnnnnnnnnnnnngggggtaaagtttgctctaccaaatagtgattgtaacaaattgatctgttttggatgttgctatagtgacatgcagttatatattttgtttttaaaagggggggagcaaaagaaacaccagtgttagcttaatcttaatgtctggtgtttgtcatggtgaaattataactattacagtgttggagaacaacaaatatgttctctgaatgagcctttgtgctttttgtcatgttatgcagtgaactatttttaaggtctaatcagtgattatttttccagctccgtgtttctctaaggaattatttcacacacggaccatctttagcagtttcctcagtgatggaatatcatgaatgtga

SEQ ID NO: 186766 - DNA, 896 bp, Homo Sapiens
  misc_feature (65)..(74): n is a, c, g, or t
  misc_feature (314)..(322): n is a, c, g, or t
ttggctcacattcatttaatggtttctgtaaacatttttaagacagttgggatgtcacttaacannnnnnnnnngagctaaagtcagggaatcaagccatgcttaatatttaacaatcacttatatgtgtgtcgaagagtttgttttgtttgtcatgtattggtacaagcagatacagtataaactcacaaacacagatttgaaaataatgcacatatggtgttcaaatttgaacctttctcatggatttttgtggtgtgggccaatatggtgtttacattatataattcctgctgtggcaagtaaagcacacnnnnnnnnnctcctaaaatgtttttccctgtgtatcctattatggatactggttttgttaattatgattctttattttctctcctttttttaggatatagcagtaatgctattactgaaatgaatttcctttttctgaaatgtaatcattgatgcttgaatgatagaattttagtactgtaaacaggctttagtcattaatgtgagagacttagaaaaaatgcttagagtggactattaaatgtgcctaaatgaattttgcagtaactggtattcttgggttttcctacttaatacacagtaattcagaacttgtattctattatgagtttagcagtcttttggagtgaccagcaactttgatgtttgcactaagattttatttggaatgcaagagaggttgaaagaggattcagtagtacacatacaactaatttatttgaactatatgttgaagacatctaccagtttctccaaatgccttttttaaacctcatcacagaagattggtgaaaatgctgagtatgacacttttcttcttgcatgcatgtcagctacaataaacagttttgtacaatgaaaat

SEQ ID NO: 186767 - DNA, 1000 bp, Homo Sapiens
  misc_feature (41)..(50): n is a, c, g, or t
  misc_feature (290)..(298): n is a, c, g, or t
ttggtaaacatttttaagacagttgggatgtcacttaacannnnnnnnnngagctaaagtcagggaatcaagccatgcttaatatttaacaatcacttatatgtgtgtcgaagagtttgttttgtttgtcatgtattggtacaagcagatacagtataaactcacaaacacagatttgaaaataatgcacatatggtgttcaaatttgaacctttctcatggatttttgtggtgtgggccaatatggtgtttacattatataattcctgctgtggcaagtaaagcacacnnnnnnnnnctcctaaaatgtttttccctgtgtatcctattatggatactggttttgttaattatgattctttattttctctcctttttttaggatatagcagtaatgctattactgaaatgaatttcctttttctgaaatgtaatcattgatgcttgaatgatagaattttagtactgtaaacaggctttagtcattaatgtgagagacttagaaaaaatgcttagagtggactattaaatgtgcctaaatgaattttgcagtaactggtattcttgggttttcctacttaatacacagtaattcagaacttgtattctattatgagtttagcagtcttttggagtgaccagcaactttgatgtttgcactaagattttatttggaatgcaagagaggttgaaagaggattcagtagtacacatacaactaatttatttgaactatatgttgaagacatctaccagtttctccaaatgccttttttaaaactcatcacagaagattggtgaaaatgctgagtatgacacttttcttcttgcatgcatgtcagctacataaacagttttgtacaatgaaaattactaatttgtttgacattccatgttaaactacggtcatgttcagcttccttgcatgtaatgtaacctagtccatcaaatcatgtgttctggagagggttctttattcaataaaaggtttaatttaata

SEQ ID NO: 186768 - DNA, 1228 bp, Homo Sapiens
  misc_feature (201)..(223): n is a, c, g, or t
  misc_feature (927)..(997): n is a, c, g, or t
ttgggctagtggtcagggaggcctttccgcggtgggatgttgagctgaggccggaggagaagtagcagtcgctggcagagcacacaggctgctctgggggatgagctggtgcgtttaaggaacaggccagcactggcattcgcaagcagtggggaaggggagagatgccgaggtggtcagtatcctgactttcagaggccnnnnnnnnnnnnnnnnnnnnnnngctagattgatattaaaaactcatgtggaggaactcaaggaatgtttagaagaccaaaagtccccaatgacaggaacaaaagcaaccaatttttaactttctcttctcattcctgttttcattgatttcccacatgtagtccttttgctcaggaagtctttggggaaattaaggatctttgaagctctgaaataggtgatcaggttagtggtgtctgtcagctgtctaagaggttggaaaatgaactactcaagatagtcacgaaaatactgaaagtttgatttttctttccatatttgaattaattttttctgtttgactggaaggggtttttgtataactaaaacctcagcgcataaaggagatttaaaaggagcacatgatttagtgggtgggccatgaaactagagatgggatttgggggtgaatttgtcaatatctggattttaatccagacatctctgctaacaagcctttggtaagtcacttcagatacttttcctcctttttacaaagagagggctggcttagttatttgccaaagccccttccaggcctgaattccacaagtacgatttactgtagtgtcttatcactctttcatgtcacaatagcgtggagcattagagaaaagcctagacttttagttgatagccagttgaaatatcattgatagaattttagttttaggaaaaattggtttnnnnnnnnnnnnnnnnnnnnnnnnnnnnnnnnnnnnnnnnnnnnnnnnnnnnnnnnnnnnnnnnnnnnnnntcaaaatgagaacattaggctaaatgatttccgagtttccagctagtcctagagttctatatttctacatagttgaattattttatcatgctgttgttggggaatatgactaacccttttgaagctactaattttatgtcgagctttaaagtccataattgttatcttcagaaaatattatttgacctacagtatgtccaaatcaatttaataaaatcgctttataacagg

SEQ ID NO: 186769 - DNA, 2189 bp, Homo Sapiens
  misc_feature (2084)..(2100): n is a, c, g, or t
gttggggaaaagggaggcagaggaggcggaggcagaggcagaggcagagcccggtgccgagaccaagcgacagaccggcggggctgggcctcgcaaagccggctcggcgagctctcccgacacccgagccggggaggaaaagcagcgactcctcgctcgcatccccgggagccgcactccagactggcccggtagtcaggggctcaggagcagatcccgaggcaggctttgctcagcctccgacgagggctggccctttggaaggcgccttcaacagccggaccagacaggccaccatgaccgagaattccacgtccgcccctgcggccaagcccaagcgggccaaggcctccaagaagtccacagaccaccccaagtattcagacatgatcgtggctgccatccaggccgagaagaaccgcgctggctcctcgcgccagtccattcagaagtatatcaagagccactacaaggtgggtgagaacgctgactcgcagatcaagttgtccatcaagcgcctggtcaccaccggtgtcctcaagcagaccaaaggggtgggggcctcggggtccttccggctagccaagagcgacgaacccaagaagtcagtggccttcaagaagaccaagaaggaaatcaagaaggtagccacgccaaagaaggcatccaagcccaagaaggctgcctccaaagccccaaccaagaaacccaaagccaccccggtcaagaaggccaagaagaagctggctgccacgcccaagaaagccaaaaaacccaagactgtcaaagccaagccggtcaaggcatccaagcccaaaaaggccaaaccagtgaaacccaaagcaaagtccagtgccaagagggccggcaagaagaagtgacaatgaagtcttttcttgcggacactccctcctgtctcctattttctgtaaataattttctccttttttctctcttgatgctcaccaccaccttttgcccccttctgttctgactttataagagacaggatttggattcttcagaaattacagaataattcatttttccttaaccagttgtgcaaggacagcaacaaccaatctaatgatgagaatgtacttatattttgttttgctattaacctacttacggggttagggacttgcggggggggcttgtgtgttttgttggcttgtttgccatgaaggtagatgtgggtggggagaagacacaaggcagtttgttctggctagatgagagggaacccaggaattgtgaggttagcaggaatatctttagggtgagtgagttttccttgagttgggcacccgttgtgagagtttcagaacctttggccagcaggagagaggtggtagggagcagccagccggcaaaggaaggaggtggaaaaaaaccgccaccgggctgacttccacctcccagtggtgagcagtgggggcccaaacccagtttccttctcatttttgttagtttgccctttcggcctccctattttcttagggaaggggagtggggtccaagtgacagctggatgggagaagccatagtttctcccagtcagctaggatgtagccattgggggatctttgtggcttcagcaaattctcttgttaaaccggagtgaaaacttcaggggaagggtggggagtcagccaagtgcctcagtgtgccctgttgaaacttaggtttttccacgcaatcgatggattgtgtcctaggaagacttttcttttcctctggatttttgttcctcctgtacaagaggtgtctttgcttggtttggtggggctgcggccacttaaaacctcccgatctctttttgagtcctttattataagtagttgtagctgcgggagggggagggggagtgggcgggcagtggatagtaagacttactgcagtcgatttgggatttgctaagtagttttacagagctagatctgtgtgcatgtgtgtgtttgtgtatatatacatatctagggctagtacttagtttcacacccgggagctgggagaaaaaacctgtacagttgtctttctcttatttttaataaaatagaaaaatcgcgcacttgcgcgtnnnnnnnnnnnnnnnnnttttttaaacaagtgttacttgtgccgggaaaattttgctgtctttgtaattttaaaactttaaaataaattggaaaagggagaaactg

SEQ ID NO: 186770 - DNA, 1166 bp, Homo Sapiens
  misc_feature (1069)..(1085): n is a, c, g, or t
ttggcttcagaaattacagaataattcatttttccttaaccagttgtgcaaggacagcaacaaccaatctaatgatgagaatgtacttatattttgttttgctattaacctacttacggggttagggacttgcggggggggcttgtgtgttttgttggcttgtttgccatgaaggtagatgtgggtggggagaagacacaaggcagtttgttctggctagatgagagggaacccaggaattgtgaggttagcaggaatatctttagggtgagtgagttttccttgagttgggcacccgttgtgagagtttcagaacctttggccagcaggagagaggtggtagggagcagccagccggcaaaggaaggaggtggaaaaaaaccgccaccgggctgacttccacctcccagtggtgagcagtgggggcccaaacccagtttccttctcatttttgttagtttgccctttcggcctccctattttcttagggaaggggagtggggtccaagtgacagctggatgggagaagccatagtttctcccagtcagctaggatgtagccattgggggatctttggggcttcagcaaattctcttgttaaaccggagtgaaaacttcaggggaagggtggggagtcagccaagtgcctcagtgtgccctgttgaaacttaggtttttccacgcaatcgatggattgtgtcctaggaagacttttcttttcctctggatttttgttcctcctgtacaagaggtgtctttgcttggtttggtggggctgcggccacttaaaacctcccgatctctttttgagtcctttattataagtagttgtagctgcgggagggggagggggagtgggcgggcagtggatagtaagacttactgcagtcgatttgggatttgctaagtagttttacagagctagatctgtgtgcatgtgtgtgtttgtgtatatatacatatctagggctagtacttagtttcacacccgggagctgggagaaaaaacctgtacagttgtctttctcttatttttaataaaatagaaaaatcgcgcacttgcgcgtnnnnnnnnnnnnnnnnnttttttaaacaagtgttacttgtgccgggaaaattttgctgtctttgtaattttaaaactttaaaataaattggaaaaggg

SEQ ID NO: 186771 - DNA, 1287 bp, Homo Sapiens
caatttggtctcacaaggcggttcctttggccattgggcaggtatgtatccactcagggtgggaattctttgcatgggatcgttcaaagttctgaggaaagcccaatgtaggtcagacacgactgctccttggactggagaagactatccttggttgtcagtccatggtgggcaggcggtcggctgcacagcggaatcccagattcgaagcagagctatcaggtgtgttctggctccgagcagcacagcgatacctgtaacaataagacctatggcacatgtaggatccacctttcttcactcggtctttcccagaagggggaccttttgggttaagcgtttcttcaacagaatgatgaacagtccaccagtctgaagtccattcccatgcgttccccactatgttgtataagccataaccattgggagggaaggcatcaacaggcgcagttccttggaagccatcctcaccagtgttggtcaccggaaactcgccctgccaaatgttggcataatgctggcctttgggctgcagtttgttgccccaggggaaaagtctattatgcaggcctcctcgacagctgtattcccactcagcttccgtgggcagccgcttccctgcccaagtgcagtaggcaaccgcatcattccaggacacatggagaactggatgatccggcctgtgcagaatagtagagtcaggcccttctgggtgtctccagttagcgcctttcacaggtaaccaccagggagcagctgcaactgcctgttgaatattggtcttcacttgctcactcaacatgccttcaaagacaaaggagtcgccaaacttctcagcctctgtcaaatagccagttgagttcacaaacttctcaaattcagtattactgacttcataggcatccatgtaaaaggcatcaatagtaactctcctcgcaggtgcttccccatcctgctttatctgaggatcatctgtgcccattgtaaatactccagcagggatggggaccatctttgagtgcgcgagttgccgctctccgggtacggggcccggagcgttagcctcccgcgagtatcggtgagcggctgccgaactgccatgggcgccaggccgctggggcgtgccgcagccgcaagaacccgcaagggaccccgcgcccgcaccggtcccggcctcctggctccctgccgctccacacagcagcgagagcagcagcagcaagaggacgagacccagctcagggcaacgtccacacaccagccctagtgcgggcgcagccatgccaa

SEQ ID NO: 186772 - DNA, 3708 bp, Homo Sapiens
  misc_feature (551)..(564): n is a, c, g, or t
ttgggtcacgctgaggaatcaatgactgatgacaaaatcacagaagtatcctgtaaatctccacagccagagtcattcaaaacctcaagaagctccaagcaaaggctcaagatacccctggtgaaagtggacatgaaagaagagcccctagcagtcagcaagctcacacggacatcaggggagactacgcaaacacacacagagccaacaggagatagtaagagcatcaaagcgtttaaggagtctccaaagcagatcctggacccagcagcaagtgtaactggtagcaggaggcagctgaaaactcgtaaggaaaatgcccgtgctctagaagacctggttgactttcgaggagcgcgtctacaccacacgtcacactgaagagtccatgactattgacaaaaacacaaaaattccctggcaatctcccccaccagaactaaacagacactgccacgagcacaaagagatgccccaagacacgtctcaggaaagaagtaaaagaggagctctcagcagttgagaggctcacgcaaacatcagggcaaagnnnnnnnnnnnnnnaagaaccagcaagcggtgatgagggcatcaaagtattgaagcaacgtgcaaagaagaaaccaaacccagtagaagaggaacccagcaggagaaggccaagagcacctaaggaaaaggcccaacccctggaagacctggccggcttcacagagctctctgaaacatcaggtcacactcaggaatcactgactgctggcaaagccactaaaataccctgcgaatctcccccactagaagtggtagacaccacagcaagcacaaagaggcatctcaggacacgtgtgcagaaggtacaagtaaaagaagagccttcagcagtcaagttcacacaaacatcaggggaaaccacggatgcagacaaagaaccagcaggtgaagataaaggcatcaaagcattgaaggaatctgcaaaacagacaccggctccagcagcaagtgtaactggcagcaggagacggccaagagcacccagggaaagtgcccaagccatagaagacctagctggcttcaaagacccagcagcaggtcacactgaagaatcaatgactgatgacaaaaccactaaaataccctgcaaatcatcaccagaactagaagacaccgcaacaagctcaaagagacggcccaggacacgtgcccagaaagtagaagtgaaggaggagctgttagcagttggcaagctcacacaaacctcaggggagaccacgcacaccgacaaagagccggtaggtgagggcaaaggcacgaaagcatttaagcaacctgcaaagcggaagctggacgcagaagatgtaattggcagcaggagacggccaagagcacctaaggaaaaggcccaacccctggaagatctggccagcttccaagagctctctcaaacaccaggccacactgaggaactggcaaatggtgctgctgatagctttacaagcgctccaaagcaaacacctgacagtggaaaacctctaaaaatatccagaagagttcttcgggcccctaaagtagaacccgtgggagacgtggtaagcaccagagaccctgtaaaatcacaaagcaaaagcaacacttccctgcccccactgcccttcaagaggggaggtgcaaagatggaagcgtcacgggaaccaagaggctgctctgcatgccagcaccagaggaaattgtggaggagctgccagccagcaagaagcagagggttgctcccagggcaagaggcaaatcatccgaacccgtggtcatcatgaagagaagtttgaggacttctgcaaaaagaattgaacctgcggaagagctgaacagcaacgacatgaaaaccaacaaagaggaacacaaattacaagactcggtccctgaaaataagggaatatccctgcgctccagacgccaaaataagactgaggcagaacagcaaataactgaggtctttgtattagcagaaagaatagaaataaacagaaatgaaaagaagcccatgaagacctccccagagatggacattcagaatccagatgatggagcccggaaacccatacctagagacaaagtcagtgagaacaaaaatgcttgaggtctgctagacagaatgagagctcccagcctaagtggcagaggagagcggagggcagaagagtgcgaaggttctcatgcagaatcagaaagggaaaggagaagcaggaaattcagactccatgtgcctgagatcaagaaagacaaaaagccagcctgcagcaagcactttggagagcaaatctgtgcagagagtaacgcggagtgtcaagaggtgtgcagaaaatccaaagaaggctgaggacaatgtgtgtgtcaagaaaataagaaccagaagtcatagggacagtgaagatatttgacagaaaaatcgaactgggaaaaatataataaagttagttttgtgataagttctagtgcagtttttgtcataaattacaagtgaattctgtaagtaaggctgtcagtctgcttaagggaagaaaactttggatttgctgggtctgaatcggcttcataaactccactgggagcactgctgggctcctggactgagaatagttgaacaccgggggctttgtgaaggagtctgggccaaggtttgccctcagctttgcagaatgaagccttgaggtctgtcaccacccacagccaccctacagcagccttaactgtgacacttgccacactgtgtcgtcgtttgtttgcctatgtcctccagggcacggtggcaggaacaactatcctcgtctgtcccaacactgagcaggcactcggtaaacacgaatgaatggatgagcgcacggatgaatggagcttacaagatctgtctttccaatggccgggggcatttggtccccaaattaaggctattggacatctgcacaggacagtcctatttttgatgtcctttcctttctgaaaataaagttttgtgctttggagaatgactcgtgagcacatctttagggaccaagagtgactttctgtaaggagtgactcgtggcttgccttggtctcttgggaatacttttctaactagggttgctctcacctgagacattctccacccgcggaatctcagggtcccaggctgtgggccatcacgacctcaaactggctcctaatctccagctttcctgtcattgaaagcttcggaagtttactggctctgctcccgcctgttttctttctgactctatctggcagcccgatgccacccagtacaggaagtgacaccagtactctgtaaagcatcatcatccttggagagactgagcactcagcaccttcagccacgatttcaggatcgcttccttgtgagccgctgcctccgaaatctcctttgaagcccagacatctttctccagcttcagacttgtagatataactcgttcatcttcatttactttccactttgccccctgtcctctctgtgttccccaaatcagagaatagcccgccatcccccaggtcacctgtctggattcctccccattcacccaccttgccaggtgcaggtgaggatggtgcacagacagggtagctgtccccccaaaatgtgccctgtgcgggcagtgccccgtctccacgtttgtttccccagtgtctggcggggagccaggtgacatcataaat

SEQ ID NO: 186773 - DNA, 1593 bp, Homo Sapiens
  misc_feature (826)..(841): n is a, c, g, or t
  misc_feature (860)..(1129): n is a, c, g, or t
  misc_feature (1449)..(1467): n is a, c, g, or t
ttggatcaaaagaggtggtgatgcagggatgcctggaatagaagagaatgacctagcaaaagttgatgatcttccccctgctttaaggaagcctcctatttcagtttctcaacatgaaagtcatcaagcaatctcccatcttccaactggacaacctctctccccaaatatgcctccagattcacacataaaccacaatggaaaccccggtacttcaaaacagaatccttccagtcctcttcagcgtttaattccaggctcaaacttggacagtgaacccagaattcaaacagatatactaaagcaggctaccaaggacagagtcagtgatttccataaattgaagcaaaatgatgaagaacgagagcttcaaatggatcctgcagactatggaaagcaacatttcaatgatgtcctttaagtcctaaaggaatgcttcagaaaacctaaagtgctgtaaaatgaaatcattctactttgtcctttctgacttttgttgtaaagacgaattgtatcagttgtaaagatacattgagatagaattaaggaaaaactttaatgaaggaatgtacccatgtacatatgtgaactttttcatattgtattatcaaggtatagacttttttggttatgatacagttaagccaaaaacagctaatctttgcatctaaagcaaactaatgtatatttcacattttattgagccgacttatttccacaaatagataaacaggacaaaatagttgtacaggttatatgtggcatagcataaccacagtaagaacagaacagatattcagcagaaaactttttatactctaattcnnnnnnnnnnnnnnnngagacagagttttagtctnnnnnnnnnnnnnnnnnnnnnnnnnnnnnnnnnnnnnnnnnnnnnnnnnnnnnnnnnnnnnnnnnnnnnnnnnnnnnnnnnnnnnnnnnnnnnnnnnnnnnnnnnnnnnnnnnnnnnnnnnnnnnnnnnnnnnnnnnnnnnnnnnnnnnnnnnnnnnnnnnnnnnnnnnnnnnnnnnnnnnnnnnnnnnnnnnnnnnnnnnnnnnnnnnnnnnnnnnnnnnnnnnnnnnnnnnnnnnnnnnnnnnnnnnnnnnnnnnnnnnnnnnnnnnnatgagccactgcgcccagtctacacactaattcttgttagcccaacagctgttctgttctatctacccctcatttcacgctcaaggagtcatacctagaatagttacacacaagagggaaactggaagccaaacactgtacagtattgtgtagaaagtcacctccctactccttttattttacatgagtgctgatgtgttttggcagatgagctttcagctgaggcctgatggaaattgagataacctgcaaagacataacagtatttatgagttatatcttagttcttgaaattgtggaatgcatgattgacaatatannnnnnnnnnnnnnnnnnncaagtaataccagtactgtttaactatagccagaactgggctaaaatttttatattttcagagttgaagttggtgaagacattcatgatttaaacaccagatcctgaaaggggttaaatctacttt

SEQ ID NO: 186774 - DNA, 1998 bp, Homo Sapiens
atttttaccatttttgacgtatgaaaatagttttttcatagggttgaacctaacaaaatctgaacttagctagctggctatatctcatatactatgcagtactttctgctttacttcagcaggaagaatgaaaatgcttaccccattcaccagttcttatgcagccttgcaaaactgtgcttgcaaactgctggtgaatttcatgaaaatacttagaggtatagtaattttcatatatttagcatttaactgaaaaaaaggtccaaactgagcatattatctttgtaactacatcacccactacttaactggaacagcctaccttataaagatggcttttgcagacttaaggccaggtctagaatcaataggccaaacaataaaatatcaaaacattttcaactgggattctgctacctctgtgtcctccataacactcaatatttagagtgcccgagacactgcgctaagcaccagtaaaagagaaacgccccaaaaacttcaagaaacttaccatctttcaagaaatataaaaatataaataataagagaatattctaagagttttaagtttcaaactgggacagagtaaaatgtaaaaagacagcacttcagaagttttaaactgacttcaaacgttaaggaaaaaggcaaatacaaatgtgctttgagtctaaatccaggtcaatatgataatcaaatgtgctctcctccacagttctggccccaagaagtcctcttatcaccccataacagtgactagagatcctccaggtcagttaagtccacggccactttcaagaacagagtgtcatctttaatgtaggcgttcttggcattctccaaaacagaatgagccacaaagcggggacagccagatgcaatgttcatctccccatcaggtcttttaaagctgctgctattggggtcaggtttgaaggtctccataatgttctttttgccactctggtccagaagcatcagggtcaccctctgcgtgaatggccactgcaacagtgagtcaaactctcctcgcatgaccacaaagtatagggacaggtgtgaccccctccctgacccatccccattcaggtatgctctagcacagagccggtagccacagcggctggtgtagaaggactggctgaagatggacactgtgtgcccatccaccgcctctctcttcttcatcttgtaatctgtcaccttccaaatgagctttccattatagcaagtaccctccagcagtttaaatcgctcttcatttttactcagctgtgctttatgaatattaatgtgggtatcatgtttgttagtttcctcttctaaaacggctaatctttgatcattgttttctagcagggtaattttctgtttcactgtatcaactgcttccatcaaaggtctcaggtcaaatttattttgttgctggttaaccatttgtaataattgatgcacttgagcttctagccaagctgacttgtcaatgtgactggcaaaaacctggatgtttgggaggaagcttccatttttgccaaacaactgtgcaaactgcttgaactccttttcaagtttctttatagtttctgctagctgctggattttactttctttctgttctaggctcttgtgtaagtcagaaatctaataacaggaacgtgaggaaaaataaagtcactgaatataactgcatgcatatagttaaaatatgcatgcacttgcagctaagaaagtatttctaggaaaaaatctacatatttatttctaggaaaatatttacagggtagattcctacataattataggaagatattcacaggtggttccaaaaagccacatctacagaatttctcatcagccttttctatacctaacctactatgatggttcacctaatgacagacatcacctgactgaatttactgaactggttctcttcattcattcaacatggacttattaagcaaccacagaagccaggcccctgtaatctcaggt

SEQ ID NO: 186775 - DNA, 1219 bp, Homo Sapiens
gtaaagaagatcacgatcttcagaaccaaggctatcaccagattcagctcgagggacacgagttctttggaattttcctggttttggactttcatcacttctgctggtgtctttcaattccagtctaggtgtggacactaaactctctggacttactacaccaactgtttgtgccaatggtgcaagtaaagacattgaggagatattcagtgcatcttcctgttcttcgctgctttctgctaatgcttgatccatctcctcttggctcttctccatatctagttcaccttcctctaggacatcactgaagaggtcattaattactttcgaactattgatatcatcatcatccacactcatctcaatttcacgtatcacttcaattttctgctcaacctttgggtctgatgttacttttaaggatttgtcctcttctaaaaacaatgttattttcaaagggctagatttcgtcatttcgcattcagtgaaacctttgggttctgtactagaatttttggctggtatctggttttcggtcaccttttctgttactggaagtgactgagtttttgaaacaccttggtgttttttgaggggagtgctctgacagtgagtttcctgtttggtttctagttgtttgctttttgagtttccgcctttttctgcactccatatattgcccttgtcaaatcggccacgaagacatgctagttctttttgacgttcctgcttgagctgttgtgctaaatgggtagtagatgaagatgtgtcttgcttgaataatctttcttggatggcctttgtatttggagtaataatgggggttctgtggggtgtgctacgagctggactttctttgctatgttcttgacaacgctctccaaagcgttccaggaaaggcttaattcctgttcctcctggtgtcgtagatttgtctttagattgagattgcagacaaatttctctacttaattctcccttggatggaactgtctgggataaagttgacttcacaattggtttcgatacccccgttttcagaggactaataggagtttttggaagtagctcaggattttgtccctcacaacttttagcatcagtgatagatgtagtagatttcactggagaagtagctttcacagagctggaaattgaggcattaaccaaagacgcatcatcagcacttgaggatagggctttattcaaagaggcccaa

SEQ ID NO: 186776 - DNA, 1392 bp, Homo Sapiens
acgtcatcctcgaacctcacttccgcccccgttaacagtgatagaaagacacttttagaatagccgccccacctaaaaggacactctaaattcaccaacagtgaaagctcaggccaaattgcgtgaagctcttagcagctacaggccaccattattggttgccattaactctgtcagctgaaatcgtcttcccatcacccacaatgtgtggttaatgattttatatacagagtttacaaaactgctgagtaaaaagctcatggcactcctatactcacgctctggagagttggtagaaaaaaagaatgtgttctgataaaacctctgatcctcactgttcacatccatgtaacagggctcggtcccctcaaaatctcatgatacagcttctgggaaggagttattaaccctgtcacttcccagattgctgatactcacaatgtttccatttgcagattcctgccaagaatgatgaggcaggattaggcccaactggtgctctcccactagctgctgtatttacatacacttctgttcatcatctctgcccgtttcaggagtagctgagagcttgaataggtggcggtaagctcccaccaccaccccatgcccagtgcagctacccgcctgaatgaaggcagctcctcggacatgtgaggtgtgaggagtggggggaagatccagggaagtcagctgctttgtatttgggtttgtgggatgtaatggccttggcaggaatggtggggcctgaactggtatcctgcagagaaatgcttctatatccatctatcgcctccttgccctctgtcttcccaatgctaagcccatctggtcttccttgcatgctattctatgctctggtggtaagtcaaatcctttaagtgaacccgacattggaaacaaatcagtttaattaaagtctctctgctgagataatgtagtgactgctaggattccagatatttaactagaatctaaatagtcaagagttcttccttttctttccctccttggctgagagattcaccactctgtgggtggaactgtgccatagggccattcaattactcctagactagctgttggtaactagactgggaatcatttctacacaaggaatcctgtgatggctgtgctgctgtgtggggagagctgcctcctgggacatccatgcagtgattcagaaggccaccagcatggctatgtctgaatctcggaagtgaataggttccagctaacaaattatcagctctcctgtaagtggaagcagctctgcagtccaccacacataagcacagtgcatggaaaatgggaagacagcttcttcaggagcccaggatgtaggaaggagccaggactgagaggaggggtcccccaacttttttgtacaaa

SEQ ID NO: 186777 - DNA, 1404 bp, Homo Sapiens
ttggcttggcatggagctggcactgcggcgctctcccgtcccgcggtggttgctgctgctgccgctgctgctgggcctgaacgcaggagctgtcattgactggcccacagaggagggcaaggaagtatgggattatgtgacggtccgcaaggatgcctacatgttctggtggctctattatgccaccaactcctgcaagaacttctcagaactgcccctggtcatgtggcttcagggcggtccaggcggttctagcactggatttggaaactttgaggaaattgggccccttgacagtgatctcaaaccacggaaaaccacctggctccaggctgccagtctcctatttgtggataatcccgtgggcactgggttcagttatgtgaatggtagtggtgcctatgccaaggacctggctatggtggcttcagacatgatggttctcctgaagaccttcttcagttgccacaaagaattccagacagttccattctacattttctcagagtcctatggaggaaaaatggcagctggcattggtctagagctttataaggccattcagcgagggaccatcaagtgcaactttgcgggggttgccttgggtgattcctggatctcccctgttgattcggtgctctcctggggaccttacctgtacagcatgtctcttctcgaagacaaaggtctggcagaggtgtctaaggttgcagagcaagtactgaatgccgtaaataaggggctctacagagaggccacagagctgtgggggaaagcagaaatgatcattgaacagaacacagatggggtgaacttctataacatcttaactaaaagcactcccacgtctacaatggagtcgagtctagaattcacacagagccacctagtttgtctttgtcagcgccacgtgagacacctacaacgagatgccttaagccagctcatgaatggccccatcagaaagaagctcaaaattattcctgaggatcaatcctggggaggccaggctaccaacgtctttgtgaacatggaggaggacttcatgaagccagtcattagcattgtggacgagttgctggaggcagggatcaacgtgacggtgtataatggacagctggatctcatcgtagataccatgggtcaggaggcctgggtgcggaaactgaagtggccagaactgcctaaattcagtcagctgaagtggaaagccctgtacagtgaccctaaatctttggaaacatctgcttttgtcagtcctacaagaaccttgctttctactggattctgaaagctggtcatatggttccttctgaccaaggggacatggctctgaagatgatgagactggtgactcacagaatagatgggatggggctggagatgagctggttgggcttgggg

SEQ ID NO: 186778 - DNA, 1454 bp, Homo Sapiens
ttgggttttgaagccaagtgaagagtgtggtttgcatccaagagaaaacaccacactgtgatgtcatcgggaaatgatctcccaagtcgctgccagacaccacccactgcttcgccggacaatgtcgaagtccagtctgtgccggggaaggcactggttaggaaggatgttcaaacggtcccacccaagcctgtcacctctgctcatcctccaagaccacccagctttctcccagccacagccaagattcccaaagtcaaggcccaaagatttccaaggttcccaaagtcaaggccaggccaaggcctggttgggtccttggggcgggcagggccagcctctcctctgctgagaatccccacttggtgtagggggagaggggaaaggggtctggcccatcgaggggccccttctgccagggccttggttgctggggcagggcctccccactgggggtcttcctccacctcccactttccaagggctccaggaatctggggcctgaccacagattcctctcccatccttttctgctccaacctgccccactgggtcccggcaggggccatgcctaccaagctcgagctggcccttgacccccacccacccccacccttgctggcaggggcagggaccccagggggattgactctgcagtttgggagccacaaaaagcgtagcggtgtgatttctagctcagcctcccaccgtcttcctcctacacaccaatgatgagcctcatgccagtgaggcccggagcgcttgggaggggtcccagtggggcaggcccctctgtctggccacccctctgtcctggccccggaaggccctgtggtcatgtgctcctagctgcacggtggctgctggccacaccacggcaagtggcagcaggggccggccctgtgcacaaggatgcactcctctcggcccctgtagactttctctaaagccgcccgccagcccaggccgctgctctgcaccgagctggtgggcttgggttttgtggagcgcatgcttggaccctttcagtaaggaagggtctttggggttttctgtgcccatgacttgggggctgcacccccacagcacccccacaatgtaggaaaagacctcagggaacctctccctggaaagacgggcagggctggttagcccctcccactgcctgacacctgggacaggctgggcagaggggagagagggcaggacaggccagagtgacgcccccgtgcagcttgggccggagggcaagggatgccagtaattctgcaagtgcggggtgccacctacaggccaaggcctgtgtcccaagcagtaccaaggctttgcagaccacgcggggcagggctccactgtaacctcccccaccactccccagctagctccataaggaagcctgtgtctcctgcccccctgggcgcaccctcagtgcaggcacctctgttcccgctttg

SEQ ID NO: 186779 - DNA, 985 bp, Homo Sapiens
ttggcacattctacgcctagcctggctttcttgctctccctcatctcattgtttcagcggaggccaaatctgaagtcctttccagggagtggctctgttcatcttattcgccagccaaagtaggaacagcgtaagaggagagagacacattcagcagccaaaggactcggtggaaagagcagaacaccatagacaatatgtcgctcttgggacccaaggtgctgctgtttcttgctgcattcatcatcacctctgactggatacccctgggggtcaatagtcaacgaggagacgatgtgactcaagcgactccagaaacattcacagaagatcctaatctggtgaatgatcccgctacagatgaaacagttttggctgttttggctgatattgcaccttccacagatgacttggcctccctcagtgaaaaaaataccactgcagagtgctgggatgagaaatttacctgcacaaggctctactctgtgcatcggccggttaaacaatgcattcatcagttatgcttcaccagtttacgacgtatgtacatcgtcaacaaggagatctgctctcgtcttgtctgtaaggaacacgaagctatgaaagatgagctttgccgtcagatggctggtctgccccctaggagactccgtcgctccaattacttccgacttcctccctgtgaaaatgtggatttgcagagacccaatggtctgtgatcattgaaaaagaggaaagaagaaaaaatgtatgggtgagaggaaggaggatctccttcttctccaaccattgacagctaacccttagacagtatttcttaaaccaatccttttgcaatgtccagcttttacccctactctctactttttcacccaaactgataacatttatctcattttctagcacttaaaatacaaagtctatattattgcataattttgctgcttctcaatatcatagacacagtgaatagatgatgactata

SEQ ID NO: 186780 - DNA, 945 bp, Homo Sapiens
actttgtacaaaaaagttggccaaatctgaactcctttccagggagtggctctgttcatcttattcgccagccaaagtaggaacagcgtaagaggagagagacacattcagcagccaaaggactcggtggaaagagcagaacaccatagacaatatgtcgctcttgggacccaaggtgctgctgtttcttgctgcattcatcatcacctctgactggatacccctgggggtcaatagtcaacgaggagacgatgtgactcaagcgactccagaaacattcacagaagatcctaatctggtgaatgatcccgctacagatgaaacagttttggctgttttggctgatattgcaccttccacagatgacttggcctccctcagtgaaaaaaataccactgcagagtgctgggatgagaaatttacctgcacaaggctctactctgtgcatcggccggttaaacaatgcattcatcagttatgcttcaccagtttacgacgtatgtacatcgtcaacaaggagatctgctctcgtcttgtctgtaaggaacacgaagctatgaaagatccatgattagaagaattggcagctggatatataaaggaaactaacatttactgctcacctgtgctagatgagctttgccgtcagatggctggtctgccccctaggagactccgtcgctccaattacttccgacttcctccctgtgaaaatgtggatttgcagagacccaatggtctgtgatcattgaaaaagaggaaagaagaaaaaatgtatgggtgagaggaaggaggatctccttcttctccaaccattgacagctaacccttagacagtatttcttaaaccaatccttttgcaatgtccagcttttacccctactctctactttttcacccaaactgataacatttatctcattttctagcacttaaaatacaaag

SEQ ID NO: 186781 - DNA, 1978 bp, Homo Sapiens
  misc_feature (246)..(256): n is a, c, g, or t
ttgggtaaagcaatactagctatactttggcatgtataatatgtcttttttaattcttttactttcagtgtttatgaatcctcctatttaagggtatgtcttttaaaagcaacatgtaaatttatatatattttaatttaatataggaatcttttcatttgtttttagtccatttacatttaatatcttttctaatttactaattctttattctgcagtaaatttcatccaatacattcttaattnnnnnnnnnnnttatctccccaaagtttatatagttgtcctgacccgccatttacttgttgtttctgaaataagtctctaggtagtgtattttaacaatatctgattctcctcagtacagttctactatttacttaaatgagtcagtgaattccagttgaatttgccttgttctcaattgagtacaaaaacactatcttgacctaaaaagatagaaagtatttccttctttctttttttcaagtgttgcgtaccataccaagcaaattgcttagaaaataagttctactagattttgctttcactaaatttccctagccaatattgtcattttgattttaataacatggtattaaaaattatgtattgctggtgcggacacagttgcgtgaggggtttgtgctatcctcggtgctgtggtgcagagctagttcctctccagctcagccgcgtaggtttggacatatttgactcttttccccccaggttgaattgaccaaagcaatggtgatggagaagcctagtcccctgctggtcgggcgggaatttgtgagacagtattacacactgctgaaccaggccccagacatgctgcatagattttatggaaagaactcttcttatgtccatgggggattggattcaaatggaaagccagcagatgcagtctacggacagaaagaaatccacaggaaagtgatgtcacaaaacttcaccaactgccacaccaagattcgccatgttgatgctcatgccacgctaaatgatggtgtggtagtccaggtgatggggcttctctctaacaacaaccaggctttgaggagattcatgcaaacgtttgtccttgctcctgaggggtctgttgcaaataaattctatgttcacaatgatatcttcagataccaagatgaggtctttggtgggtttgtcactgagcctcaggaggagtctgaagaagaagtagaggaacctgaagaaagacagcaaacacctgaggtggtacctgatgattctggaactttctatgatcaggcagttgtcagtaatgacatggaagaacatttagaggagcctgttgctgaaccagagcctgatcctgaaccagaaccagaacaagaacctgtatctgaaatccaagaggaaaagcctgagccagtattagaagaaactgcccctgaggatgctcagaagagttcttctccagcacctgcagacatagctcagacagtacaggaagacttgaggacattttcttgggcatctgtgaccagtaagaatcttccacccagtggagctgttccagttactgggataccacctcatgttgttaaagtaccagcttcacagccccgtccagagtctaagcctgaatctcagattccaccacaaagacctcagcgggatcaaagagtgcgagaacaacgaataaatattcctccccaaaggggacccagaccaatccgtgaggctggtgagcaaggtgacattgaaccccgaagaatggtgagacaccctgacagtcaccaactcttcattggcaacctgcctcatgaagtggacaaatcagagcttaaagatttctttcaaagttatggaaacgtggtggagttgcgcattaacagtggtgggaaattacccaattttggttttgttgtgtttgatgattctgagcctgttcagaaagtccttagcaacaggcccatcatgttcagaggtgaggtccgtctgaatgtc

SEQ ID NO: 186782 - DNA, 2207 bp, Homo Sapiens
  misc_feature (1242)..(1250): n is a, c, g, or t
  misc_feature (1290)..(1304): n is a, c, g, or t
  misc_feature (1565)..(1573): n is a, c, g, or t
  misc_feature (1731)..(1752): n is a, c, g, or t
  misc_feature (1833)..(1841): n is a, c, g, or t
  misc_feature (2123)..(2133): n is a, c, g, or t
ctttgtacaaaaaagttggcactgagcctcaggaggagtctgaagaagaagtagaggaacctgaagaaagacagcaaacacctgaggtggtacctgatgattctggaactttctatgatcaggcagttgtcagtaatgacatggaagaacatttagaggagcctgttgctgaaccagagcctgatcctgaaccagaaccagaacaagaacctgtatctgaaatccaagaggaaaagcctgagccagtattagaagaaactgcccctgaggatgctcagaagagttcttctccagcacctgcagacatagctcagacagtacaggaagacttgaggacattttcttgggcatctgtgaccagtaagaatcttccacccagtggagctgttccagttactgggataccacctcatgttgttaaagtaccagcttcacagccccgtccagagtctaagcctgaatctcagattccaccacaaagacctcagcgggatcaaagagtgcgagaacaacgaataaatattcctccccaaaggggacccagaccaatccgtgaggctggtgagcaaggtgacattgaaccccgaagaatggtgagacaccctgacagtcaccaactcttcattggcaacctgcctcatgaagtggacaaatcagagcttaaagatttctttcaaagttatggaaacgtggtggagttgcgcattaacagtggtgggaaattacccaattttggttttgttgtgtttgatgattctgagcctgttcagaaagtccttagcaacaggcccatcatgttcagaggtgaggtccgtctgaatgtcgaagagaagaagactcgagctgccagggaaggcgaccgacgagataatcgccttcggggacctggaggccctcgaggtgggctgggtggtggaatgagaggccctccccgtggaggcatggtgcagaaaccaggatttggagtgggaagggggcttgcgccacggcagtgaatcttcatggatcttcatgcagccatacaaaccctggttccaacagaatggtgaattttcgacagcctttggtatcttggagtatgaccccagtctgttataaactgcttaagtttgtataattttactttttttgtgtgttaatggtgtgtgctccctctccctctcttccctttcctgacctttagtctttcacttccaattttgtggaatgatattttaggaataacggacttttaaagaagcnnnnnnnnngactgaatttccttgcttactttgcatatacagactggannnnnnnnnnnnnnnacagccatttccccaaaggaatgtcttgcatattactgacatttggtatgtttcattcattggaatatttcttattttctacgtgtttgaaaagcctgtaagaaatacaggatttgataatattttgaaggcaggaaaaacccaaattgtttcttctttgagagtcatgactaccttctggtgtggagaaattgccattggaaaatttgacaattttgattctcactggtatgtttaaaaactgaataaaaggaatagaannnnnnnnngataaaggatcacaaaacaattctaaaacctaactgtttttaccattgaaatttaaattgtgataataggttttaaatgtctagaatgcaactgataggcttttcttgaactgttagtttttttgaagtagttttttcatgtttaatttgtatttgtnnnnnnnnnnnnnnnnnnnnnnttcccaaaacccagataacaaccagagcaaaactgttgtgccttctatttatctttgatttcagtcttggcaattgttttnnnnnnnnntctagatttgttttattaggttcagagtatgtggggaattatagaatccctctttcatcactttgtgtatgtcttttgttaacatatttgttatgccttattctaaaattgagtctcaaactggaatgcctttgaagacagatgcttctatagaggttctttgacctaaatagttcagcatttgtatttttattctggtatctaatcagattcctaatcatagcccgtaagaaggaatgttactttaatattgggactttgctcatgtgctcgtgtccgcannnnnnnnnnncttaaaatcatagccatatggtaaattttctattttgttatggttctcttttattgatgggcatgcagtgggtg

SEQ ID NO: 186783 - DNA, 1686 bp, Homo Sapiens
ttgggtcgggcaagaaggagaagaagtaacatggaggccaggccaagagccacagggcggcctctccccaaccagcccagcttctccttacctgcacccaggcctcagagtttcagggctaacccccagaatactggtaggggccaaggccatgctccccttgggaaacagaaacaagtgcccagtcagcacctaccccttcccccccagggggttgaatatgcaaaagcagttccgctgggaacccccatccaatcaactgctgtacccatgggggtagtggggttactgtagacaccaagaaccatttgccacaccccgtttagttacagctgaactcctccatcttccaaatcaatcaggcccatccatcccatgcctccctcctccccaccccactccaacagttcctctttcccgagtaaggtggttggggtgttgaagtaccaagtaacctacaagcctcctagttctgaaaagttggaagggcatcatgacctcttggcctctcctttgattctcaatcttcccccaaagcatggtttggtgccagccccttcacctccttccagagcccaagatcaatgctcaagttttggaggacatgatcaccatccccatggtactgatgcttgctggatttagggagggcattttgctaccaagcctcttcccaacgccctggggaccagtcttctgttttgtttttcattgtttgacgtttccactgcatgccttgacttcccccacctcctcctcaaacaagagactccactgcatgttccaagacagtatggggtggtaagataaggaagggaagtgtgtggatgtggatggtgggggcatggacaaagcttgacacatcaagttatcaaggccttggaggaggctctgtatgtcctcaggggactgacaacatcctccagattccagccataaaccaataactaggctggacccttcccactacataatagggctcagcccaggcagccagctttgggctgagctaacaggaccaatggattaaactggcatttcagtccaaggaagctcgaagcaggtttaggaccaggtccccttgagaggtcagaggggcctctgtgggtgctgggtactccagaggtgccactggtggaagggtcagcggagccccagcaggaagggtgggccagccaggccattcttagtccctgggttggggaggcagggagctagggcagggaccaaatgaacagaaagtctcagcccaggatggggcttcttcaacagggcccctgccctcctgaagcctcagtccttcaccttgccaggtgccgtttctcttccgtgaaggccactgcccaggtccccagtgcgccccctagtggccatagcctggttaaagttccccagtgcctccttgtgcatagaccttcttctcccacccccttctgcccctgggtccccggccatccagcggggctgccagagaaccccagacctgcccttacagtagtgtagcgccccctccctctttcggctggtgtagaatagccagtagtgtagtgcggtgtgcttttacgtgatggcgggtgggcagcgggcggcgggctccgcgcagccgtctgtccttgatctgcccgcggcggcccgtgttgtgttttgtgctgtgtccacgcgctaaagcgaccccctccccccgta

SEQ ID NO: 186784 - DNA, 1294 bp, Homo Sapiens
  misc_feature (295)..(475): n is a, c, g, or t
ttggggccaacatggcggaacgcaggagacacaagaagcggatccaggaagttggtgaaccatctaaagaagagaaggctgtggccaagtatcttcgattcaactgtccaacaaagtccaccaatatgatgggtcaccgggttgattattttattgcttcaaaagcagtggactgtcttttggattcaaagtgggcaaaggccaagaaaggagaggaagctttatttacaaccagggagtctgtggttgactactgcaacaggcttttaaagaagcagttttttcaccgagcccnnnnnnnnnnnnnnnnnnnnnnnnnnnnnnnnnnnnnnnnnnnnnnnnnnnnnnnnnnnnnnnnnnnnnnnnnnnnnnnnnnnnnnnnnnnnnnnnnnnnnnnnnnnnnnnnnnnnnnnnnnnnnnnnnnnnnnnnnnnnnnnnnnnnnnnnnnnnnnnnnnnnnnnnnnnnnnnnnnnnnctccaggaactcctaaaaagaaggaaactaagaaaaaattcaaacttgagccacatgatgatcaggtttttctggatggaaatgaggtgtatgtatggatctatgacccagttcactttaaaacatttgtcatgggattaattcttgtgattgcagtaatagcggccaccctcttccccctttggccagcagaaatgagagtaggtgtttattacctcagtgtgggtgcaggctgttttgtagccagtattcttctccttgctgttgctcgatgcattctatttctcatcatttggctcataactggaggaaggcaccacttttggttcttgccaaatctgactgctgatgtgggcttcattgactccttcaggcctctgtacacacatgaatacaaaggaccaaaagcagacttaaagaaagatgagaagtctgaaaccaaaaagcaacagaagtccgacagtgaggaaaagtcagacagtgagaaaaaggaagatgaggaggggaaagtaggaccaggaaatcatggaacagaaggctcggggggagaacggcattcagacacggacagtgacaggagggaagatgatcgatcccagcacagtagtggaaatggaaatgattttgaaatgataacaaaagaggaactggaacagcaaacagatggggattgtgaagaggatgaggaagaggaaaatgatggagaaacacctaaatcttcacatgaaaaatcataatctgactaattttgggactgaatgaataagtacaagaggaaatccacactgatttgtacgtctgactgagagaaagatggtc

SEQ ID NO: 186785 - DNA, 2692 bp, Homo Sapiens
  misc_feature (2469)..(2478): n is a, c, g, or t
tttgtacaaaaaagttggcttaaagaaagatgagaagtctgaaaccaaaaagcaacagaagtccgacagtgaggaaaagtcagacagtgagaaaaaggaagatgaggaggggaaagtaggaccaggaaatcatggaacagaaggctcggggggagaacggcattcagacacggacagtgacaggagggaagatgatcgatcccagcacagtagtggaaatggaaatgattttgaaatgataacaaaagaggaactggaacagcaaacagatggggattgtgaagaggatgaggaagaggaaaatgatggagaaacacctaaatcttcacatgaaaaatcataatctgactaattttgggactgaatgaataagtacaagaggttggattttctatgttggctgattaccatattgaacacatggcatttgtagcattctttaaatctatctactgaaatgtatttgacattcaagcagttatattcggtccttcattttatagaatattggcactattattggtacagtttaaagccattaatatgttttatccatttgataattttacagtaagtaggtctcattcattttgacagttatcaaagatgtactttccacagttaaatttacattaatggcaatttttgatagttttatggctttttactgttagactaatcaaaaataactttaaaaggaacaaagaaactccaacatttcacattatgcatagttatgtagccatttcacagtttctttaagatgtgtaaactcattgtccttgatagtttttatttttcattataaaattataccaggagatttcttttaagattctgagttagcagagttcaaaactattttgtggaaacaagccaactagtaacaatgcagcaacacttctggtttagctaaattatttttccaatgtaggaaatccacactgatttgtacgtctgactgagagaaagatggtcgtctccagcagagaaagtgaacagcatttgttggaaggtgatggctctccctcctccctccccatttcattggcgtaacgtaaagtgtattctgtacataatttacaaataaaacattttattttaattgttacttattatttagatatttctcaacacttaaattcataaaattaagaccatgtaagggtatgtttttagagaaatggaagtttgagtaacccacagaacatctgtgatctttctacagcagcttcagttttgtgccaacattccatgtattttgaatatgagcaaaaactgatcttaagagcagacttaaagtagctttgtacgccttaatgttcattttgatttattttaaatctttacattcagaaatgagatactgtattatcagaccaggaggcattgctgtgaaagataatttcctattctaaaatatcaaatttaaaataaagataatgaaagaaaacataagagaactattggactctaattgctttgaactagttttgcagtttgactttacgtcttatacatcttagttacaagtctttggaaactcttgtttacttatgagcataatcattccttggagttatactaactaataatgaatattaaatgatttttcttcagtcacagtgagagcatcttgctttgtggttgaaataggtagtgtatgtcagtctttgctttaggctgtttctcatctaagtgtttgaattaaagatgttaaatttttctaattgtgaaaaatatgttttctgtatcgacacattttattaaacttgggattgcttctttatagtagtccctgtaagtggacataaatgtggctatttgatgttaatgcaactatgtcaaggctgcaatcactttaatagtttctttttagcaaataaatgttcattgatgaagtgcctgggtattttcccgtcccatttgcagagctctactacttcatttccacagtaagcatatatataatgatcacttctgagtttatcaccagtaacattgatacctattttggggtataaacatggtgtttttcagaaataaaaattatttcattaacctttactattactgtgataatacccaggcactcaatattcatcctgaaattttttataatatatgtaatttgtctagtcttaaagacatttggagcatggccaacaggaaggtcagcttcttactgatgtgtgtggattcttacagaatgttagtacaaatttttataaatatttggtgatccctggggggaaatatcattcttactatggttagaaagtgaattagaaatttcagctcagtttctattttactattcaagttgtgtactttaaacaaatataaaaatcaaaaggctgcctctattacaatcctcagtggaatagatggctatctttcttggctaacattaaatattcttgtaccagagcatggaaaatcgtttataattgttaatagaatggcgannnnnnnnnnaagaacttcagatttgctatgctgctgtaagtagaaagcatgaagctttttgatcatgtagggcttattgtagagggtatcaattggcctaactaagcaggattgaatttaccagaggctaagttcagatagtaagaataatgcatatgtgattgttcttaaagtcaatgtattaaatagagtatttttccttttccctcttactggatttttc

SEQ ID NO: 186786 - DNA, 1540 bp, Homo Sapiens
  misc_feature (1063)..(1204): n is a, c, g, or t
gaaagaattgatagtacaaaatccaacaacaatactgagatgatctaagaaggttataacaaaatgctcttcagaaatacctaagtgctgagaatttttagtactaaagagcacagctgctcaaagtaaagcctgagcagtgttctcagtaatgtatttgaaggaaaaataccctgatttgaaaccaacagcagatgttgcaaactttcataccactgctggccatggaagcctcttaacaacacactgtcatttaaggctgtgcttgtgctttatacaaagagaaagaggtggtcttaaggggatgcttccaggggggtgagttcatgcctctcctgtattttccagcaagtggggtatgtgtggtggtttgttttttagaggggcataataatccaggattctaagcatatgctcagctattttaaagaggaaattaaatattataaaagaaatagtaaagataagttatcctcacttaggcaaaagcacaggtcctttccatatcaagtttagcctaccagggttgttttttgttttaaccctgcttaataatgttggtgttttagaagtagatacaggcactgctctgaaaacctggctagccaaggatattctcagaatgttatcacctgtttgtcaaagcttgtttaaattataaaacacttttaattatatatatgaggcaaaagaactaagacttttttcaaactaaattagaaaggagtgtcattatttgactgttaaaccaaaatatttttggtgggtctttttatggaagtttaaagaaaggacatcctcatagatatgatctaacagtatttctaactatatttgatcattaaaagcctcttggaatttgaagcgtgacgtgtttctaatgccccttgagaggtgaaaaataccacataatgatcagtatgctgtgccagcttcatttggggagaaataactagtagaaagttctgggtgtgaggtgtacagcagtctaggtggcatagtgatgaagaaagggatcagagtctgactgtcactcagaatcctgggctcagttgcttgacannnnnnnnnnnnnnnnnnnnnnnnnnnnnnnnnnnnnnnnnnnnnnnnnnnnnnnnnnnnnnnnnnnnnnnnnnnnnnnnnnnnnnnnnnnnnnnnnnnnnnnnnnnnnnnnnnnnnnnnnnnnnnnnnnnnnnnnnnnnnncggaaagtggctaatgttagctactatgaatggtgccagtgaagacactgaaaaataagtgatttcagtaaccttctggaaagctatcagtttcaaataatattttctctgtagtatgagatgaaattaaaagtggatagctttcaggaaagataaagagaacatgcttagaatgtaagctaaacagattttttctgttgctctttgaaaactatgagccctggccagcttaacctggtctgaggtgagactaaacacaaaaacagtagataaatctctccctaaaagatggattcccccacatacccatgctactagtttctctgtctattcaca

SEQ ID NO: 186787 - DNA, 918 bp, Homo Sapiens
ctttgtacaaaaaagttggagaatgttcacaagaatgatgtaaatgtggaattttcagaaaaagagttgtctgctttggttaaacttccttctggagaggattacaatttgaaactggaacttcttcatcctataataccagaacagagcacgtttaaagtactttcaacaaagattgaaattaaactgaaaaagccagaggctgtgagatgggaaaagctagaggggcaaggagatgtgcctacgccaaaacaattcgtagcagatgtaaagaacctatatccatcatcatctccttatacaagaaattgggataaattggttggtgagatcaaagaagaagaaaagaatgaaaagttggagggagatgcagctttaaacagattatttcagcagatctattcagatggttctgatgaagtgaaacgtgccatgaacaaatcctttatggagtcgggtggtacagttttgagtaccaactggtctgatgtaggtaaaaggaaagttgaaatcaatcctcctgatgatatggaatggaaaaagtactaaataaattaatttgctctcatcgtattgtgtatattcacctaatgcccattgtgtattgatattgcattcttgaattttgaacactgaatatctttttgaaagattatacttctttacctctttgtgctttagaaattattttccttcaagtgttcaagtctaatgaagaatgaagataacattttatcacttctgtccttaaagatttcagacatggtgaaactgaataaagcatgtcatttgctcctagatagattcattctatctagtttgtggggatggagaaatctttaatggtatattttcggttattgccttatttttgatacagtattctgtcagtaatttattagacctggcagctttggg

SEQ ID NO: 186788 - DNA, 1294 bp, Homo Sapiens
  misc_feature (801)..(809): n is a, c, g, or t
ttggcttgtttaacagcatataccatcttcctatgcatggaaactcattatgagaaggttctgaagaaagtctccaaatacattcaagagcagaatgagaagatctatgctccacaaggcctcctcctgacagaccctattgagcgaggactgcgagtttttagattgaaattaccatttatgaagacagaggcatgagcagtggaagataaaccgaagaattaaagatcccacttccagccgggcccctcatgtatccactggccgaccgcagagtgtccctacctcctctccagagcatcattcctttctatctgctgccagagccacggtgccatttactccaaggactcactttctaaaattccacacctggagtgacctctagtcgctcagcatccactttgtgtctccaaattgtgtaggactctgtaatcttttgattagtttctgagaaaacacaatgaagcacttcacttttttttattcaaagccatttaataaaacacagttggtcagcccagtgcaaagcttgttatctgccaccagtacataccattggttctcttcattccttgggccagcttctcaggtggctttagacctcaacaagccgtatcttcaccagtgttctatcttgttcccctaaattaataaaatgtttttctccaggattttggtgagggttggctgtggctgtcgttttgcacctcccagatttcaaagaattactggttttaccatgactcaaatcttaagatctgtttctactattcagttcctcaaactgaagcttattgnnnnnnnnntgtataatgttatttgttttattatagcaattattcctaattaaagcagtatttaatgcaatttccagttatttctttggagaattttatgtcattgttccattaccttgaatgttggaaagatatgatacgtgctgcttgttcatcacaaaaatcagtaagcacaataaagtggatgccaaaccatcaaacacatagatgttcccgctgtgtccctggatatggaataagcaggtataaaaaatattttaattatagttttgttacaaatataacttatgagaaaaaaatttgataggaataatactgtatattactaatttttaactatccctaaggcaaaccttatgacccacagaattttctcatatacagtattcagtgcacagaaatcttatgattggctcaagtacagtaagttacttctcagtaaactctcaagtctgagtccatatttgtagctctgcttttggctgtacgtttcc

SEQ ID NO: 186789 - DNA, 1854 bp, Homo Sapiens
ttgggtcagtccgggggctgcggctgcagaagtaccgcctgcggagtaactgcaaagatgctgtccgtgcgcgttgctgcggccgtggtccgcgcccttcctcggcgggccggactggtctccagaaatgctttgggttcatctttcattgctgcaaggaacttccatgcctctaacactcatcttcaaaagactgggactgctgagatgtcctctattcttgaagagcgtattcttggagctgatacctctgttgatcttgaagaaactgggcgtgtcttaagtattggtgatggtattgcccgcgtacatgggctgaggaatgttcaagcagaagaaatggtagagttttcttcaggcttaaagggtatgtccttgaacttggaacctgacaatgttggtgttgtcgtgtttggaaatgataaactaattaaggaaggagatatagtgaagaggacaggagccattgtggacgttccagttggtgaggagctgttgggtcgtgtagttgatgcccttggtaatgctattgatggaaagggtccaattggttccaagacgcgtaggcgagttggtctgaaagcccccggtatcattcctcgaatttcagtgcgggaaccaatgcagactggcattaaggctgtggatagcttggtgccaattggtcgtggtcagcgtgaactgattattggtgaccgacagactgggaaaacctcaattgctattgacacaatcattaaccagaaacgtttcaatgatggatctgatgaaaagaagaagctgtactgtatttatgttgctattggtcaaaagagatccactgttgcccagttggtgaagagacttacagatgcagatgccatgaagtacaccattgtggtgtcggctacggcctcggatgctgccccacttcagtacctggctccttactctggctgttccatgggagagtattttagagacaatggcaaacatgctttgatcatctatgacgacttatccaaacaggctgttgcttaccgtcagatgtctctgttgctccgccgaccccctggtcgtgaggcctatcctggtgatgtgttctacctacactcccggttgctggagagagcagccaaaatgaacgatgcttttggtggtggctccttgactgctttgccagtcatagaaacacaggctggtgatgtgtctgcttacattccaacaaatgtcatttccatcactgacggacagatcttcttggaaacagaattgttctacaaaggtatccgccctgcaattaacgttggtctgtctgtatctcgtgtcggatccgctgcccaaaccagggctatgaagcaggtagcaggtaccatgaagctggaattggctcagtatcgtgaggttgctgcttttgcccagttcggttctgacctcgatgctgccactcaacaacttttgagtcgtggcgtgcgtctaactgagttgctgaagcaaggacagtattctcccatggctattgaagaacaagtggctgttatctatgcgggtgtaaggggatatcttgataaactggagcccagcaagattacaaagtttgagaatgctttcttgtctcatgtcgtcagccagcaccaagccttgttgggcactatcagggctgatggaaagatctcagaacaatcagatgcaaagctgaaagagattgtaacaaatttcttggctggatttgaagcttaaactcctgtggattcacatcaaataccagttcagttttgtcattgttctagtaaattagttccatttgtaaaagggttactctcatactccttatgtacagaaatcacatgaaaaataaaggttccataatgcgta

SEQ ID NO: 186790 - DNA, 472 bp, Homo Sapiens
gttgaactggaaatttaacaggaagttaaacagctcttattatagtaattagccaaaacaccttttattcccaaaattggtaaagaataaataatatagtttacaatatggtacaaaaaataaccaggaaaggcaggcattatgctttatacatacactgtatatgcatatttataatctataaaacaaattcatatttgaaacgagcggaggcctcgctatggcttaaccgagtaagagagagaaggggagcggggcgcgggaggcagggccaggggctgggctccccacacctcacccaccccaaggacacgcagccactgtgacatcaggagagcgctgacagccgcgaagggtgtgctgtgggtttttttccttcgttgtaaattactctttccttgctttctttttttaacttgagacccagtttcgctcttcttgcccaggctggagccaacttttttgtacaaag

SEQ ID NO: 186791 - DNA, 1944 bp, Homo Sapiens
  misc_feature (834)..(844): n is a, c, g, or t
ttggcaccgctgttctgggtattcatttttcatcactgagcattgttgatctatgccttttgggcttctcagttcaatgaagcaataatgaagtatttaactctttcactacagttcttgcaagtatgctatttaaattacttggccaggtataattgccagtcagtctctttatagtgagaaaatttattggttagtaatataaatattttaaactaaatatataaatctataatgttaaacatatgttcattaaaagcatagcactttgaaattaactatataaatagctcatatttacacttacagcttttcatttgatcaggtctgaaatctttagcacttaaggaaaatgactatgcataattatacctgaccatgaaaaaaataagtacctcaaatgcatgcatttgcactggtgattccaactgcacaaatctttgtgccatcttgtatataggtattttttacatgggttgacatgcacacaacaccattttcattcagtatgaaccttgaggctgctgccatttttccacttaaccaaaccagcctgaaggtgaacctcgaaacttgtttcataaatctttcaaaagttgttttacatcaatgttaaaatttcaaaatgctgcagggtaatttaatgtataaaatattagtaagaaaaagtatgtattgcatacttagtagaatagatcacaacatacaaattcaattcagtgcatgctttaggtgttaagcatgagattgtacatgtttactgttaggtccttgcatctgtggtgctaggtgagtatgagaagatgtcaaggactggacgtattttgttgcctnnnnnnnnnnnggctgtttgtaggcgttttaaatatgcttattttgtgtgtctctcactacctattacacactgttgctttgtgggtttgttttgtatgtgcgtgtgttatacagtagttaaatttccatgcagaaaaataaatgtcctgaattttcatattagtattctttattgtatatcatgcatgtaatttatttagaaatgtaggtcttactaaatgtatatgcatgtatttcagattatactaggatttcttggattagaagcagattgtgttaactgtaacttaaagaatgaatgttaaataaaatgatacagatttattttcttcattacaaaatgaaatttcaagaaggtgttacttttgtagaatggttttataatatgacaagaaattttaatatagtgtctaccctaaagggatggcttatttgcatctaccttttactgcatgtttttcacaaggcagtttattcatatattgacatattttggtagtagctgagaacctaagacttgaaattatacattgtgtagtattttttaagctaagcaatgcaattttggtcagatcttatttgtgtgaagataggctctgaaatcctatggtattgcgtttgtaacgttgatattaatgcaaaatagtttaggaaatggagtcttctgcaagggttctgtatacttttcccacattgtatgagattttccaaaattttggtgtgaattgggcacttttggaaaactcctgaaaaagaattagtttccttcatctgcagacctttgtccaatacggttaccatttctttatagtaactcgattagccatatatgtttgtttctagtcctgctcctttgctcctctcctatgccttcccagtgctggctccattttgaagactcatgacagaggggaagcagatcataaagagaaaaggagacagaagaaaggatgaagaaggaggtcatggggagtgtggcttctgagcagtttagttgctggggagagcagacagtcactgcctacaatacagacagaaccttcctgctcactttctgtcctatctcttcctgaccttatgaacaatgttagtagatgattaaaacatgac

SEQ ID NO: 186792 - DNA, 1599 bp, Homo Sapiens
  misc_feature (503)..(511): n is a, c, g, or t
  misc_feature (981)..(1003): n is a, c, g, or t
gacactacaatctgctatttatttgacaaagtcagtttccagagagaatctaggcaaccatatagttttgaaggactagatgaaacctcaagtctcacaccagtcagctgttaacatccaatcaaggaagtcatttggactttccatactatacttctcttggtagtaaaattgtatgcaattgttgccaatgactacatacaactgtatcctatttgtgctactttcctcactgtggccagcagagggctcacaagctttatttccacagctgctgatccagtgacaaattcatgaaggaaataaatcataggcatgctagcttatgcgtcatagaaaacgtttttacaaactactacgtccactgccctgaagaaactagtcttggttcccccttagtgtaatgtgttttgaaatggtatagaaagtaaaaataaattaataatacaatattatacacttatttgacaagacagggtttacaaaaattttggcaaatatgnnnnnnnnnttatcctagtctgttaaacacttttgctatctcaattgtttaaattaccagattagtgattgtgtcaatttacacatgaggaggtggtattttaagggctcaacaaagcggcatttgacacaaaggtaatttctttgaagggggataaagaataaagatattattatcttcattattacagttcgagaagtggttgtcctgataagaattcatcccacacaaatattaacaccagcagtaagcagcaaattgtggcgaggagaggctagagggaaaagttagaagaaaagcaaagaaaagacgaagagacaagagacatgattccaataagctttaaatcaataggcaaacacttctcatttatgatccatcttgctacaggtggttatgtgagaagacacagtgtcgccaaagctgacctagtatttaggtccctagagggattgctgatctgctaagagaaataattnnnnnnnnnnnnnnnnnnnnnnnggacaaccatacattttggtagtcttttaaaaaaagctactacaaagatatcaataaccatccaaaaatcacttaaaatttaatatcccttaatttccaaagacactttgtgatctgactgttcttgaaggaaagcctagaactgaaactactagaacttggctcctctctaggaatgtggagacaggtattctgcaaaggagaacttgacaaggaatgctacaaaataccagtcacctctttagaagctcctcccacctctcctgctccatttgatggaatggcaggctggattcagagaggcacgtgccaaaggagctgtttaaatccctctagacatcccttttcaatggatatctcttttgagtataaagagagctttcaatgtgtcttgctatcattttcctgaccctaatcccagattaactagaatcacctttagcatctaagtgagtgggtgctatgaccttccatcaacgcatgtggcatagatgctaaagcaccagtcttacatggtgggaaccatgttaaaaatcaatggataaagtagcagagcctctaaactaagaagaaagagacatagcttaattacccaa

SEQ ID NO: 186793 - DNA, 1775 bp, Homo Sapiens
ttggcagtgtataaagaatcctttgaatctcaatttttggctgacacagagagattttataccagagagagtactgaattcttgcagcagaacccagttactgaatatatgaaaaaggcagaggctcgtctgcttgaggaacaacgaagagttcaggtttaccttcatgaaagcacacaagatgaattagcaaggaaatgtgaacaagtcctcattgaaaaacacttggaaattttccacacagaatttcagaatttattggatgctgacaaaaatgaagatttgggacgcatgtataatcttgtatctagaatccaggatggcctaggagaattgaaaaaactgttggagacacacattcataatcagggtcttgcagccattgaaaagtgtggagaagctgctttaaatgaccccaaaatgtatgtacagacagtgcttgatgttcataaaaaatacaatgccctggtaatgtctgcattcaacaatgacgctggctttgtggctgctcttgataaggcttgtggtcgcttcataaacaacaacgcggttaccaagatggcccaatcatccagtaaatcccctgagttgctggctcgatactgtgactccttgttgaagaaaagttccaagaacccagaggaggcagaactagaagacacactcaatcaagtgatggttgtcttcaagtacatagaagacaaagacgtatttcagaagttctatgcgaagatgctcgccaagaggctcgtccaccagaacagtgcaagtgacgatgccgaagccagcatgatctccaagttaaagcaagcttgcgggttcgagtacacctctaaacttcagcgcatgtttcaagacattggcgtgagcaaagatctgaacgagcaattcaaaaagcacttgacaaactcagaacccctagacttggatttcagcattcaagtgctgagctccgggtcctggcccttccagcagtcttgtacatttgccttgccgtcagagttggaacgtagttatcagcgattcacagctttctacgccagccgccacagtggccgaaaattgacgtggttatatcagttgtctaaaggagaattggtaactaactgcttcaaaaacagatatactttgcaggcgtcgacattccagatggctatcctgcttcagtacaacacggaagatgcctacactgtgcagcagctgaccgacagcactcaaattaaaatggacattttggcgcaagttttacagattttattaaagtcgaagctattggtcttggaagatgaaaatgcaaatgttgatgaggtggaattgaagccagataccttaataaaattatatcttggttataaaaataagaaattaagggttaacatcaatgtgccaatgaaaaccgaacagaagcaggaacaagaaaccacacacaaaaacatcgaggaagaccgcaaactactgattcaggcggccatcgtgagaatcatgaagatgaggaaggttctgaaacaccagcagttacttggcgaggtcctcactcagctgtcctccaggttcaaacctcgagtccctgtgatcaagaaatgcattgacattctaattgagaaagaatatttggagcgagtggatggtgaaaaggacacctacagttacttggcttaacccttctggaagggtctgactgtgtgacccgcagcaaatagttcatgttggaaagaatgaaaacaactcaagttcatagcagccagcctgccgccattggacctcccttttaaaaa

SEQ ID NO: 186794 - DNA, 2366 bp, Homo Sapiens
ttggggcagaaggagaaggtcgggttgtagaagctggggtggccggcagctcgctcatcggtgttcgtgggctttgtcggtccgtgcctcgtctctccctggaaagggagggaggcttcgacgtcgagagggagccgctgccgcgttagttccgagcttgaagtcactaggacttctctcaaacttgtgtgctgaggagactcagatgttggcctcagctcctaggctgaactcagcagatcggcccatgaaaacttctgtattgagacaaaggaagggatctgtcagaaagcaacacttgttatcttgggcttggcagcaaggaagaggacaggtagtggagatcctgcaatctgaaaagcagactgaaaggtgacaaagaagctgaagatgggtggtggagagaggtataacattccagcccctcaatctagaaatgttagtaagaaccaacaacagcttaacagacagaagaccaaggaacagaattcccagatgaagattgttcataagaaaaaagaaagaggacatggttataactcatcagcagctgcctggcaggccatgcaaaatggggggaagaacaaaaattttccaaataatcaaagttggaattctagcttatcaggtcccaggttactttttaaatctcaagctaatcagaactatgctggtgccaaatttagtgagccgccatcaccaagtgttcttcccaaaccaccaagccactgggtccctgtttcctttaatccttcagataaggaaataatgacatttcaacttaaaaccttacttaaagtacaggtataaaataagacaaatgtttaaatttagttatgttcacggatagttgtcaattggtctgaaacaaattcgctagggaatctatttgtgtagaactaattaatgtaaaaaaaacagaccatctcgtgttgtgtgcactgtgatataatggtagtatcagtgcaactttaatgattgtacttgatattaagtgttctcaactgagtaacttttaagtggaaaccaagtttagatttggggagtggtaaaggaatcagctttttctattgttaggggaagacagtaatttatcattcatggaccagtagattgttgaaagttggtgaatcggattataagcttctagctaacacaaggattcagaattaggtaaacatctgaaggtttagtatattagaaacacccaaaccagtaatatgctaacctgatgcactgctgaaagaaaatgtgaatttttcgtaataattgcattttagtgaattgtacagtgggtggaaagggcatttggagctcattagaatgagacatagtacaccccaatggccctgtttattaaatgtagtggattaagtgtctgtcaacaaatacaccaaaaccattttttatagaaacagtatttaatggtcactcaatagctttcaaaatacatttttgtattacagcactgcacaagctattctaatagtgctctcgcctcatcattcctgcaaagcttgctttggggagttggataatgtgaaaattttaagtacctaggggagaaagagccatgtaaatatctgtaataaacttgtagcatatgtaaagttttcttggcctttatcttacaaaaatggagtattttagtatgaatttgctgaatgtaagaccgtggactgttttttataatatggcctaattttaaaggtccaaaataacttgtttttaaagtttgcccttgtgctaaagtgccagtgtatgtatgttatacttgatttggttgtaaactatatttcaaagtaaaccctagtgtaataagttttataactaaaaaggtttaagctgctaaaactatttttaagagatgtgaaatgcagtatgggactatctttttttcctcctctaagcccaaagattaactagagtccctccaaccttatagattgttggctttcacaatcttataacctaggatacaggtagtttcgagtatggtgccagtgatgttttgtttttgtttggtcaaggggtaggtgcaacccaatggaccacttatgcaaaagatgtaaactcttgcataatacattgataacatgttttgccaactttaaatgcttaaacataagcgaaaccagtagcaagtatgtgggtcagcttaaaaattttgattgttaatgccctattttctaatttggcacctcttgatgcctaagcaggtaagcagatgcctaagctgtatttctccaaataaatcaagatgaagtactgcccaagttaaatattgatagcctaaagacaagtttatgtagtacttaatgtacatgatatgaatgtgaagcataaaattaataaaatttttcccc

SEQ ID NO: 186795 - DNA, 2063 bp, Homo Sapiens
aatagccaactttgtacaaaaaagttggccctcgctgcccgggcccggagcgcagcgcggccgcacagattcacaatgttgaaagcccttttcctaactatgctgactctggcgctggtcaagtcacaggacaccgaagaaaccatcacgtacacgcaatgcactgacggatatgagtgggatcctgtgagacagcaatgcaaagatattgatgaatgtgacattgtcccagacgcttgtaaaggtggaatgaagtgtgtcaaccactatggaggatacctctgccttccgaaaacagcccagattattgtcaataatgaacagcctcagcaggaaacacaaccagcagaaggaacctcaggggcaaccaccggggttgtagctgccagcagcatggcaaccagtggagtgttgcccgggggtggttttgtggccagtgctgctgcagtcgcaggccctgaaatgcagactggccgaaataactttgtcatccggcggaacccagctgaccctcagcgcattccctccaacccttcccaccgtatccagtgtgcagcaggctacgagcaaagtgaacacaacgtgtgccaagacatagacgagtgcactgcagggacgcacaactgtagagcagaccaagtgtgcatcaatttacggggatcctttgcatgtcagtgccctcctggatatcagaagcgaggggagcagtgcgtagacatagatgaatgtaccatccctccatattgccaccaaagatgcgtgaatacaccaggctcattttattgccagtgcagtcctgggtttcaattggcagcaaacaactatacctgcgtagatataaatgaatgtgatgccagcaatcaatgtgctcagcagtgctacaacattcttggttcattcatctgtcagtgcaatcaaggatatgagctaagcagtgacaggctcaactgtgaagacattgatgaatgcagaacctcaagctacctgtgtcaatatcaatgtgtcaatgaacctgggaaattctcatgtatgtgcccccagggataccaagtggtgagaagtagaacatgtcaagatataaatgagtgtgagaccacaaatgaatgccgggaggatgaaatgtgttggaattatcatggcggcttccgttgttatccacgaaatccttgtcaagatccctacattctaacaccagagaaccgatgtgtttgcccagtctcaaatgccatgtgccgagaactgccccagtcaatagtctacaaatacatgagcatccgatctgataggtctgtgccatcagacatcttccagatacaggccacaactatttatgccaacaccatcaatacttttcggattaaatctggaaatgaaaatggagagttctacctacgacaaacaagtcctgtaagtgcaatgcttgtgctcgtgaagtcattatcaggaccaagagaacatatcgtggacctggagatgctgacagtcagcagtatagggaccttccgcacaagctctgtgttaagattgacaataatagtggggccattttcattttagtcttttctaagagtcaaccacaggcatttaagtcagccaaagaatattgttaccttaaagcactattttatttatagatatatctagtgcatctacatctctatactgtacactcacccataattcaaacaattacaccatggtataaagtgggcatttaatatgtaaagattcaaagtttgtctttattactatatgtaaattagacattaatccactaaactggtcttcttcaagagagctaagtatacactatctggtgaaacttggattctttcctataaaagtgggaccaagcaatgatgatcttctgtggtgcttaaggaaacttactagagctccactaacagtctcataaggaggcagccatcataaccattgaatagcatgcaagggtaagaatgagtttttaactgctttgtaagaaaatggaaaaggtcaataagatatatttctttagaaaatggggatctgccatatttgtgttggtttttattttcatatcc

SEQ ID NO: 186796 - DNA, 1497 bp, Homo Sapiens
acagggctgggctggctgggatgcgctggcagccccggatggagtaagagcctggctgtcagccacgcaggtgccctgcacaggacctggggctgggacagggcaccaggcaggcaggaggcctcaccccggggtgcagaaggccccaggggtagcagtttacagaagatgtctcagtcctgtaagtaacaaacagaaacaagccccagcgcttcccggtcccctccccgtggcccgcaccaaaccctaagctgtctcctaaaacttcagctgtttccaccaccacgctgacgaccagaaagacaaaccaaaacccatatgaagggcaatctttcaattgcttaaaattaatcagtgcaaagtgaggtaaaagatccccgtttgtcagggccgaggcaggaggctcacacaagcctgcgtctcttggagtccctccccaggtccccctcctcgacatccacctcacagcccagtggggacaccaggttcagcagagggtcctcagaggcacggccgaagagcgccagcaggagggccacaccgaagcctgtggctcgctcaccagcatgcaccggtgcagcaatgtccaggtggacccagactccggccagtcgaagccgatgtgtgaggcgatgaagaggccagcacaggagctggggctgttgtctcggtccgccactgagttcttcatgtccgccacagctgaggtgaactcgctgaagtgcagctcggggcagtagaccagcgggtgcaccaggtccccacacttcctgcccgccttcacacaggcggcctcccactcagcgctgttggtgagcaccgcggcgtggtacttccctgtggcaatgccctgagccccggtcagggtggccatgtccaggatgatgtcggcccccaggtccttgcaagcataggacacgccatctgccagcaccagcctgccctcggcatccgtgttgttgatttccaccgtcttccctgagtacagcaggtggatgtcatctggccttgtcgcattgggccccaccgagttctcagccaagcagaacacagcgtggaggttgtctttgaaaccctgcttgattgcggctctgaaggcccccaggacggccgcagcacccccgcagtctcgcttcatccccggcatggtagtcttccctttgatgctgaggcctccagtgtcatagacgatgcctttgcccacccaggcgatggtctgcgtggctccatctggggtgtggctgaggacggccagggctgggggatgcagggcggctttgccaaccccatagattcctccaaatcctctcgtcttcagttcctcatcccggatgatggttgggatgatccccagctcctttccaactttgttaatctcctcgaggaaggtgtcggtgttcatctcattgcagggtgtgtccacgatgcgggctgctagccgcacgccgtctgtggcattcgctaagcactgcaatgtccaacttttttgtacaaagt

SEQ ID NO: 186797 - DNA, 852 bp, Homo Sapiens
ttggataaaaacatgggttcttagtctttggctatctgttaaagcctatgaatgccttcttaaaatcatgtttttaaatgcataaaatatataggattacaaaggaatctaattatatcgaaatacagttattaaaatgttaaaagataagttatatattaatatgcatgcttctttataaatgcattaaataagagttaatagctatcctaaatttgaaatagtgataagcataatgaaaatagatgcaaaaaactaatgtgatatgaaaatatctgggtttttcttttgatgatgaagtattgctaatattaccgtggtttatgaactatgttcagaattgaagaaaatcctaactttcagttagaggttagtgacggggttcaggacaccctacacaaaatacagcactttgacatattgaatattttaagctgaaggcatttgaggaaattgcagaagcaggaaggtgactctgacctgcctgctgttctccccagaagcagccataaaacctgggaaggattttctgaccttcccctgaagtagatcataagactgtcatgtaagaggtgctctcctggcacccagagaaaaggagcatccttacctccaaaagcacagggacacaaagaggaatctaaacaaacaggcctctcagtttcccccagtttattacatttagcttgttcacactttgccctatgacatttctacatcactggctgctcttcatcaaacctactataaaaaacattcaagttcaactgtttctttgggcctttatttccttatggaggccctcgtgtcgtgtaaaacttatattaaataaatgtgcatgcttttctcttg

SEQ ID NO: 186798 - DNA, 1504 bp, Homo Sapiens
  misc_feature (379)..(395): n is a, c, g, or t
  misc_feature (412)..(420): n is a, c, g, or t
  misc_feature (700)..(709): n is a, c, g, or t
  misc_feature (1042)..(1067): n is a, c, g, or t
ttggcaagaaactagagttactatacaagaaactctcctgagtttgtaaaccttaagcataaggattcagttgacctttttcttggttcatcaatctggaaagaacttacataaagcgccattgacactgtcacctgggagctccatgggccgtaagtctttgacagccaatttaatttgaggtcagagggccttgaggtacacagtcagcactgtttgaacacttttcctgaaagcaaaactcacagctccctgcgccctctgacaacactagctatttctgccagagtaagaacttctattactattttattattgttcatatgtcttttgatgatggttgtgtgacagggggaagcaggatctatttggtttcttnnnnnnnnnnnnnnnnnttcctttttgtctctcnnnnnnnnnctctaagaaaatcaccagactagtttttccatcttgagtaatttcttatgtgggacagttttgatcctcattttgaaagcatgcgtgtgcacatgtgtgttgcctgtggtgccaggtgagacaggtggcactaactccagctgcttggaaggcatcccaagggcgcatcttaaagttggagcagacctcccttttccagcccctggggccattagaccacgtgctggaactagcattgtaaaattcccatcccagttccactcccctgaagtgaaacccnnnnnnnnnngtgacagtaaatcttaaaaatcattgtctctttatgaacatttcctcagtttcttctctgctgaaaatgtaagccatgctactttttaatgtattttgaattttgtgctcattggaaattgatatgctaatgcctcccccaccccccgccagacttttctttttatactttgtcttgtttttactggggtaggctgggcatgcgtgcgtgcctttagggcagcattttaaacctttgccaaaattgcaaatgggacatgtacattcttctgctccatcctacttaaacacctatcagctatttttatctttaaccttttctgtatgtttgaannnnnnnnnnnnnnnnnnnnnnnnnnaaagagcgagagaatgatgtcatctaaagttttttgaagaattatttggttttcattgcattaaaattctatcactcccagctttgttttcatttaaaaaaatatacaaagagctttgtaaatacaacacattttatttctcccccttcttttaatgtacagcttttttgccacttatatatacttaaaatattcccatgaattatgtccagttcttcttggaaaaaaatttggttttgaatgaacctgcaaagcatcctgcagcgtgagcagctcctccacctggagctccgaagcatcttctcaggccaaagcggcattacccgtgaatctgtcttctccgccacagcatggtttgaggcgcagtctgttaatatagctgggccatgtcagtgactgttgtgtttgtggggtcaggtggggggcatggtatttgc

SEQ ID NO: 186799 - DNA, 1057 bp, Homo Sapiens
ttggcttgtgctgactctagcacagtggccaggatccaatacgagtccaggggtgaccgcaggatggtgggggcagcgggcttctccacctaccccagccaccaaggccctgacgcactgcctcctgcaccttcagcacatccctgtgcacagctggaagggtgcatggcccgctcacctttgttcagatgggtggaacgctgatgataccagctcctccctgccgtgcccctgccacggagcaggcattgtgaactggctggtgtttgcagtcccacgtggcatggcctccagcccaacccacagtggagactggagacagggcaatgagtctggtcgggggcacgtggacatgccccataggggccccacccagacttaacaggcaaggtcctgggcattgcgcgacgcaggactcaatgctaaagcaagcctgcctggctctgtgccagggcccctcttctgatttacacatcccatttttacacagacccttccttcttaataaaggctgacagttctgttggcagccaagaacccacaccatgaagacagggagtgaggggcctttgtgcccaactccagcacagctgcgttctggggtgtgtgagaggcatgttcgtgtctgtgcgctggtggtctcgtgagacagttccgaggacggggaaattgcagggtggtgggggcgtgaggcttatatgtggaactgatgcagagttcgcctgcagacggatctggatatacactatgtataattgttacgtgtaatttaaaatatatctgtttgccatcgtcatgagaagattatatgtaaggctctgaagggagagggagatgtacattctgccaggctcctggggaccttatccgagtcatgaaattgatgactgttgatccagtggtgcaagaagctacactccatgtgtcatcacgcttatgactcctaatgtatttttaagcaaaaaatgtcagccgactccatcttcacctctcgattcctcgagtccagcctttctgtgccagtgcttcactgagccacaacgctctcgccatcggg

SEQ ID NO: 186800 - DNA, 1433 bp, Homo Sapiens
  misc_feature (240)..(248): n is a, c, g, or t
  misc_feature (526)..(536): n is a, c, g, or t
  misc_feature (1052)..(1074): n is a, c, g, or t
  misc_feature (1182)..(1191): n is a, c, g, or t
gaaataaattcacatggtacttttccactaatactgtgatggtacataattgtgtagtcggtaatcaaagaaactacattagagaagccacattaagtaacatccgatttaaaaagtcccttgggataagagccctcaagcagcgacccctcaaggtggatattaaaactgaaagcagtgctttaactctttcctggagtatctacatgaaaaaaacaacattctgaaaatttcacattnnnnnnnnngcttcatagaagtcactttgaaatgctaaaatagccaaaggccagaaattgagggtataaaaactccattcagaacagattcaaaactagtacactgaaaccttggtaatctatgggtgtaggttagggacatcttctttttccatttgtttatcatttctcccaatttcccaatggctgctttatatctcaataattttaacctaaaaatattgtaattttagttggaaggaataaaattaattgcatctagattcattgcagatttgttttagttnnnnnnnnnnngagaacaatttgagactcactattttccattattcatttttttccacataattatttctagctacttaataaacatttggggattgaatccctgaagttacatatttaaaatttgaggaaatcctttttctcctcttctagttttttctttattgaagtcactagagatgacaaacttttttattataaacttttttccaacaaaaaagatattttaggtgactattagattgatagctaaatatcctcatcaaagtcaaaacatctgtaactaaaaagtgctgtcttttgcaagctacacaattaagagcttaactatcaataatgtaattttgtactcctggaagagtattcctgatctaggtatcaaaggtttacgtaggaatatatttactatataatatgagaaattcaaagagcagagataaaaagcacagatctaatggccataccatttttagaagttacaatagctagaatattgctatttctcaatggattatagtattttaattnnnnnnnnnnnnnnnnnnnnnnnccgcacaagattcatcataatgcatataaagtatttagcacaatgcttggtacacaataactattcaataaatattagctctataataaacaagggattaaaataatnnnnnnnnnncaaacaggagaacccaaaatgaagggaaaaacttagagctaatttcctagagtatgtatttaaatggaaagtcggagctcacagagagcagtcaggaattctgcattttctggatctatcttttgtgccttctcatagtactcagcagcttgcctcttttctccttccagcttgtaaacaaaccctagggcacttaaactctgcacatctaaagcattgtgacaaagtgtcttggtagccaa

SEQ ID NO: 186801 - DNA, 3222 bp, Homo Sapiens
  misc_feature (598)..(631): n is a, c, g, or t
ttgggtttttcagttattcaagttctgttctgttttatggacctatggttctagcctttcaaatccactaaactgcagtgtgaaaacagtgctgcagactcaagctctttatgtgggctgtgcaatgctttcttctcagaagacacagtgtaaacaccaactggcatccatatcttctccagtggtgacatctttactcattaacctgggaagccccgtaaaagaagttcgtagggctgccattcagtgtctccaggccctcagtggagtggcatccccgttttatctgataatagatcatttgatttctaaagcagaggagatcacttcagatgctgcctatgttattcaggatttggctactttatttgaggaactacagagagaaaagattacaaaaccattttttgcagccatatcagatgaaaaagttcagcagaagcttttaagaatgttgtttgatttattggtgaactgtaaaaactcacattgtgctcagactgtcagcagtgtttttaaagggatttccgttaatgctgaacaagtccgaatagaactggagccaccagataaagctaaacccttgggcacagttcannnnnnnnnnnnnnnnnnnnnnnnnnnnnnnnnntcacaagatctagaatctgttcacgaagttggaggttcttactggcaaagagtaactctcatcctggaattactgcagcacaaaaagaagctcagaagtcctcagatattggtgccaactctttttaacttgctatcaagatgtttagaacccttgccacaagagcagggaaatatggaatacaccaaacaattaattcttagttgtctgctcaacatctgccaaaaactatctccagatggtggcaaaatacccaaagatattttagatgaggagaagttcaacgtggagttgatagttcagtgcatccgcctttcggagatgccgcagacccatcaccatgcccttttacttttgggcactgttgctggaatatttccggataaagttttacacaatatcatgtctatttttacatttatgggagccaatgtcatgcgcctagatgatacttacagttttcaagttattaacaagacagtgaaaatggttattcccgcacttattcagtctgatagtggagattctatagaagtttcaagaaacgttgaagagattgtggtaaaaatcattagtgtatttgtggatgcgctgccacacgtcccggagcacaggcgcctgcccatccttgttcaacttgttgatacactgggtgcagagaaattcctctggattctcctcatcttgctttttgaacagtatgtcacaaaaacagtgctggcggctgcctatggcgaaaaggatgctattttagaagcagacactgaattttggttttcagtctgttgtgagtttagtgtccagcatcagatacaaagcttgatgaatatcctccagtacttactaaagctgccagaggaaaaagaagaaaccattcccaaagcagtgtcatttaataagagtgaatcacaagaagaaatgctacaggtttttaatgtagagactcacactagcaagcaactgcggcattttaaatttttgtcagtgtccttcatgtctcagctcctgtcttccaataattttctgaaaaaggtagttgagagtggtggtcctgagattttaaaaggccttgaagagaggttgctggagaccgttctcggctatatcagtgcagttgcacagtccatggaaaggaacgcagacaaactcaccgtgaagttctggcgcgcgctccttagtaaagcttacgacctgttagataaggtcaatgccttgctgcccacagagacattcattcctgtgatcagagggctggtgggcaatcccctgccatctgttcgccgcaaagcgctggaccttttgaataacaagctgcagcaaaatatatcctggaagaagacaatagttacccgtttcctaaaactggttccagaccttttggccattgtgcagcgtaagaaaaaggaaggggaagaagaacaagcaatcaacagacagacagcgttgtataccttaaagcttttatgcaagaattttggtgcagaaaatccagatccttttgtcccagtgctgagcactgctgtgaaactgattgctccagagagaaaggaggagaagaatgtcttgggaagcgcgctgctgtgcatagcagaggtgacctccaccctggaggcgctggccatcccccagcttcccagcctgatgccatcgttgctgacaacaatgaagaacaccagcgagctggtctccagcgaggtctacctgctcagtgccttggctgctctgcagaaggttgtggagactctcccgcacttcatcagcccctatctggaaggcattctctcccaggtgattcatctggagaaaatcactagtgaaatgggttctgcgtcacaggctaatatccgtctcacatctcttaaaaagacactggctaccacacttgcaccccgagtcctgttgcccgccatcaaaaaaacttacaagcagattgagaagaactggaagaatcacatgggtccgtttatgagcatcttgcaagagcatattggggcgatgaagaaggaagagctcacctcccatcagtctcagctaaccgcctttttcctggaggccctggacttccgagcccagcactctgagaacgatctggaggaagttggaaaaacggaaaattgtatcattgactgtctagtagccatggttgtcaaactttccgaggtcacattcaggcccctgttcttcaagctgtttgattgggctaaaacagaagatgccccaaaggacaggttgttgacattttacaacttggcagattgcattgctgaaaagctgaaagggctttttactctgtttgccggccacttagtgaagccttttgctgacaccttggaccaggtgaacatctccaaaacagatgaagcattttttgactctgaaaatgaccctgaaaagtgctgcttgctgttgcagtttattttgaactgtttatacaaaatcttcctttttgatacccagcattttataagtaaagagagagcaggagccttgatgatgcctctggtggatcagctgggaaaacaggcttgggggagaagagaaattccaggaacgggtgacaaagcacctgataccatgcatcgcacagtttt

SEQ ID NO: 186802 - DNA, 1768 bp, Homo Sapiens
  misc_feature (1449)..(1506): n is a, c, g, or t
atgaacgccaaggtcgtggtcgtgctggtcctcgtgctgaccgcgctctgcctcagcgacgggaagcccgtcagcctgagctacagatgcccatgccgattcttcgaaagccatgttgccagagccaacgtcaagcatctcaaaattctcaacactccaaactgtgcccttcagattgtagcccggctgaagaacaacaacagacaagtgtgcattgacccgaagctaaagtggattcaggagtacctggagaaagctttaaacaagtaagcacaacagccaaaaaggactttccgctagacccactcgaggaaaactaaaaccttgtgagagatgaaagggcaaagacgtgggggagggggccttaaccatgaggaccaggtgtgtgtgtggggtgggcacattgatctgggatcgggcctgaggtttgccagcatttagaccctgcatttatagcatacggtatgatattgcagcttatattcatccatgccctgtacctgtgcacgttggaacttttattactggggtttttctaagaaagaaattgtattatcaacagcattttcaagcagttagttccttcatgatcatcacaatcatcatcattctcattctcattttttaaatcaacgagtacttcaagatctgaatttggcttgtttggagcatctcctctgctcccctggggagtctgggcacagtcaggtggtggcttaacagggagctggaaaaagtgtcctttcttcagacactgaggctcccgcagcagcgcccctcccaagaggaaggcctctgtggcactcagataccgactggggctgggcgccgccactgccttcacctcctctttcaacctcagtgattggctctgtgggctccatgtagaagccactattactgggactgtgctcagagacccctctcccagctattcctactctctccccgactccgagagcatgcttaatcttgcttctgcttctcatttctgtagcctgatcagcgccgcaccagccgggaagagggtgattgctggggctcgtgccctgcatccctctcctcccagggcctgccccacagctcgggccctctgtgagatccgtctttggcctcctccagaatggagctggccctctcctggggatgtgtaatggtccccctgcttacccgcaaaagacaagtctttacagaatcaaatgcaattttaaatctgagagctcgctttgagtgactgggttttgtgattgcctctgaagcctatgtatgccatggaggcactaacaaactctgaggtttccgaaatcagaagcgaaaaaatcagtgaataaaccatcatcttgccactaccccctcctgaagccacagcagggtttcaggttccaatcagaactgttggcaaggtgacatttccatgcataaatgcgatccacagaaggtcctggtggnnnnnnnnnnnnnnnnnnnnnnnnnnnnnnnnnnnnnnnnnnnnnnnnnnnnnnnnnnacgtttctttagaaaacaaatgtatttcaaaatatatttatagtcgaacaattcatatatttgaagtggagccatatgaatgtcagtagtttatacttctctattatctcaaactactggcaatttgtaaagaaatatatatgatatataaatgtgattgcagcttttcaatgttagccacagtgtattttttcacttgtactaaaattgtatcaaatgtgaattatatgcactagcaataaaatgctaattgtttcatggt

SEQ ID NO: 186803 - DNA, 1721 bp, Homo Sapiens
actttgtacaaaaaagttggcttccttttacttcttccttttgccctctcgcctcctcctcctgggaagaagcggaggcgccggcggtcggccgggatagcaacaggccgggccactgaggcggtgcggaaagtttctgtctgggagtgcggaactggggccgggttggtgtactgctcggagcaatggagccagccttcggggaggtgaaccagctgggaggagtgttcgtgaacgggaggccgctgcccaacgccatccggcttcgcatcgtggaactggcccaactgggcatccgaccgtgtgacatcagccgccagctacgggtctcgcacggctgcgtcagcaagatcctggcgcgatacaacgagacgggctcgatcttgccaggagccatcgggggcagcaagccccgggtcactacccccaccgtggtgaaacacatccggacctacaagcagagagaccccggcatcttcgcctgggagatccgggaccgcctgctggcggacggcgtgtgcgacaagtacaatgtgccctccgtgagctccatcagccgcattctgcgcaacaagatcggcaacttggcccagcagggtcattacgactcatacaagcagcaccagccgacgccgcagccagcgctgccctacaaccacatctactcgtaccccagccctatcacggcggcggccgccaaggtgcccacgccacccggggtgcctgccatccccggttcggtggccatgccgcgcacctggccctcctcgcactccgtcaccgacatcctgggcatccgctccatcaccgaccaagtgagcgacagctccccctaccacagccccaaggtggaggagtggagcagcctgggccgcaacaacttccccgccgccgccccgcacccgggtgaacgggttggagatggagccctggagcagaagccaagtacggtcaggcaccaaatggtctcccagctgtgggcagttttgtgtcagcatccagcatggctccttaccctaccccagcccaagtgtcgccttacatgacctacagtgctgctccttctggttatgttgctggacatgggtggcaacatgctgggggcacctcattgtctccccacaactgtgacattccggcatcgctggcgttcaagggaatgcaggcagccagagaaggtgactttctggcaacgtctttgtctctgtttggtggtgggctgctcgggctcctggacctggacttgcccccaaattttgtgtatgcagtgaaggcttcaacatctcatgaaggacactttatttctacagcagaggacacgaaaaacagataaaacaagccagtctcccattttgtacctaatcaaacaacacacatgctaagcatataaagacaagagggtggaaaatatctgaacaagaaggctctaaaggaagtcacttagaaacttaagtttaatgtgaaatgttttgcaaagatgcttaaaatgaactttgtgttaagaaaaccactgtgaaactaaattgtcctattattgttggcttacctgtgtgttcagcaatctcagccccaaataatgttgtaatttaaagaaaatggaaaattctgctctaatgaatgtaacaatggcttgctgtgaagtttacattgttgtacagaagcatgtttcgcatgtaggtaaactggtggtggtactagaaaatacaatgttatttaatttt

SEQ ID NO: 186804 - DNA, 814 bp, Homo Sapiens
cccactttctacaaaaaagttggcttcgatacctattaaagaagtatttttaatgtagtgtccacaggctcatttcattgaaaacaactgactatgatgatagacagctcctgattggcaaaagttcgatggtatattcagaattaaattttgcctgcgcacctaaacactgacaacatttagcttaaaggttttccatggagaagagtggtaagagctgtagttagcaaaattggcatcctctttagggtgtcaattctgtgctgctttgcaaattgttgaaacttttgattttctgtttggcaatgctagtcagtgttcacttcttacagattagccaagaatttttatctaaatgcagaaacttattaatgaaatccatttaaactatacttacacaacattttgggaggccctgctggtaaaattatatatggatgcagaagtattgcaagagtccattttccatttttaaatctgcaatatctgattacattgatgaattccgttgtattgtatgtgtgaatataaatatctgaattctcccgggggacttggttttcgtccaaggatgttggcagtggacacttagtttacctcaggaattgcaatcatgtaagactatattcggaaaaaatgctggagtatataattttggatactgatataaaatcatcaagatggaagttaagcagaattgtcacgtgtagtccatagcgcttttatatgcattattctgtaatttgtttgtactgcggcaactttttatactttcaatgtatcatttaataaaaaaaataagcaagtcaaatca

SEQ ID NO: 186805 - DNA, 1237 bp, Homo Sapiens
  misc_feature (1036)..(1080): n is a, c, g, or t
  misc_feature (1147)..(1165): n is a, c, g, or t
ttggcgcaccttcagcagccgcctgatcctagagaaacatgtccaggtccggcacggcttgcagcttggggcccagtcccctggccgggggaccaccttggctcggggttccagtgccagagcccaggggccaggtcggaaacgccgccagtcttctgactcttgcagtgaggagcctgacagcacgacaccgccagccaagtcccccaggggcggacctggatctggaggccatggccctctgcgctaccggagcagcagctccacagaacagagcctcatgatggggttgagggtggaggatggtgcccagcagtgcctcgactgtggcttgtgctttgcctcccctggctccctgagccgacaccgtttcatcagccacaagaagagacggggtgtgggtaaagccagtgccctggggctgggggatggggaggaagaggcccctccatcaaggtctgaccccgatggtggagactcacccctgcctgcttctggaggcccactgacctgtaaggtctgtggcaagagctgcgacagccctctaaacctcaagacccacttccgcacgcatggcatggcgttcatcagggctcggcagggggctgttggggacaactagtctccaaggcctgggactgaccagccccttcctcttggagcctggttttccctactgctgcctgatccctcggctggggagttttcattaacattagtattttgttaattcctgtctctccaacctgaagaagaagagcatttgaggattattctagttatttgcaacctccctttgggtttggccctggagtcctagtagagtggaccctccattcctcctttctgagcccaacactaattaattttatgctcctgctgcagaacccccagtgtgggcctgggggtgggaggatgggacttaggtatgcctgctagacaggttcagggaaggactgatgggggtgtcatggatggacacacctctccacaattccttcaggcatggactggaactttcctcctctatgtctgnnnnnnnnnnnnnnnnnnnnnnnnnnnnnnnnnnnnnnnnnnnnnaactcactggcactcaagccccctacccctgcagtgcctttcacttctttttttccccaaaaatccnnnnnnnnnnnnnnnnnnnttggtagggatgattcctgtcaagggggccacaggagacgaggggacacgctctaggaaacctttattcttg

SEQ ID NO: 186806 - DNA, 1068 bp, Homo Sapiens
gtcgcggcctgactcctctccctggtggctggccatcggctcacaagcccctgggctccagaaccagccagttctcagtgaccatctgcacatcctggccactcagaggctcccgcagcctcaccttcacctccagcttccccccggtgggcttccttccatccagggacctccacaatttctctgatctcacactcattctccagccgctccagtttcaggtgtgctgtgccaaccagcttgtcgcttctgaagaaggaccctttgtggaagatctcaaacttgatgcctttgctctggatcaccctcttgaggccccggtggtttcggttgatgtttagtttgaagagttgatcaaattctggagagtttgtgttcttcaccacagctgttttgcttttttgagcctggtccgagttagggtagtgaaactcaaaccgcacaaaagcatccaggtcatcgggagtcacccctggaggggctgggaggttcattccccggacaatgatcagatgcatttctgtgctgttgagttctgagaagatcctcacagtctggaatgtcttcaactcaaagtggtgggtgggagggtcgaggccctgagcctgggccagctgcaggatctccagctgtttcttgcggtcctgagcaagcttctcaaatcgggtggtctcagccacgttgccctggtgcatgaactgcttggagaacagcaggcacttctcttgttgctccagaagcattttttgcagctgggcatacacctcctccgccttctgggagagtcgcaggtcctcatggtggatgaggatgaagtcaccctcctcatccgtcaagggcgaaggcaccttggacagatcaacaggtctgccagatcgggcctggatgatctgagcctcaagccatttggctacccgcagataggctttggcctgctccaggtcctggctgcgcttggcctgcagggctgcccgctgatactgcagtttccgtgcctccagcagtgccagctgctcccgcacagatggactcggtgactccttagaacttgaggccctgggctcccaa

SEQ ID NO: 186807 - DNA, 1165 bp, Homo Sapiens
tgtcctggggaaaaaatcataagtgttataaagaaatattattgtgcaaaggaggaatgtaatattaaggttcatttacaacgggcatttggcgtcgacagaaaaagtctttctatgtatacattcaacattttgcagcatatttacattcaagttacatttccaaattctatgccaaatacagtctaactcaccatcaacaatccttcagatattactaaaatcctgtttatttggtaggagtgcaatattatcttattaggaaataattttatgttcctactaagtcaactgcatttttactactttaacaaaattcactgacatttttatcccagttgaagtcaagcctcttttagacaaagtcaatactaactcaaatgttgccagttataaaattatataataatcttttcctccctccttagagacagtattacaactttcaatgaaaggacaccagctatgataaattattttcttttacaagagttaggatgtattacagatacaagttccagaattttaacttgttttcaaaagatggctgaagcacttttccctttcagttgttaccgaattcctcagcaaaatacaacacattcagaaatctacatagcagttttctgaaaacttttctccattgtccccacacatttctcaaatcagagtgcttactcactagcaactggagaatctcttgcttagtttttctaaattatactagagtagctatcctaatttcctgacaatcttcccatttcattttttaaattatgattttattaaaatcaacataaattacaaaggttccatctttgctacggttcttttaaaaatttatcttaacttactgaagggtcaagaccccacagggcctgtctagaacaggcaaacaaaatgtcaagattagaaaattctcatgcctccaaaagactccaggcaaatcaaatctactcaattcttccttatttatctcaagttcaattttaagtctaagaagataattaatgacaaaataacagagattgatgaatttcatttagttgagctcttttttcctaattttcctcaggttgtaacttcgccttcagtacatgatgactggcagttggtagtaggttgctgagatgacaccaaggtctaagtcagccaacttttttgt

SEQ ID NO: 186808 - DNA, 857 bp, Homo Sapiens
ttggcaagatgctgtcaataaagttcttcggaatcataacatcaagccgcactggatgtttgccttagacagtatcattcggaaggcggtacagacagccattaccatcctggttccagaactaaggccacatttcagccttgcatctgagagtgatactgctgatcaagaagacttggatgtagaagatgaccatgaggaacagccttcaaatcaaactgtccgaagacctcaggctgtcattgaagatgctgtggctacctcaggcgtgagcacgctcagttctactgtgtctcatgattcccagagtgctcaccggtcactgaatgtacagcttggaaggatgaaaatagaaaccaatagattactggaagaattggttcggaaagagaaagaattacaagcactccttcatcgagctattgaagaaaaagaccaagaaattaaacacctgaagcttaagtcccaacccatagaaattcctgaattgcctgtatttcatctaaattcttctggcacaaatactgaagattctgaacttaccgactggctgagagtgaatggagctgatgaagacactataagccggtttttggctgaagattatacactattggatgttctctactatgttacacgtgatgacttaaaatgcttgagactaaggggagggatgctgtgcacactgtggaaggctatcattgactttcgaaacaaacagacttgactgttgctcaatctaatcttcgatggaaattctaaaaattaatacagagctgatcttcttgggggtgggaaaatcgaagggagaggagaaaggcgctgcactttaaatccagtatttgtttactcatgtt

SEQ ID NO: 186809 - DNA, 1591 bp, Homo Sapiens
tgggagccagggctcattttcatagccaaggggtccccaggagctcccccaggagctcggccaaatgggctggtcccatggtgggtgaggggccagaggctctggcccattgctacaggcagtaaaactcctgactctcagtgatggtcccaaaaagcacacccagaagaatgggctcaaagatcaagatggggccccagcctcccgcagagtcctgaaggaaggagtggctcaagtcaggccctgggtccaaaggccatcagggaaggaccaggctcctgtccttgagtgtgatgcatccatcctggaagtagggccagctcagtgctcgctgagccatggggagaggaggcccagagccaggcccagaggcaggaaaaggatgggcctcagcaagccctgggctggggcagagctgaaggccaggtggctgccacagaggttgctgtcgggctgggactcctgggtttggggcaccacacgaggctggagttctgtcaccttgctttggatccaggaggcatagctggaggccagagtgtacacaccaggcctgttgcgggccccacaggcatctccccagctcacaatgcccgtcaggtaccagagaccctccacagggcaggagagtgggcccccagagtcaccctggcaggcgtccttgcccccctccacatagccagcacacaccatgtcctcttggacaaagtgcggctcctcaggcttggcgtcgatgttgtacaggcagttacacgtctcacgactgatcagaggcacctcgagttgctgcagtggcttgggcgtcaggaggctcactgagggggccacatgaccccagccagtgacagtgcagtggaggccgttggggaaggaggcgttggctgcagggaggcagatgggccggatgtagcgggagaaggtgatgggtctgctgagttggaggagtgcaatgtcgccctgggagccctcctggaggtagctggggtgggggatgatgtccttcagggtgctgaccttggcgtcctcggagtaggagtctagctggtgggcccccagcttgacctcataggcttccttgtggtgctcgctggggaagcagtgagcagctgacagcacccactgctcagacacgagagagccaccacacacatggacgccttcataggtgatgctgacctgccagggccactgaccggcgactgcactgctgccacctgtgatgcgtgcttggggggccacaccgcagggagcttctgccccttccgctcctgtccccgaccggagtaatccaagatagagcagaatggccacagcccccagctgcccaggccccaggacccccttctgggccatggcccaggacaagggcccctggggcagactccaggcacgcaaggtaggaagccttggggtggtgtcgaaggcaggacccagatgttggctcagagggaaggatcccagaatccgggctggaaaggggcagcaagtgtccaaggctggcctctaaggcagggagcggccgcaacgggagacgcctggagtatccgaagcgagcagtgtggacgagtcaccccaacttttttgtacaaag

SEQ ID NO: 186810 - DNA, 1340 bp, Homo Sapiens
ttggctccgtggtggccctgttcgtcttttgtaccaagagccgacgtgctgagcgttactggcagaagacgctgctgcagatggaggagatggaatctcagatccgagaggaaatccgcaaaggcttcgctgagctgcagacagacatgacagatctgaccaaggagctgaaccgcagccagggcatccccttcctggagtataagcacttcgtgacccgcaccttcttccccaagtgttcctccctttatgaagagcgttacgtgctgccctcccagaccctcaactcccagggcagctcccaggcacaggaaacccacccactgctgggagagtggaagattcctgagagctgccggcccaacatggaagagggaattagcgtgttctcctcactactcaacaacaagcacttcctcatcgtctttgtccacgcgctggagcagcagaaggactttgcggtgcgcgacaggtgcagcctggcctcgctgctgaccatcgcgctgcacggcaagctggagtactacaccagcatcatgaaggagctgctggtggacctcattgacgcctcggccgccaagaaccccaagctcatgctgcggcgcacagagtctgtggtggagaagatgctcaccaactggatgtccatctgcatgtacagctgtctgcgggagacggtgggggagccattcttcctgctgctgtgtgccatcaagcagcaaatcaacaagggctccatcgacgccatcacaggcaaggcccgctacacactcaatgaggagtggctgctgcgggagaacatcgaggccaagccccggaacctgaacgtgtccttccagggctgtggcatggactcgctgagcgtgcgggccatggacaccgacacgctgacacaggtcaaggagaagatcctggaggccttctgcaagaatgtgccctactcccagtggccgcgtgcagaggacgtcgaccttgagtggttcgcctccagcacacagagctacatccttcgggacctggacgacacctcagtggtggaagacggccgcaagaagcttaacacgctggcccattacaagatccctgaaggtgcctccctggccatgagtctcatagacaagaaggacaacacactgggccgagtgaaagacttggacacagagaagtatttccatttggtgctgcctacggacgagctggcggagcccaagaagtctcaccggcagagccatcgcaagaagtgctctcggaatctacctgacccgcctgctctccaccaagggcacgttgcagaagtttctggatgacctgttcaaggccattctgagtatccgtgaaga

SEQ ID NO: 186811 - DNA, 1277 bp, Homo Sapiens
  misc_feature (726)..(783): n is a, c, g, or t
  misc_feature (974)..(982): n is a, c, g, or t
tcgaaacgccgcgtgacttgtaggtgagagaacgccgagccgtcgccgcagcctccgccgccgagaagcccttgttcccgctgctgggaaggagagtctgtgccgacaagatggcggacggggagctgaacgtggacagcctcatcacccggctgctggagcagccattgtggatgagaagatcttctgttgtcatggaggattgtcaccagacctgcaatctatggagcagattcggagaattatgagacctactgatgtccctgatacagatattgaaaccatctgaaaagaaagctaaataccagtatggtggactgaattctggacgtcctgtcactccacctcgaacagctaatccgccgaagaaaaggtgaagaaaggaattctgtaaagaaaccatcagatttgttaaggacatacttcataatatataagtgtgcactgtaaaaccatccagccatttgacaccctttatgatgtcacacctttaacttaaggagacgggtaaaggatcttaaatttttttctaatagaaagatgtgctacactgtattgtaataagtatactctgttatagtcaacaaagttaaatccaaattcaaaattatccattaaagttacatcttcatgtatcacaatttttaaagttgaaaagcatcccagttaaactagatgtgatagttaaaccagatgaaagcatgatgatccatctgtgtaatgtgnnnnnnnnnnnnnnnnnnnnnnnnnnnnnnnnnnnnnnnnnnnnnnnnnnnnnnnnnncactagaataatggcaaatacttctaatttttttccctaaacatttttaaaagtgaaatatgggaagagctttacagacattcaccaactattattttcccttgtttatctacttagatatctgtttaatcttactaagaaaactttcgcctcattacattaaaaaggaattttagagattgattgttttnnnnnnnnntacgcacattgtccaatccagtgattttaatcatacagtttgactgggcaaactttacagctgatagtgaatattttgctttatacaggaattgacactgatttggatttgtgcactctaatttttaacttattgatgctctattgtgcagtagcatttcatttaagataaggctcatatagtattacccaactagttggtaatgtgattatgtggtaccttggctttacttttcattcgcacggaacaccttttggcatgcttaacttcctggtaacaccttcacctgcattgg

SEQ ID NO: 186812 - DNA, 926 bp, Homo Sapiens
ttggcttgtttgtcctgtgctctgagagtgtgccccgattcatcaagtacacaggctatgggaatgctgctggccttctggctgccaggggcctcatggcaggaggccggcccgagggccagtactcagaggatgaggacacagacacagatgagtacaaggaagccaaagccagcataaaccctgtgaccgggagggtggaggagaagccgcctaaccctatggagggcatgacagaggagcagaaggagcacgaggccatgaagctggtgaccatgtttgacaagctctccaggaacagagtcatccagccaatggggatgagtccccggggtcatcttacgtccctgcaggatgccatgtgcgagactatggagcagcagctctcctcggaccctgactcggaccctgactgaggatggcagctcttctgctcccccatcaggactggtgctgcttccagagacttccttggggttgcaacctggggaagccacatcccactggatccacacccgcccccacttctccatcttagaaaccccttctcttgactcccgttctgttcatgatttgcctctggtccagtttctcatctctggactgcaacggtcttcttgtgctagaactcaggctcagcctcgaattccacagacgaagtactttcttttgtctgcgccaagaggaatgtgttcagaagctgctgcctgagggcagggcctacctgggcacacagaagagcatatgggagggcaggggtttgggtgtgggtgcacacaaagcaagcaccatctgggattggcacactggcagagccagtgtgttgggggtatgtgctgcacttcccagggagaaaacctgtcaggctttccatacgagtatatcagagcacacccttccaggtatgtatgctctgttgttcctgt

SEQ ID NO: 186813 - DNA, 911 bp, Homo Sapiens
ttgggctaaacctcctgagcctgagaagcccgtgtcccctcctcctgtggagcagaaacaccgcagtattgtccaaattatttatgatgagaatcggaaaaaagcagaagaagctcataaaatttttgaaggtcttggcccaaaagttgaactgccactgtataaccagccatcagataccaaggtgtaccatgagaacatcaagacaaaccaggtgatgaggaaaaaactcattttattttttaaaagaagaaatcatgcaagaaaacaaagggaacaaaaaatctgccagcgttatgatcagctcatggaggcatgggagaaaaaagtggacagaatagaaaataatcctcggaggaaagctaaagaaagcaaaacaagggaatactatgaaaagcagtttccagaaattcgaaaacaaagagaacagcaagaaagatttcagcgagttgggcagaggggagctggtctttcagccaccattgctaggagtgagcatgagatttctgaaattattgatgggctctctgagcaggagaataatgagaaacaaatgcggcagctctctgtgattccacctatgatgtttgatgcagaacaaagacgagtcaagttcattaacatgaatgggcttatggaggaccctatgaaagtgtataaagataggcagtttatgaatgtttggactgaccatgaaaaggagatctttaaggacaagtttatccagcatccaaaaaactttggactaatttgcatcatacttggagaggaagagtgttcctgattgtgttttgtattactatttaaccaagaaaaatgagaattataaagccctcgtcagaaaggaattatgggaaacgcagaggcagaaaccagcagcaaattgctcgactcctcgcagacgaaaaagt

SEQ ID NO: 186814 - DNA, 1675 bp, Homo Sapiens
ttggcgctccttggctcctcggctcgcgtctcactcagtgtaccttctagtcccgccatggccgctctcacccgggacccccagttccagaagctgcagcaatggtaccgcgagcaccgctccgagctgaacctgcgccgcctcttcgatgccaacaaggaccgcttcaaccacttcagcttgaccctcaacaccaaccatgggcatatcctggtggattactccaagaacctggtgacggaggacgtgatgcggatgctggtggacttggccaagtccaggggcgtggaggccgcccgggagcggatgttcaatggtgagaagatcaactacaccgagggtcgagccgtgctgcacgtggctctgcggaaccggtcaaacacacccatcctggtagacggcaaggatgtgatgccagaggtcaacaaggttctggacaagatgaagtctttctgccagcgtgtccggagcggtgactggaaggggtacacaggcaagaccatcacggacgtcatcaacattggcattggcggctccgacctgggacccctcatggtgactgaagcccttaagccatactcttcaggaggtccccgcgtctggtatgtctccaacattgatggaactcacattgccaaaaccctggcccagctgaaccccgagtcctccctgttcatcattgcctccaagacctttactacccaggagaccatcacgaatgcagagacggcgaaggagtggtttctccaggcggccaaggatccttctgcagtggcgaagcactttgttgccctgtctactaacacaaccaaagtgaaggagtttggaattgaccctcaaaacatgttcgagttctgggattgggtgggaggacgctactcgctgtggtcggccatcggactctccattgccctgcacgtgggttttgacaacttcgagcagctgctctcgggggctcactggatggaccagcacttccgcacgacgcccctggagaagaacgcccccgtcttgctggccctgctgggtatctggtacatcaactgctttgggtgtgagacacacgccatgctgccctatgaccagtacctgcaccgctttgctgcgtacttccagcagggcgacatggagtccaatgggaaatacatcaccaaatctggaacccgtgtggaccaccagacaggccccattgtgtggggggagccagggaccaatggccagcatgctttttaccagctcatccaccaaggcaccaagatgataccctgtgacttcctcatcccggtccagacccagcaccccatacggaagggtctgcatcacaagatcctcctggccaacttcttggcccagacagaggccctgatgaggggaaaatcgacggaggaggcccgaaaggagctccaggctgcgggcaagagtccagaggaccttgagaggctgctgccacataaggtctttgaaggaaatcgcccaaccaactctattgtgttcaccaagctcacaccattcatgcttggagccttggtcgccatgtatgagcacaagatcttcgttcagggcatcatctgggacatcaacagctttgaccagtggggagtggagctgggaaagcagctggctaagaaaatagagcctgagcttgatggcagtgctcaagtgacctctcacccaa

SEQ ID NO: 186815 - DNA, 959 bp, Homo Sapiens
actttgtacaaaaaagttgggtttataattggaagagaaatttttgctgttaatgccagaatgagcaacctcaaggaattgaacacttcttggaaaatctaggtaattcaagccctcatcaggtttacaagatcatcagagaaacagaggattttaatttttagttctggccggctacaggctccatttctctgccttcccattggaaatagtttatttccacattctccactgcgtgtggtcaaagttcctcacccagcaagggactatagatactcgtgtcccaattccaaaacacaatgcacaagctgaacttgggctgaacgtggcgtgttgagatttggaatgaggtttctaagagccgtgttcttcatggaattttccaggccacttggcagcttggtttaccgatggatgggctagagatcttgtcgtttcttggaagtcacagggaagattgaagagaacgcttgagcatccttggcaacagcccaggtgggacctggatgaagctttgcactcaagtattgtcaagggaagcttcctgtgaaccaaagttctcaggccaaggtctcgcccaccaaagccagaaagtgcaagcacccgtctacccagctctaacttgtatgtgtgagacagaccaggcttcgggggtaggaggatctgcagttgttcagccgtctttctgctggtgttgtctttctgccatcagagaagggacacacagcccgttcaaaggtgtgcagagggctctgagcgccaggatggccagggctgtttttgctactgaaggagcgtgtgtcctgaactcccacttgcagggacagtccccaccttctctatagccggcactgggagcagccgcccagcagggaaatctggcctgagcacaggatgctttagggagagatcacttcagtgtgtgtgtatatttatttgcagtacagtgcgcgcgtgtg

SEQ ID NO: 186816 - DNA, 1045 bp, Homo Sapiens
ttggcattttactgttagaaaatgtttcgatgaaagatcctccggacttattggacaggcagaaatgcctgaacgccttggcgtctcttcgacatgccaaatggtttcaggcaagggcaaatggattaaaatcatgtgtaattgtcctccgcattctgcgtgatttgtgcaacagagtccccacatgggcaccattgaaaggatggccactagaacttatatgtgaaaagtctataggtacttgtaatagacctttgggcgctggggaggccttgagacgagtaatggagtgtttggcatctggaatactacttcctgggggtcctggtcttcatgatccttgtgagcgagacccaacagatgctctgagctatatgaccatccagcaaaaagaagatattacccacagtgcacagcatgcactcagactatcagcctttggtcagatttacaaagtgctggagatggacccccttccatctagtaagccttttcagaagtattcctggtcagttactgataaagaaggtgctgggtcttcagctctaaagaggccatttgaagatggattaggggatgataaagaccccaacaagaagatgaaacgaaacttaaggaaaattctggatagtaaagcaatagaccttatgaatgcactaatgaggctaaatcagatcaggcctgggcttcagtataagctcctatctcagtctggccccgttcatgccccagtcttcacaatgtctgtagatgtggatggcacaacatatgaagcctcaggaccatccaagaaaacagcaaaacttcacgtagcggtgaaggtattgcaggcaatgggatatccaacaggctttgatgcagatattgaatgtatgagttccgatgaaaaatcagataatgaaagtaaaaatgaaacagtgtcttcaaactcaagcaataatactggaaattctacaactgaaacctccagtaccttagaggtaagaactcagggccctatcctcacagcagtggcaaaaccctgtaatggagctcaatgaaaaaa

SEQ ID NO: 186817 - DNA, 1926 bp, Homo Sapiens
  misc_feature (229)..(237): n is a, c, g, or t
  misc_feature (819)..(828): n is a, c, g, or t
gaattcaaaaaaacagattacaaggcaaacaatgacaataggtatggacaggcagtaccaaaaaatgctatttgttctttaattaaataatgccattctcaagtgatatagagcagtcatcttgacagaattcctttttgtataaatattcataaataaaaatgtctctagatattggaaagagctgcaaacaatactttacaacagcagcttaatatctattttaggnnnnnnnnngcactaaaattctcttccattgaaagttgtttatttctctagtgtaagtgagcaaagtcactacagcattaaaatctcttttctagaacaacgtaaagaacaacgtatacacatcttaaatttggtaggtcacaaaagttagaatgcaatcatcttttgaggcaacaagaaaataaatacataaaaattaaacactttaacccaaaatttggtattgacaaatcagtagtgtcaacttcacatatgaaggacaatacagtctggttatttaaagatgctcaatatgtcatggtatttgggctaaagatacttagaatattgtgtttcctttttgattaaaggaatacaatacaatcaccatcaagctgctatcgtaactcatttttagctgtggtaaagtgaccatttggtccatggcacaagttacatatatcacacttctgtcaaacggaaacgttataagatttcatgtttataagctacaatacaccgtgaccatgctgtcagtcccgtcagagtttttaagaaaaatatctacatttgtccttatggatgtcaaaatgttacaccatcatttgttcnnnnnnnnnngatgcacattcatactgtgaagttattaggaaaatactcttgcaaacaaactatataaagataaaatacacttcaaaagtatgtggtttgttttcttgtttgtctgttttacaacattctataaagtgcagagtcctaagggaaaaaactactccctataacaatagtttaattacagcagcttttgcatagcaatacttagaggaagttggacacttcagtttcttcaggaagagaaggatggaagagtatcttctgattcagattgttttttggccataagtctgctttcttcaggaatggttgctgatgccaaatctccattaagtgtattttttgaacagtgaacaggtctatctgggtcttcaagaggaatatcactacaagaatctgtatctgagtaggttcttcggcgtcgctgggagagtcggtgaagtgtagatactggttcttttatagagtggctactcctctctgaactgcaagaaccagggtggctgacagaacgcttcatcatttgaacaggagaaggtgacacaggagaaactaagggatccggatggtgcagttgaaacatctcaggtttaaacttggcattggctatcttcacacattcctcaagcgttgtgatgaatgtgttacacgtggcactaagcagagaagaggcttcattcatgttctctgcactaggagatgaatgattctcatcatggtgaacaaattcctgtatcgtatgaacttgctgcattaagaggtcacagtagaggcgaagttcagacattttggttttcagcgattcactggtttcacttatttctttttcttttttagtccttgtatcagtcaaacatgctttggagctccccagagcgaccagccacctctgtctttcagctgcattcactgccttcatgtagaaatgctgctctccaggaatgattaattccattcttgtgttgtctgctgaatgaacagaatttatgcatccaatcaagggtggtcccctccaaagttgtcacctttaatttcacaaactgccatctttatgcttcctttgctccctttgcaaacatcatcttgtgaatcatagtaggccaa

SEQ ID NO: 186818 - DNA, 942 bp, Homo Sapiens
ttgggtcatggaggcccgaaccctcctcctgctgttctcgggagccgtggccctgatccagacctgggcagattacaattacaatcaaggcagaaatgatctcatttttacattacaactctggaaaaggcaatagactgagatgcaagtgtgcccccaagtgatgggcagaaggagagaaggtgttttggatgcattctagaacacaggtaatctaaggagagttgatcaaggccgtggaagagtcctccagccactattggccatcaaaggagtcctctgtgtcccaggaatggtcctgctttggtgtccctggtgtgacccattacccgctgggaacagcctgagagaagtagggcctctgcaccaatgctgctgaggatgtcagagcacaggaacgaggccttgggaaattacctggaaatgcgactgaaatcttccttcctgaggggtctgggctcttggaaatcaaaccctctcaggttgggtggctggacgattctcctcacacttacaatgggacaaggggaaccaggaggcccccaaggggatccctgggttccacacgaactcctcctaccctcattgtgtgacagcagccatgcctcctcctggggatcaggatctattacctgtgcctggagaggaggggactcctcttctcacccgctggtctctggacacatactgtccaattcccctgtggcagctgtaatgtgtagttcaatgggcactcgtttgtccccttttaagggtaccctcctttagaatccaggaccttctaccctgcagagtgtggttttgggagagaagtgcaaaatcccacgacaggtgagttgaagaatgggatatggagccacatccacttccaccccttggtatctggacccacgtgttcttcctactgagattacagaactgtagaagatgtctttgattttt

SEQ ID NO: 186819 - DNA, 949 bp, Homo Sapiens
actttgtacaaaaaagttggcaagcacgcacccaccaatgggagatcagatcttctagctggctctctgctgccacagctccgccgaagggagggggtggaagaggaggactaaactcagagctgagaggagaggcaggtgtgtgcaggtgcatcacctggatcatgaggtcacccctctgctggctcctcccacttctcatcttggcctcagtggcccaaggccagccaacaagacgaccaagacccgggactgggcccgggcgcagacccaggcccaggcccaggcccacacccagctttcctcagcctgatgaaccagcagagccaacagacctgcctcctcccctccctccaggccctccatctatcttccctgactgtccccgcgaatgctactgcccccctgatttcccatctgccctctactgtgatagccgcaacctgcgaaaggtccctgtcatcccgccccgcatccattacctctatctccagaacaacttcatcactgagctcccggtggagtccttccagaatgccacaggcctgcgatggattaacctggacaacaaccgaatccgcaagatagaccagagggtgctggagaaactgcccggcctggtgttcctctacatggagaagaaccagttggaagaggtcccctcggccctgccccggaacctggagcagctgaggctgagccagaaccacatctccagaatcccgcctggtgtcttcagcaagctggagaacctgctgctcctggatctccagcacaacaggctgagcgacggcgtcttcaagcccgacaccttccatggcctcaagaacctcatgcagctcaacctggcccacaacatcctgagaaagatgccgcccagggtccccaccgccattcaccagctctacctggacagtaacaagattgagaccatccctaacggatactt

SEQ ID NO: 186820 - DNA, 1323 bp, Homo Sapiens
ctttgtacaaaaaagttggggaagtgctgctcaccctggaggtgtactggtttggggaaggtccccggcccccacagccctctggggagcctcaccctggctctccccactcacctcagccctcaggcagcccctccacaggacccctctcctgcctggacagctctgctggtctccccgtcccctggagaagaacaaggccatgggtcggcccctgctgctgcccctgctgctcctgctgcagccgccagcatttctgcagcctggtgagtacccaggaccgcccaggtatggtctctgcccaaaccacaggaggggccaacccaagacaaaggcagaacatctggggcaggggccaggctcccacctccagcaaacaagggcgggtcccataggggtgggtgccgccatctcttccccctccaccctcccccatgcctgaagagtgggagacccaggccagaggtcagtccagccacctgtcacacgactgcctgtgggtgaaggtgtgggagggtctggggtcaccctctttgtgtcctgaggtggtttcaaggtctctcccccactcactccctccttcctctaggtggctccacaggatctggtccaagctacctttatggggtcactcaacccaaacacctctcagcctccatgggtggctctgtggaaatccccttctccttctattacccctgggagttagccacagctcccgacgtgagaatatcctggagacggggccacttccacgggcagtccttctacagcacaaggccgccttccattcacaaggattatgtgaaccggctctttctgaactggacagagggtcaggagagcggcttcctcaggatctcaaacctgcggaaggaggaccagtctgtgtatttctgccgagtctagctggacacccggagatcagggaggcagcatttgcttgtccatcaaggggaccaaactcaccatcacccagggtagcagggcgccaagcagtgacttctgaccaacagagtgtggggagaagggatgtgtattaaccccgggaggacgtgatgtgagacccgcttgtgagtcctccacactcgttccccattggcaagatacatggagagcaccctgaggacctttaaaaaggcaaagccgcaaggcagaaagaggctgggtccctgaaccaccgactggaggagagttacctacaagagccttcatccaggaccatctacactgcaatgatataggaatgaggtctgaactccgctgaactaaaccactggcatttggggggctgttcattatagccatgcaaagagttccttt

SEQ ID NO: 186821 - DNA, 1436 bp, Homo Sapiens
  misc_feature (1215)..(1223): n is a, c, g, or t
gaggaattgagtgctgactgagaaaccctgtagaacttttccagggtatcttcctcttgaaaggagtggaatgctgactctttccactgtatcttcctctaggagaagaattgagtgatatactaccacgtccatatttgttcctgcttctgtctgagtatcgacccctctctgaagaggtgtcagtattgccactggaaaagccactgtccctagagttgagatgtagggaagagaagtttttggtcagtccatactgagtaggagacgagcttctggactggttcacaggtgtaatctgttgatacttaatgggcacctggggccgtctcacagcagcagcgtaggaatcctggccatcaaagtgtgagaagaacggtgaccccagaataggattgctctgggaacgctgtaaagaagtgttggatgcaatctgccgcatcctcagagtatctaaccactggcaatcagcacttgagtcggacctgcttccagggttgccatctgaattggtgaataatgtctgaatggcaagttggactgctttcacttcatcctgaggttttgttctactccactgaatcaaatggacatgtttagtgctttttggagttctaacatcactctcatatgtgacagtgcactccacagtctgactttttgctattcctacaatccacttctccattacaaatggtggctttgtcatctttaaaatctccgcatcaggtaggttagtgttgaatgtcacatcttttatgtaggttattgcaatttcatccccatccatctccatatacattttccacttacaatcctgtgggccagttcctggtttcaagtgaaaaccaaaaaccagttccaggttcactattttttcctcattttcttcaggttcacctcctgagcccttaattagtggtgggaagtgaaacaaatttatgtaatcatgggttaatttctcaatggctgacttgaagtgaatgatatgccccttggagacaatgcccatgtctttcaggtcttcttcctccagcagcagcagccgcttccctgtaatgttgttttctttaaacaagcttgcatatacactcatctctgctgaagagtcaccttttctgacgagctgctgaacccaacaatacacatcgtcttccgtccatgcaccaatctcaaaggaaggcagcagctgcatgggaaatatgcatgaaatgnnnnnnnnngtaatattatcattgtctttttggttcatcctcttgtctcactctttcagctctcagctgctgctctggcttggttcctcctgcaggttgggttgaatggaaaacagttttcctgaccttaagaggcagttctcagtgctccagtaatgttcaccaatctctcagtaacaattcatgtactttgggagctgtatcatattcctttgttgccaa

SEQ ID NO: 186822 - DNA, 655 bp, Homo Sapiens
ctttgtacaaaaaagttgggttgccgagcgcgccccgtccctcgcgcgcgatgctcccctggacggcgctcggcctggccctgagcttgcggctggcgctggcgcggagcggcgcggagcgcggtccaccagcatcagccccccgaggggacctgatgttcctgctggacagctcagccagcgtctctcactacgagttctcccgggttcgggagtttgtggggcagctggtggctccactgcccctgggcaccggggccctgcgtgccagtctggtgcacgtgggcagtcggccatacaccgagttccccttcggccagcacagctcgggtgaggctgcccaggatgcggtgcgtgcttctgcccagcgcatgggtgacacccacactggcctggcgctggtctatgccaaggaacagctgtttgctgaagcatcaggtgcccggccaggggtgcccaaagtgctggtgtgggtgacagatggcggctccagcgaccctgtgggcccccccatgcaggagctcaaggacctgggcgtcaccgtgttcattgtcagcaccggccgaggcaacttcctggagctgtcagccgctgcctcagcccctgccgagaatcacctgcactttgtggacgtggatgacctgcacatcatttg

SEQ ID NO: 186823 - DNA, 1499 bp, Homo Sapiens
ttggccgggagagtccgcgtctcccgcaccttcctctctatcaaacgccgtctctgtggtagccggggccccgcccctcctcggactctacccagtactgaactaggggcagctgggctccagagtccctcgggtctcaggtcatggcggtcgcggggcccgcgcccggagctggcgccaggcccaggttagatctgcaatttctccagcggttcctgcagatactgaaggttttgtttccttcttggtcatcacaaaatgccttgatgttcctgacccttttgtgcctgaccctactggagcaatttgtgatctaccaggttggcctgatccccagtcagtactatggggtcctgggaaacaaagacttggaagggtttaagactctgacattcctggctgtcatgctcattgttctgaactccacggaaagacccctataaatctatatataacaatgtaaccatatacttgcatgtctaatacaaactgaagaaattagcctaactgccaatatcaagttgcagattttaatccatggattgtgttttgtgctgaattgtatttgctgattacctgaaattggcttctttttattgggcttctctggagaatttctcccactccccacctctgcagaagaaaattttgctcttataaaacctcatgttttcatcattcctatcttttctttttattgcctcttatatctctgctctttgacctcaaggtctagaggtctgcagtaagccaagaaacaaaggtggggtggatgaggcaaggtttgcaggagaaagaggaattgagaaatggggtatttttgctatcagctcttctgctatgaagtagtaaaaggcagtctataattaactgacagacctaactgaagcacagagaatacatcagacttatgcatccaagacatcagaacttggattttatcaaacttgatgacttctctaaaaggagctttggaaacttcaaattcagctataggatagtaccaatgaacacatccagctgatcccaaaagctgttttcaggtataaggacaaggagaggagacaagtgacgacagccattcccctttgcagctatctactgtagtgacagccatttcttggttgatgggttggaagtcatcagaggtttgaagaattacactggcctttgtttttctggaaatgccgaccatggagatgctttagagtcttctcaaatagcttagatgttgtaatgaggttagctttgcttcataaaacaggggccctcagaagttctccttaaatttttcaataaaaatttagctcttaaaaaaataacagtgtgactgagtgaatgaagataagttgggattctttcagagcattcttttcctcaaaacgagctgcataattcttggaatttatgtcttaccacatggtggagggatggaggaactacaggatgcaattcttcttctaccaatgggcaatagaggttgagagagattcagcatc

SEQ ID NO: 186824 - DNA, 1336 bp, Homo Sapiens
ttggctcacagatgtgttttctacagtcggcatcaacacctttgactatctgggcagcatcctgagttacgttgtcatcgcaatccccattttcagcggggtctatggagacctgagtcccacagagcttagcaccctggtcagcaagaatgcctttgtgtgcatctacctcatcagctgcttcacccagctaatcgacctgtccacgacgctctcagatgtggctggctacacgcacagaattgggcagcttcgggagacgcttctggacatgtccctgaagtcacaggactgcgagatcctgggcgagagcaagtggggcttggacacacccccagggtggccagcggcagagccagcagacacagcatttctccttgagcgggtctccatctctgccccctcctctgacaaacccctaatcaaggatctgagcctaaagatctccgagggacagagcctgctcatcacaggcaacacgggcactggcaagacctccttgctccgggttctgggtggcctctggacgagtacacggggtgatatatcccctgaaggaggtctaccccgactcaggttctgccgatgatgagaggatcttgaggttcttggaattggcaggcctgtccaacttggtggcaaggacagagggcctggaccagcaggtggactggaactggtatgatgttctgtccccgggggagatgcaacggctctcctttgcccgactcttctacctgcagccgaagtacgcagtgcttgatgaagccaccagtgccctgacagaggaagtggagagcgagctctatcgcatcggccagcagctggggatgacgttcatcagtgtgggacatcggcagagccttgagaagtttcattccttggttctgaaactctgtggaggaggaagatgggagctgatgagaatcaaagtggaatgaagctctggcttttggaaggagagccacactgtggcgggtcggcggccctcaggagagaccaggaggactgacagcgaagatcgagctcaggttcgccacatagatcccgtgcaggagccacatgggtcctgtgcaggacccctagcagtggtgggctgagcccaggtctaggtttctgtgggggacactgaatctcccagtgttcagtctcccaggactctgctgcctcagccagagcctccatatgcttgaagtgctgattacctacaaatgatttcagatcatgtttgctaaagagaaatctggaagtgtgagatctgtaagaaatgaaagaaatgactcttggagtcaagagatctggaaatcttttaatcagttaaattgtgcagcaatag

SEQ ID NO: 186825 - DNA, 1334 bp, Homo Sapiens
ctcaagatcctctcatcatcggcagaactgagtcggggtagacctccttcaggggatatatcacctgctcccgaagggtcccgtcagtgaagaatggcttttgtggcaggaatagcaccccatggggcccaaagtccgtcagcatctgcactgagccagtgcccgtgttgcctgtgatgagcaggctctgtccctcggagatctttaggctcagatccttgattaggggtttgtcagaggagggggcagagatggagacccgctcaaggagaaatgctgtgtctgctggctctgccgctggccaccctgggggtgtgtccaagccccactcgctctcgcccaggatctcgcagtcctgtgacttcagggacatgtccagaagcgtctcccgaagctgcccaattctgtgcgtgtagccagccacatctgagagcgtcgtggacaggtcgatgagctgggtgaagcagctgatgaggtagatgcacacaaaggcattcttgctgaccagggtgctaagctctgcgggactcaggtctccatagaccccgctgaaaatggggattgcgatgacaacgtaactcaggatgctgcccagatagtcaaaggtgttgatgccgatgtacagccagagctccttggacatcagctccctctgggtctgaaggagtctctgcagcctgcggtctgtcctcatgtgctccacatgcccagctctgtagaaagcagcaggctccgcattcacccgaatctgcatgtgcttgaacctaaaatctccctccagcttctcctgatgcaccagcttcatcacaatggggcccatcaaagttttgttcaccacggtccccaggatgaaatacccgaagatgctcacaggcccgagccagcctgtgctttggaagcactggtaagtgtagtagacgagggtgaacggggagatgatgagcttgctggccatgctgctgagctgccggcagaatcgctccacgtcctggctgatgcgctggtccgggttatcgatgtcatcccgcagcacgttgagggtgtagtacgcacggccccggaagtagaggcggtgaaggtgctcagtgaggtccttcctccagctcacatacagcaggttgcaggtgaactgatcaaagctcttcagccagtagggtcaggcacaaaagggtcaggaacatcaaggcattttgtgatgaccaagaaggaaacaaaaccttcagtatctgcaggaaccgctggagaaattgcagatctaacctgggcctggcgccagctccgggcgcgggccccgcggaccgcgcatgacctgagccaacttttttgtacaaagt

SEQ ID NO: 186826 - DNA, 2017 bp, Homo Sapiens
  misc_feature (237)..(249): n is a, c, g, or t
  misc_feature (1400)..(1427): n is a, c, g, or t
ttggcaagcatgtatttaggggttgttctcaattgtgctgctgattacctgtcttatgtaactacttgagaccatctgcaagagacatgatttagtgtgtctgtaattcaatcttcgctgtgtgtggtagaagcagtagtcacttttgtaagccagtctcttcatgcctaaaagacactaccagtcacctttgattcgcgacttttaatttatgattatacttagcctcctcctccnnnnnnnnnnnnnccgaagttgacttgactttgcttttttccccccaagtaaaactaatgctagcttccagcttgaaagtaaaactccagtgtggagtgaattttgtgtctaattataaacctgtaaccaaaactcaaacatctggtactggtctttgcattgagattggtccctgtaaaaccccctttaaaagcatattgcatttagtacagagctcttttttgaaatgaaggctggagatgtgcatttttcacggtgttaactggttgtatcttattatcaaggagattggggttttgagtgtttgcgtgggtggtttcaatttgccagggaacagtggcaggctgctagcaaggcagtgagaagctcttggcagccaaatgggtgcattcagggctgatttatagagacccttggcttctccttctcctactccctgtctttctggcattttgtagcttgttagattttctgccagaggggtgggtcagagcagtggaggggagacatcgcccatgtgcttctgctactggtccttgggctgggtggttggtagaggagatgttgacactatgagctaagggttggcttttgtaattacctgaatctgaaaggaatgcctaaggttaccttggggtttctcttctggtgagatagggttcctggtttgagtaagttaatgtcctggatatttcttgtggcagggggtggtcaaagagcctgattgctgacccagtctcaggcctgtggtcgatgacctctcggtagtttcaaagggggctggagggggatatttgacttgttttttcgaaatgtagccttctaaccctcaagtctttagaagctgggtggactcttagtggtcctgcagcgtatcctaaaagactacctttgaaacaggattcttgtatggccaggatcgtgtctgggaaccagaaaccctacaccctccccctccagggaatgctgagttccagttttgagcagaggtgaggcagaatccactgtagccttccgccctggtatttggggggatgaccagcccaggcgttgggtgttagtctgcatgagtttgtgagaggaaatagctgggtgtcctggcagtgcccttgaagttggttaggaccttcctgtaaactcttgcccctacttctaactactcnnnnnnnnnnnnnnnnnnnnnnnnnnnnaagtgattagttgaactggcatcctgctttagcctgagacttgccataagaaactgctgagtacttggcaaaccctttcatagttttgttctccatctgtttggggtaggtgttgagtgaggcaaatggatctcgatatttcagatgggcttttgatgcactgttgccaaggaaggctttttctgatttttttgacaaatgaatttttgcacactttcattggtgtctttcggcaacttacacacattgaaaatgagctattgtacatatttttatattctctttataaatgcatgtctgattgtacttgtaacaatattgtaatgaacggctgtgcagtaggcccagcgctgctgtgtctcgtcagaggaatagcttaccacgaacccctcagcatactgggaatctcttcctgaacaacgaatgtaaatttgggtcaagtctactcttccgttcattcaattattttaagcatttgaaatatttaattgtatatcctaaatatatttctcctttgggcagtgactagatttccactaatgtgtcttattctatccctccagctggcagttactgtttttttaatcccc

SEQ ID NO: 186827 - DNA, 1470 bp, Homo Sapiens
  misc_feature (1053)..(1068): n is a, c, g, or t
actttgtacaaaaaagttgggaggaaggcgctcggttacattggagaactggagtggtctggagttccacggtgtagtggaccagaggccacctctcctgggcttctcagtgtctcgccggcggggttcggcctgagctggattgacatagcccttggcggatttaaacaacctaaacattaagcagtacagctgcctcaaacctttgggattttcagaatgactgacactgccgaagctgttccaaagtttgaagagatgtttgctagtagattcacagaaaatgacaaggagtatcaggaatacctgaaacgccctcctgagtctcctccaattgttgaggaatggaatagcagagctggtgggaaccaaagaaacagaggcaatcggttgcaagacaacagacagttcagaggcagggacaacagatgggggtggccaagtgacaatcgatccaatcagtggcatggacgatcctggggtaacaactacccgcaacacagacaagaaccttactatccccagcaatatggacattatggttacaaccagcggcctccttacggttactactgatagaaatgttggcagcttttagtaaaagcatttactctgttaccatgagaaaagtttgggtgtcttctgttggtcatagttttacatctgattttacagaatggattattgattttttggaagttgagactttaaaaaaaatagatcttacttgcgaaatgcgatggttgctgggaatacctgaaactgtggattatattgcttgacttctacctcagaatcttctttgtttcatgacttaatagtgctttaagtttggtatattatttgacctctaggaattctttgttttacacagaaataaaaattttaaaatagaaaatgcttttactttgtaaggtaagagagtatccatatgcttagatgtgctcgtttctaaaattctagaggttgatataatcagctcatgaatgcacagctatgctttttgtgatagattgtacataacatcagcagttgaaaggtaaaacaattgcnnnnnnnnnnnnnnnngcatttgttaagtgactatggtactttgtgattccttaatctatagatgagtcagctccacacttgagtctctttttagagggaaatcagtaataaggctgtaaaataaggaaggaatcattgtcagtttgtgtcttgatctggtggtggttgggataagggtacacatcattttatacaaacactaaagctttttgctaacaacatagcaggtcaaaattcacacataagaaagtttaactctggtactgttcacactttttaatcctgtaaataatgctgcattttgatggttcttacttttttggtatttaatgtggggctgattttacaatgttatattcacttccagatgcatacctctgctgctttctctcctataaatagtgatgctataaactt

SEQ ID NO: 186828 - DNA, 1426 bp, Homo Sapiens
  misc_feature (1030)..(1159): n is a, c, g, or t
ttggctagttcttgctgccggtcctaacgtcccgcagtcttcgccagccagccgtcccgcatgcgcgtttgggcggcgtggagcctgctgccatgaagtcagcgagagctaagacaccccggaaacctaccgtgaaaaaagggtcccaaacgaaccttaaagacccagttggggtatactgtagggtgcgcccactgggctttcctgatcaagagtgttgcatagaagtgatcaataatacaactgttcagcttcatactcctgagggctacagactcaaccgaaatggagactataaggagactcagtattcatttaaacaagtatttggcactcacaccacccagaaggaactctttgatgttgtggctaatcccttggtcaatgacctcattcatggcaaaaatggtcttctttttacatatggtgtgacgggaagtggaaaaactcacacaatgactggttctccaggggaaggagggctgcttcctcgttgtttggacatgatctttaacagtatagggtcatttcaagctaaacgatatgttttcaaatctaatgataggaatagtatggatatacagtgtgaggttgatgccttattagaacgtcagaaaagagaagctatgcccaatccaaagacttcttctagcaaacgacaagtagatccagagtttgcagatatgataactgtacaagaattctgcaaagcagaagaggttgatgaagatagtgtctatggtgtatttgtctcttatattgaaatatataataattacatatatgatctattggaagaggtgccgtttgatcccataaaacccaagtggaacagttgcagcacacccatgaggaacacagattttgtacctccacaatctaaattgcttcgtgaagataagaaccataacatgtatgttgcaggatgtacagaagttgaagtgaaatctactgaggaggcttttgaagttttctggagaggccagaaaaagagacgtattgctaatacccatttgaatcagtaatccannnnnnnnnnnnnnnnnnnnnnnnnnnnnnnnnnnnnnnnnnnnnnnnnnnnnnnnnnnnnnnnnnnnnnnnnnnnnnnnnnnnnnnnnnnnnnnnnnnnnnnnnnnnnnnnnnnnnnnnnnnnnnnnnnaaaaagaacaaatcactataagtcagttgtccttggtagatcttgctggaagtgaaagaactaaccggaccagagcagaagggaacagattacgtgaagctggtaatattaatcagtcactaatgacgctaagaacatgtatggatgtcctaagagagaaccaaatgtatggaactaacaagatggttccatatcgagattcaaagttaacccatctgttcaagaactactttgatggggaaggaaaagtgcggatgatcgtgtgtg

SEQ ID NO: 186829 - DNA, 913 bp, Homo Sapiens
ttgggttgcagacagcccggcgaaccgcgcaatgcgcttcttctgcctgcagcagagaaaaggaaagaaaactccgcaggggctccgttggcttctccacgagtgacaaccatgttttcccagatagaagaccggagccctgctcctttgcgatccgccgagggctgcagagagcatcctcatccatttgggcacccctgcccaggaagagcccggccatccctttccggactggatccttaagaggtgaattttcttccgtggattccgatttgctccgtctgaccagcctaggcaatccagcatcgcgtggtaccagtgccgctgggcacactggcttcacgccggctccgcctcaccagcaagcgcattcccaggtggtcaggctcaggatggaccatgagctttcaaaaaggaaaaaggtggaaatcctcaactatgctgccatctgaataagtgtttctttgtagatgcacagagtcaaggaaaattacatccctgcattatgtaatgtaccaacaacgcacttacccactgttttaatctaggttattcttgaaagcagagcctgagacaaaggtagacacattctatttatgagtctaacacccaggagcaggaatgagagataggggagtgaactggggaaaagggaaactaagtccgagcaaaaccagatactgctcttatcaagtggtccacccctattaatggctacataatgcagaactttctcaggattcttcttaaactttatctcagaactgtctgcctcagggagaaaggagaagtatttctccatcagcagccacctcctgtgtgttgagggctgctcctttggggcattaacccactgcctccaccaccccaaccctctgggctgcaaagagctagctgacagtccagctggtac

SEQ ID NO: 186830 - DNA, 1639 bp, Homo Sapiens
  misc_feature (829)..(1081): n is a, c, g, or t
  misc_feature (1152)..(1180): n is a, c, g, or t
  misc_feature (1310)..(1328): n is a, c, g, or t
ttggatctttgatgaagattgaaatacaatttctcatccaatttttatatcttggcatacgctgaccctcttgaccatttgtaattttttcatattatctaaaacaggtgttagagtcagacagattcattcttagattctagctctgacacttactagtgattttgagtatgttgttgatttttttgtgtgtggttactgatagaatcaagacaattacaacttcataaatgacaaataataggattatctccacattttctgttgctggaggaacaaaacattgtgcccatttgaaaattttaatttttgttggtttaactatcccacattataaatcatccttcaccattttatatcagttaaatatgggtgtgttggggaggaatgactggcatgtagacatgtattgatttaggaagatctgagcatttctttcattgttggtaagatataatgatgaaatttaaaaagcagtatggagcattatatatcagtaatgtgatatatatacttaagccagtttaaccattttgggaaatgttagcattaggaaataaaatccaaaagaaggaagagaagctatatgcaatgcaaaatttgcttattgcaatattttcatatacagacactaaaaacagttttcaaagtccagcattacgtaactaaagtaagtaaaatgatgtgtatcaacttgatggtaaaatatgtagttatttaaaaaagcaatgaacaatttagtttcatgagaaaatgttgccccctaaaagtagaacacatatgttacaactgcaataatactctgaattcatctttcacaaataagagnnnnnnnnnnnnnnnnnnnnnnnnnnnnnnnnnnnnnnnnnnnnnnnnnnnnnnnnnnnnnnnnnnnnnnnnnnnnnnnnnnnnnnnnnnnnnnnnnnnnnnnnnnnnnnnnnnnnnnnnnnnnnnnnnnnnnnnnnnnnnnnnnnnnnnnnnnnnnnnnnnnnnnnnnnnnnnnnnnnnnnnnnnnnnnnnnnnnnnnnnnnnnnnnnnnnnnnnnnnnnnnnnnnnnnnnnnnnnnnnnnnnnnnnnnnnncagatgcaagtttggaagagaaaagcaaataaatgaaaatcccttcctgttaagatgatggggtatttggnnnnnnnnnnnnnnnnnnnnnnnnnnnnngttatatgttttggcaataaataattctcaatacacaaaattggatattgtagtaccattgattttctttggattactgccatcattttaatgttatattgagaatgaagtgatcctctattaggtagtnnnnnnnnnnnnnnnnnnntgttttattttatatgataaatcgtatcctataaatgtaatcataaaatgagttatatacattattaaatcctagtttttaaaagttttgaatagcaatcagaaaatacgaaagcatgaaatatatcattgattttactttttttgcctgcagatggcactataatttagacatttattgatttatttagtaaatacttcagcagtgtataaaggaacactaagtttatttcatcaccataaaaatgtattgagatatcattcatgtggaatatattttaatgccaataagatgccatgttaaactttttt

SEQ ID NO: 186831 - DNA, 870 bp, Homo Sapiens
cagcccagccttcagagatcatgggaagcacgtggttcttacaccactgcccaggccaggccccgacccccaaagggattgacccaatagaagcaaccggggcggccgaggtagcaggtcaggggtgatctccccatccccgggcagtggcagtcctcggagcagacaggtgagggcagtggcccagcgctgggcctcggcacggttctcttcgtaggtggcggccccatctgcccggaaggtgcgagtggctctgcgccgggccccgcgccggccccgagggtaggtgtagatgcagaagtaggccgctgagtctgaggggctgcggcttcgcagggtgcagcagcctgagacctcggccaacgggaccaggccaccccggggcctggcttcaggtttggggcgcagccgctgtatgtgcagggcctgcgatgtaagggtgagggcaaagcgtgggcctcgggctgggtaggagccaaactcgccatggaggagcggggtgctggcagccagtggcggtgggggcggggccatggccttagccctgaccagggtgctcctaggcccgtggccccagctcccggtcagctcctggtctggcctctggtcctgctgctcctctgcttcaaggtgtccattcatctgctggtcctctgctctgttacatcaacgggaccctggccctgggtcttaagccatagtaggctggtaggagcaaggagtcaggtctcactgtcctggcctgaccttcagctctccaacactgggcccgccgggtcctccgggagccactgagaggccgtcggcgtcgggccagagcgtcaccgcgcgacgcatcgtgctagctacacgcatctcgctcccagccaa

SEQ ID NO: 186832 - DNA, 1753 bp, Homo Sapiens
ttgggcaagaaataagcctaagagagaagctccaggaggaactcaagtggaggaaaatccagtacatggctcgtggagagaagtctttggcctatcatgaatggaaaatggccctcttcaaacctgcggatgtgattctggatccagacacggcaaacgccatcctccttgtttctgaggaccagaggagtgtgcagcgtgctgaagagccgcgggatctgccagacaaccctgagagatttgaatggcgttactgtgtccttggctgtgaaaacttcacatcagggagacattactgggaggtggaagtgggggacagaaaagagtggcatattggggtatgtagtaagaacgtggagaggaaaaaaggttgggtcaaaatgacaccggagaacggatactggactatgggcctgactgatgggaataagtatcgggctctcactgagcccagaaccaacctgaaacttcctgagcctcctaggaaagtggggatcttcctggactatgagactggagagatctcgttctataatgccacagatggatctcatatctacacctttccgcacgcctctttctctgagcctctatatcctgttttcagaattttgaccttggagcccactgccctgaccatttgcccaataccaaaagaagtagagagttcccccgatcctgacctagtgcctgatcattccctggagacaccactgaccccgggcttagctaatgaaagtggggagcctcaggctgaagtaacatctctgcttctccctgcccaccctggagctgaggtctccccttctgcaacaaccaatcagaaccataagctacaggcacgcactgaagcactttactgatattcattccattattccatatgacagttgttttgagtttcgtaccaccttattgtccccttatacagataaggaaactggggtgcagaaaggtgaattaactttacaaagtagacatgacaagtgaacagcagagctgggatctaaacagcaataactaacattaacagagaatttaaaatgttcttagtgctgtgttataagctttggtggatgtcactcctttaatcctcacaacaccctgtcgggtagtcatattttgcaagtatggaagctgaggcagggcaacatgaagtaacttacataactcatacagtaatttgtgcagttgggagatgttcagccttagtccctggctaattgcctgttcttttccagcctgattttttttcccacaggaagagcccacatgtagccctgaggtttccttcccaggacagctgcagggtagagatcattttaagtgcttgtggagttgacatccctattgactctttcccagctgatatcagagacttagacccagcactccttggattagctctgcagagtgtcttggttgagagaataacctcatagtaccaacatgacatgtgacttggaaagagactagaggccacacttgataaatcatggggcacagatatgttcccacccaacaaatgtgataagtgattgtgcagccagagccagccttccttcaatcaaggtttccaggcagagcaaataccctagagattctctgtgatatagaaatttggatcaaggaagctaaaagaattacagggatgtttttaatcccactatggactcagtctcctggaaataggtctgtccactcctggtcattggtggatgttaaaccatattcctttcaactgctgcctgct

SEQ ID NO: 186833 - DNA, 1149 bp, Homo Sapiens
acaaggcacaaagacccctggacgtaaaggtgaacatcagtgtggccacatataacattattttgagaaaggaaagaaagtgcatgccccaaaagggatgctttccttcaccttgcaggtagctggaactttgatagtggcagaaaccacaatggagtagggttcacagaaatggcctgtgaaacagaccctattcctagagagacagaggaaaaacctcagctggtatggcacaatcttgaatgggatgacagagggcagcgggcagacttctcccgcaggtgacactcctgccttcaggtcccaatggttctgctgactccagatgttccccatagctgggactcagagaggaaaacgtgttgtgtttcacatgatcagacactgttcaccactggcacctggtgggcccgaaagattgagggcatccaggtcaaagttgaggccaggaggcatctctccagccagctcttttggaggatggcctaaatcttgtagctgctgcataagatccagcaccatctcaaaacgagccttttgagtggtttcactgtctgtgggggtctctgcctcaaactgctcacatattttgcacatgacgctgtgctgctcctgatatttttcaaactgctctggaggtagagattcccgatgactctgcaaccattctggatacttttctgtgatctccttcagtgatgggtacagcacatccttggagagtaggttctgcataatactctgcatgatggggaggatgttcccttccccatccccttcgtccatgcctagcccctccatggccttggtcagctcttcttccgacatgctggagttctgaaggtcagtggcatttttggctaatccacttagtgtttcctttaggcaagaagtgaattcttgttgggaggtcatatcactgcccactctccctgcagcctctgagagcttttggaactgctccaccaggtggggttcttcctcagccaactccttcattgccttctcgaactccgcagtggcttgggaagccagttcactgtcgaatagttcctggaaaaacttctcttgggaagcgaagagggcatctttccagaagctcctccaattccctgtccgcttcggccccgacactacagccttccccaa

SEQ ID NO: 186834 - DNA, 1325 bp, Homo Sapiens
gagggagtaagatcactcaaaggtgaaggggtcctgggtgctgaaaaagaagtgtccatccatgtggtcctccagggcatccttgtcactctcagcaggaaagcgctccttacagataggacactccttccatgtgggggtggcagggcccccagtgctggtttctgacagggtacccactgtaaagccactggccatgtcatagaaggcactgcccagttcaggaagcagtaagttggcctcctcacccccactctgcacagctgccatcaggactgacttctcatcttcagcctccgagtcagagctactgtcctcagctggcccagagaggtgaggagaaatgggagccggctggctgatgacaacaaggggagaagcctctcgaggcccagcaggagaggagcctgggtctccacgctcacaaaggccatagggtgggagcctcatgtcttctggggactcgtcctctgagtctgtcagagctgccgggcagctcagccccacagcggcctcctcatcctctgtggtggcatcctcattccacttctcatctgccaccttctccaggcgggcctctagctttctcatgtactctagcaattcctgtttctcctcctgtaactgctccttttccttctggagcacacgcagggctgaccgcagctctgtcagctcccgcttactttctgacaactgtaccaggctagaatccttctcccgggccagctcagtcttgaacacttggttttgggtcctctcctcctgaactgccttctccaatcgaagtatctctgcactcagcttcaggatcttgtccttctctgcctccacactctgcagcagccctgcccgctccttgctccattggcatttttcttccttcaagtgcaaaccgagctcagccagcctgccgttaacttcagccacttccaggcggctgcggtgtagttcggctatggtgcggtccctggctgctgctgcactggccaactcctccccaagaagggtggctttctgctggcttgaggctgcaagctcctgggcccctcgaagctgctccttcaagggctccagctcggccacccgctgctgggcctggcctagggtgtccttcatctgggccaccttgtctttcagtcgctgagcctgagcactctgctcctcttgccagctcttcgcctccttcaggtccaaatttaagtgatggttctcctgttgtgccacttggagctcagcctcactttgctccttgtctgcttgtacttctttcagttgcccaaggagcttctcttgttcccgagtcagggccttcactgtgccaa

SEQ ID NO: 186835 - DNA, 1396 bp, Homo Sapiens
ttggcttggggactggaggacctgtctggttattatacagacgcataactggaggtgggatccacacagctcagaacagctggatcttgctcagtctctgccaggggaagattccttggaggaggccctgcagcgacatggagggagctgctttgctgagagtctctgtcctctgcatctggatgagtgcacttttccttggtgtgggagtgagggcagaggaagctggagcgagggtgcaacaaaacgttccaagtgggacagatactggagatcctcaaagtaagcccctcggtgactgggctgctggcaccatggacccagagagcagtatctttattgaggatgccattaagtatttcaaggaaaaagtgagcacacagaatctgctactcctgctgactgataatgaggcctggaacggattcgtggctgctgctgaactgcccaggaatgaggcagatgagctccgtaaagctctggacaaccttgcaagacaaatgatcatgaaagacaaaaactggcacgataaaggccagcagtacagaaactggtttctgaaagagtttcctcggttgaaaagtaagcttgaggataacataagaaggctccgtgcccttgcagatggggttcagaaggtccacaaaggcaccaccatcgccaatgtggtgtctggctctctcagcatttcctctggcatcctgaccctcgtcggcatgggtctggcacccttcacagagggaggcagccttgtactcttggaacctgggatggagttgggaatcacagcagctttgaccgggattaccagcagtaccatagactacggaaagaagtggtggacacaagcccaagcccacgacctggtcatcaaaagccttgacaaattgaaggaggtgaaggagtttttgggtgagaacatatccaactttctttccttagctggcaatacttaccaactcacacgaggcattgggaaggacatccgtgccctcagacgagccagagccaatcttcagtcagtaccgcatgcctcagcctcacgcccccgggtcactgagccaatctcagctgaaagcggtgaacaggtggagagagttaatgaacccagcatcctggaaatgagcagaggagtcaagctcacggatgtggcccctgtaagcttctttcttgtgctggatgtagtctacctcgtgtacgaatcaaagcacttacatgagggggcaaagtcagagacagctgaggagctgaagaaggtggctcaggagctggaggagaagctaaacattctcaacaataattataagattctgcaggcggaccaagaactgtgaccacagggcagggcagccaccaggagagatatgcctggcaggggccaggacaaaatgcaaac

SEQ ID NO: 186836 - DNA, 820 bp, Homo Sapiens
tcccgtgtatcatacaccttcgtaggggcgtgagtcaagggctcaggattgcccatgtggatcactgtgtgctgctcgggccggcctggggaagctgggggccggggggcctggctgtagaaggctggggcagcagaggcgctgtctacctcctctggtccaggggtactgctggcattaaaactagaccagtcagagaagtcagacgtgttgaggggctcgggctctgggctcaccacctcatcgatcagagggaggcccagtcctgcccgggcccagttgactgtggccagcttctctctcagtgcggaggccacggggccagccaggttggttggggggaagatggggccattgcagctggggcactgatagccggcaggtgccgtgtttcggggtagctgggcagcacgttcattgaggcaggcccagtgaaagagatcatagcagacaaggcgggtcgtctctcggctggccaggggtatgttgcacaggcggcaattggggttgtagtcgctatcttggagccattgcaggtaggactggacgatgcacttggcgtgattggctaccaggcagtgctcgcagacgttgacccgatgttcgaagcagaacaggttggtcacctttctcttggggcacttacaaagccccatgatcgatccccagtctctgtgtttactgatcggccgctgcactggttccgaagggcggtagcgatggctcgaggcgcggaagggcagggaccactctccccagggctcctgcgcctctcccttcagccccggccgccccgattatccaacttttttgtacaaag

SEQ ID NO: 186837 - DNA, 624 bp, Homo Sapiens
  misc_feature (351)..(397): n is a, c, g, or t
atgcccttctccaacagccacaacgcactgaagctgcgcttcccggccgaggacgagttccccgacctgagcgcccacaacaaccacatggccaaggtgctgacccccgagctgtacgcggagctgcgcgccaagagcacgccgagcggcttcacgctggacgacgtcatccagacaggcgtggacaacccgggccacccgtacatcatgaccgtgggctgcgtggcgggcgacgaggagtcctacgaagtgttcaaggatctcttcgaccccatcatcgaggaccggcacggcggctacaagcccagcgatgagcacaagaccgacctcaaccccgacaacctgcaggtnnnnnnnnnnnnnnnnnnnnnnnnnnnnnnnnnnnnnnnnnnnnnnnctcactcccgtctcgcctcccagggcggcgacgacctggaccccaactacgtgctgagctcgcgggtgcgcacgggccgcagcatccgtggcttctgcctccccccgcactgcagccgcggggagcgccgcgccatcgagaagctcgcggtggaaggtaggggccgggcgggccgaggggcggcggcggccgcgtccccctcccggcgcggtccccgcccgcttttg

SEQ ID NO: 186838 - DNA, 841 bp, Homo Sapiens
ttgggtaaagttctatgacgaaagaaaaaaatggatgttggagaaggaagacatggtgagtgacgggaccacaggaagaagtcgtgaccttcatccttgcccttatgtcctggggcaagtcgtggaagcttctagagcctctgtgttcttatctctggaatgagggtggacagcaccttctagggaggattaggagagctgatgtgcttggagaggaagctctgaacagacccggggcttcagcactttggagggggaactattgctgccacaccccgctccctccaggcccacgaggactcggagaagctgcgggagatcgtactgcccatggaaaaggagatcgaggagctgaaggcgaagctgctgagggccgaggagctgattcaggagatccagagacgtccccggcatgccccttccctgcacggctccacggagttgctgcccctgtcccgggatccatcgcccccgctggagcctctggaggagctgagcggagatgggggtccagccgctgaggccttcgctcacaactgcgatgacagcgcctccatctcctccttctcccttggcggtggggtcggcagcagctcctccctgccccaaagccgccagggcctgagccctgaacaggaagagacggcctcgctggtgtctacgggcaccctggttcccgagggcatctacctgccccctcctggctaccagctcgtcccagacactcagtgggagcagctgcagacagagggccgacagctgcagaagacctggagagcgtcagtcgcgagcgggacgagctccaagagggccctgagacggagcaatgaggactgtgcca

SEQ ID NO: 186839 - DNA, 1615 bp, Homo Sapiens
  misc_feature (1136)..(1151): n is a, c, g, or t
ttgggtaagattttataatgactcccattaaaaaaaattaaattacttctatgaaactattttaaatgaaaatttctgtatagtagacttactgctgaaccattctggagatactgtagtagatttatcaagtaatatagtacttagttctcaatatgaaacttgaagccagttattcttttttgtcagtggcttttctcatatgaaacaatacagtattggcagtttcttaaaatagcttaattcatttttgtcagtcttatttttataatcagtgtttgatagcataaatcttcagtttgaattagatcaattaactgtgtatatctttttcagttaaatgtgcatattgtatttgaaggagagaaggaatttgatcaaaatgtgaaattatggggtgtaagtattacaaatttataagaattttttttctgataacttagatcatttgtagaataaaagacaattcttcagtaaacattgatgcaaagtatagatgtataacttaacagtgtatcctaccaaaaagtttaagactagatataaaagaggcctttagaagcttggatttgggattattggcataagcaagtctgatgttttcctctgagactaataaaactactgaggtttcctgtaattctctttgatatgttacaggtgattgatgtaaagcgaagttatgtaactatgactgcaacaaagattgaaatcactatgagaaaagctgaaccgatgcagtgggcaagccttgaactgcctgcagctaaaaagcaggaaaaacaaaaagatgacacaacagattgagtgggagatggaaggaaggctattacattatttccgaatttttaatactgtgtgaagtggtggcttgctgctgtaatcttttgttttgttgttgtgttactgaatgtggcatttcagggttaacattaggttcttaaaagccaaagtcagtttgtctttttgtgcctctcatctttcttttgtgttatgtaagattgattattcatttctccctactggtaggaaccatagttgtgtcctatacttgaagaggctggaaagtagcccataaccataattgcagtatttctttgtatttctctgttaagcaaagaaatattaaggaacannnnnnnnnnnnnnnngtattattccataattagtaaagcaagatgaaatgtcaaattttaatcagttttttcatggatttgtgttcttacagtacttgaaaatatttaaggaagagatgaagctctgcagttttttctatgtgggatgattacttttttaaggaggattaattctgaggtagtatagtaactaaaggggaatatatgaattgtttaacaaattagaatttgtttacaactacttgaatttttaaattatgtcaaaacttacattacttgccaagcagtatgatgttataggaaacataaataagattacagaggtatcaatttggttaaaattcaccattttataagactaagcaataatcttaacaacctctttcctgaatatttaaatgtgtttgtatggtgttatgactaattgttactgatttagagactaagccctcttaaaatctttagttaaattataaaaa

SEQ ID NO: 186840 - DNA, 1016 bp, Homo Sapiens
  misc_feature (834)..(852): n is a, c, g, or t
tttgtacaaaaaagttggccaagaattacttgaaagagaggacttttttccagattatgaagaaaatggaacagatttatccggggctggtgatccatacttggatgatattgatgatgagatggacccagagatagaagaagcttatgaaaagttttgtttggaatcagagcgtaagcgaaaacagtaaagttaaatttcagcatatcagttttataaagcagtttaggtatggtgatttagcagaacacaagagagcaagaaaatgtgtcacatctataccaaattaaggatgttgagttatgttactaatgtatgcaactttaattttgtttaacactatctgccaaaataaactttattccctataacttaaaatgtgtatatatatataatagtttattatgtacagttaattctactgttttggctgcaataaaatcgattttgaaataaatgaaatgttgaaaattttgctagttggttagatgcttatcctttaaattctacttttcttgaggggaaaaagtcttcgtctggaaatacatattactgcaaaaatgtagcatccttttttaggtaggagtattatagctttcattttagtttgacatttagtgtcccaatgaattgaatttcaaatatgaatcataatcttgaaaatctttagcactaaagtcttggaatatatcaacaactgatttacatatgcagatgctatttgataccaagggctttttaaatgtcatgggggggaaaaacccaacttggtgaactcccagctaaacaaccaagacttcactgaaggatttattccaattctagaattgttcnnnnnnnnnnnnnnnnnnncaactgactaacttcattaccttaaagcctagaacattattctgctttatttatatggctttctcacttttattttgtagcatgggttgcatcgacttttttactaaagaattttactagatattgtcattcaagttttcatctgctttataattgatacacct

SEQ ID NO: 186841 - DNA, 830 bp, Homo Sapiens
  misc_feature (395)..(406): n is a, c, g, or t
ttggttcctttcttcataacaaaaaagtaagatattcggtatttaacactttgttatcaagcacattttaaaaagaactgtactgtaaatggaatgcttgacttagcaaaatttgtgctctttcatttgctgttagaaaaacagaattaacaaagacagtaatgtgaagagtgcattacactattcttattctttagtaacttgggtagtactgtaatatttttaatcatcttaaagtatgatttgatataatcttattgaaattaccttatcatgtcttagagcccgtctttatgtttaaaactaatttcttaaaataaagccttcagtaaatgttcattaccaacttgataaatgctactcataagagctggtttggggctatagcatatgcnnnnnnnnnnnnaattattacctgatttaaaaatctctgtaaaaacgtgtagtgtttcataaaatctgtaactcgcattttaatgatccgctattataagcttttaatagcatgaaaattgttaggctatataacattgccacttcaactctaaggaatatttttgagatatccctttggaagaccttgcttggaagagcctggacactaacaattctacaccaaattgtctcttcaaatacgtatggactggataactctgagaaacacatctagtataactgaataagcagagcatcaaattaaacagacagaaaccgaaagctctatataaatgctcaaagttctttatgtatttcttattggcattcaacatatgtaaaatccgaaaacagggaaattttcattaaaaatattgggttcgaaataaaatatt

SEQ ID NO: 186842 - DNA, 2009 bp, Homo Sapiens
  misc_feature (163)..(203): n is a, c, g, or t
  misc_feature (1843)..(1854): n is a, c, g, or t
ttggctactctcttctgacagtcctagactggtcttctacactaagacaccatgaaggagtatgtgctcctattattcctggctttgtgctctgccaaacccttctttagcccttcacacatcgcactgaagaatatgatgctgaaggatatggaagacacannnnnnnnnnnnnnnnnnnnnnnnnnnnnnnnnnnnnnnnnggacaactctctttttccaacaagagagccaagaagccatttttttccatttgatctgtttccaatgtgtccatttggatgtcagtgctattcacgagttgtacattgctcagatttaggtttgacctcagtcccaaccaacattccatttgatactcgaatgcttgatcttcaaaacaataaaattaaggaaatcaaagaaaatgattttaaaggactcacttcactttatggtctgatcctgaacaacaacaagctaacgaagattcacccaaaagcctttctaaccacaaagaagttgcgaaggctgtatctgtcccacaatcaactaagtgaaataccacttaatcttcccaaatcattagcagaactcagaattcatgaaaataaagttaagaaaatacaaaaggacacattcaaaggaatgaatgctttacacgttttggaaatgagtgcaaaccctcttgataataatgggatagagccaggggcatttgaaggggtgacggtgttccatatcagaattgcagaagcaaaactgacctcagttcctaaaggcttaccaccaactttattggagcttcacttagattataataaaatttcaacagtggaacttgaggattttaaacgatacaaagaactacaaaggctgggcctggaaacaacaaaatcacagatatcgaaaatgggagtcttgctaacataccacgtgtgagagaaatacatttggaaaacaataaactaaaaaaaatcccttcaggattaccagagttgaaatacctccagataatcttccttcattctaattcaattgcaagagtgggagtaaatgacttctgtccaacagtgccaaagatgaagaaatctttatacagtgcaataagtttattcaacaacccggtgaaatactgggaaatgcaacctgcaacatttcgttgtgttttgagcagaatgagtgttcagcttgggaactttggaatgtaataattagtaattggtaatgtccatttaatataagattcaaaaatccctacatttggaatacttgaactctattaataatggtagtattatatatacaagcaaatatctattctcaagtggtaagtccactgacttattttatgacaagaaatttcaacggaattttgccaaactattgatacataagggttgagagaaacaagcatctattgcagtttctttttgcgtacaaatgatcttacataaatctcatgcttgaccattcctttcttcataacaaaaaagtaagatattcggtatttaacactttgttatcaagcatattttaaaaagaactgtactgtaaatggaatgcttgacttagcaaaatttgtgctctttcatttgctgttagaaaaacagaattaacaaagacagtaatgtgaagagtgcattacactattcttattctttagtaacttgggtagtactgtaatatttttaatcatcttaaagtatgatttgatataatcttattgaaattaccttatcatgtcttagagcccgtctttatgtttaaaactaatttcttaaaataaagccttcagtaaatgttcattaccaacttgataaatgctactcataagagctggtttggggctatagcatatgcnnnnnnnnnnnnaattattacctgatttaaaaatctctgtaaaaacgtgtagtgtttcataaaatctgtaactcgcattttaatgatcagctattataagctttttaatagcatgaaaatgttaggctatataacattgccacttcaactctaaggaatatttttga

SEQ ID NO: 186843 - DNA, 1463 bp, Homo Sapiens
  misc_feature (321)..(333): n is a, c, g, or t
  misc_feature (798)..(815): n is a, c, g, or t
  misc_feature (1162)..(1177): n is a, c, g, or t
ttggaattaatgctgtcaaaggaatgagtaaagcagaaaaacttttaaccagcaacatttcaagtacgtagtgtgatcaaacatgatcatccagaatttttatatttttttctttgtacagaggttacatattctgggtgttcttttataaaggaaacattttaaatcccacaaattgacactttctatcttcaatggactaagatttttttggtcagtaatctctgaaatttccttaaattatatacttaacatagcagagaaactggattgtttttgtatataagactgcttccacctgaaatgctgtcataagtactnnnnnnnnnnnnnagtgcccatcttgtacatgatattcttagaggtaataaggtaatgatgcatgaatttattttataaactcttggactatgtatttgacatgtaaaatatgtacagtattaacgtcaaccatctctttaaagttagcctataaatattgttgtataattttctttggtcagaaacacttggactgaatagtgacactcggtaaggattttcagtgccatttagcaaaacgtctttagtctatgcaactagcaaaaatctgcataatgcaacaacacagttttcacacttcaaattttacatgaggggttcttcacgattctcctggaacccagtctagcaaaatgagaggaaaggccctagggagatttatttctgttaaatagttaactctgctgagtatgacaaatagtgtctactatctcaaccctccaaaatttgcagagtgttgggactgtcatttgtgannnnnnnnnnnnnnnnnnggtggggtagttgaataaaattgggcagctaaatttttcagttccatgtgcctcccaaataaaaaacagaaaataagtagtttttgtgaattgacttgcagacaaagtaaaaactgtgctgcatgatgttattttgtaaacagatgacattttctgaccaggcacatgccatccaattttctgtcaatcacactgttgtataaagcagcagaactgaaggggaaaaatgattgttgtatacactgaattgctttgcatggtctcatttgagataattgatgtaagaatcctgacttttttatatttggaaacatcaaataaaaatggaaaaaatgatcatggctttnnnnnnnnnnnnnnnncacacacacatgaactcagatttgcaaaccaggtttctgaaactttgggtaaggtgtatgcttttaactttgaaatgtataaacacccagcggaaacgtatacctttcagtgcatagtgcattgtgtgcttaccctgggttgtttaaacttgtgttcaaatattccccctccaagtgaaagcctgtcgggaattccacagtaacacctttactgttctcccattgatgatcatatacgttacctcttcctagcggtacatttgtatgatccttactactggaatta

SEQ ID NO: 186844 - DNA, 968 bp, Homo Sapiens
ttggcaggagtcctgctccgtgtgcctggccgggctagatggcttccgccggcagcagcaggaggacagggagcggctgcgagcgatggagaagctgctggcctcggtggaggagcggcaacggcacctcgcagggctggcggtgggccgcaggccccctcaggaatgctgctctccagagctgggccggcgactggcagagctggagcgcaggctggatgtcgtggccggctcagtgacagtgctgagtgggcggcgaggcacagagctgggaggagccgcggggcagggaggccaccccccaggctacaccagcttggcctcccgcctgtctcgcctggaggaccgcttcaactccaccctgggcccttcggaggagcaggaggagagctggcctggggctcctggggggctgagccactggctgcctgctgcccggggccgactagagcagttgggggggctgctggccaatgtgagcggggagctgggggggcggttggatctgttggaggagcaggtggcaggggccatgcaggcatgcgggcagctctgctctggggcccctggggagcaggactctcaagtcagcgagatcctcagtgccttggagcgcagggtgctggacagtgaggggcagctgcggctggtgggctccggcctgcacacggtggaagcagcgggggaggcccggcaggccacgctggagggattacaagaggttgtgggccggctccaggatcgtgtggatgcccaggatgagacagctgcagagttcacactacggctgaatctcactgcggcccggctaggccaactggaggggctgctgcaggcccatggggatgagggctgtggggcctgtggcggagtccaagaggaactaggccgccttcgggatggtgtggagcgctgctcctgccccctgttgcctcctcggggtcctggggctggtccaggtgttgggg

SEQ ID NO: 186845 - DNA, 1534 bp, Homo Sapiens
actttgtacaaaaaagttggctaggttctgggaagatggcgaaggtctcagagctttacgatgtcacttgggaagaaatgagagataaaatgagaaaatggagagaagaaaactcaagaaatagtgagcaaattgtggaagttggagaagaattaattaatgaatatgcttctaagctgggagatgatatttggatcatatatgaacaggtgatgattgcagcactagactatggtcgggatgacttggcattgttttgtcttcaagagctgagaagacagttccctggcagtcacagagtcaagcgattaacaggcatgagatttgaagccatggaaagatatgatgatgctatacagctatatgataggattttacaagaagatccaactaacactgctgcaagaaagcgtaagattgccattcgaaaagcccaggggaaaaatgtggaggccattcgggagctgaatgagtatctggaacaatttgttggagaccaagaagcctggcatgaacttgcagaactttacatcaatgaacatgactatgcaaaagcagccttttgtttagaggaactaatgatgactaatccacacaaccacttatactgtcagcagtatgctgaagttaagtatacccaaggtggacttgaaaacctcgaactttcaagaaagtattttgcacaggcattgaaactgaacaacagaaatatgagagctttgtttggactttatatgtcggcaagtcatattgcttctaatccaaaagcaagtgcaaaaacgaaaaaggacaacatgaaatatgctagttgggcagctagtcaaataaacagagcttatcagtttgcaggtcgaagtaagaaggaaaccaaatattctcttaaggctgtcgaagacatgttggaaacattgcagatcacccagtcttaaggtttcaaaaactctttgacattagatttcacaactgcacaattgaacttattggcctgtaacttatttactaaatgctcagtgctatttatatactacagtaattttctgttaagaaggcagttgtaaagaatgtgtttatataaacctaaaaatgccttttactgctaagtggggagatgggggaaatccatggaagagagatttaagacttattgattgtacatcagtctcttcatatcacatatacatgtatatatataaaactctaatgtagtataaccttgttaaataaaccatgatgatttattaaacttgcatatgaagattctaacttcattttgttatactcacagtggatatattgtttaagaactcagtttctagttaactccttactggtgatagcaaagtcacagcatatgtagctgaccgaagcagattattttgactttgtttatattgtcgaattggattttgctgtacattccagtgggctatttgaattgttttatctgctgtaatatccttctgatgaatcttgcttaaatatgtcattctccaaagttcagcaatatttctttgtaaaatttttgttttgatat

SEQ ID NO: 186846 - DNA, 1822 bp, Homo Sapiens
ttgggatggggaccctgtggagctcttgaagttgggaaatcagttagctaaattcagacagtgcctgcaggaaaatccaaaatttttgcaagaaaaagtaaaacagtattttaagaataaccagcataagctgactttatcgatgaggccagatgacaagtatcacgagaagcaggcacaggtggaagccacgaagctcaagcagaaggtcgaggctctgtcccccggagacaggcagcagatctacgagaaaggtctagaattacggagtcaacaaagcaaacctcaagatgcctcttgtctgccagcgttgaaagtttccgatattgaacccaccatacctgtcacagagttggacgtggtcctgacagctggagatatccctgttcagtactgcgcccagcccaccaatggcatggtgtatttccgggccttctccagcctgaacacactccccgaggagctgaggccctatgtgcccctcttctgcagcgtcctcaccaagctgggctgcggccttcttgactaccgggagcaggctcagcagatagaattgaagaccggagggatgagtgcttctccccacgtgctccccgacgactcacacatggcacctacgagcagggtgtgcttttctcctctctctgcctggatcgaaacctgccagacatgatgcagctatggagtgaaatatttaacaacccgtgctttgaagaagaggagcacttcaaggtgctggtgaagatgaccgcccaggagctcgccaatggaattcctgactctgggcacctgtacgcatccatcagggcaggccggaccctcacgcccgcaggggacctgcaggagaccttcagcgggatggatcaggtgcggctgatgaagaggattgcagaaatgacagatatcaaacccatcctgaggaagctcccgcgtatcaagaaacacttgttaaatggtgataatatgaggtgttcagtgaatgcgactcctcagcagatgcctcagacagaaaaagcggtcgaagacttccttagaagcatcggtcggagtaaaaaggaacggaggcctgtgcgcccacacacggtcgagaaacctgtgcccagcagctctggtggagatgcccacgttccccatggctcccaggtcattaggaagctggtcatggaacccaccttcaagccctggcagatgaagactcacttcctgatgcccttcccggtgaattacgtgggtgaatgcatccgaactgtcccctacacggacccagatcatgccagtcttaaaatccttgcacgtttgatgactgccaaattcttgcatacagaaattcgagaaaaaggcggtgcttatggtggaggcgcaaaactcagccacaatgggattttcaccctttactcttacagggacccaaatacaatagagacgctccagtcttttgggaaggctgtcgactgggctaagtctggaaaattcacacagcaagacatcgacgaagccaaactttctgtcttctcaaccgtagatgctcctgtcgctccttcagacaaaggaatggaccacttcttgtacggcctctcggatgagatgaagcaggcccacagagagcagctctttgctgtcagccacgacaagctcctggccgtgagcgatagatacctcggcactgggaagagcacacacggcctggccatcctcggacccgagaactgcaccaattgtttaggacccatcctggatcatccgatgagcatctgtggcgctccactgcacaggagcccgagacaatacacctccgagttgaatatgaaatgtcggaaatgct

SEQ ID NO: 186847 - DNA, 853 bp, Homo Sapiens
ctgcccacctgctgaatgatgcccttagcatccgggagagcaccttgggacctcacaaaactgctgtggctgccacactcaactatttggctgtgctctatggcaaaaggggcaagtacaaggaggcagagcctctgtgccagcgggcactggagattcgagaaaaggtcctgggcacgaatcatccagatgtggcaaaacagctgaacaacctggccctcttgtgccaaaaccagggcaagtatgaggccgtggaacgctactaccagcgagcactggccatctacgaggggcagctggggccggacaaccctaatgtagcccggaccaagaacaacctggcttcctgttacctgaaacagggcaaatatgctgaggctgagacactatacaaagagatcctgacccgtgcccatgtacaggagtttgggtctgtggatgatgaccacaagcccatctggatgcatgcagaggagcgggaggaaatgagcaaaagccggcaccatgagggtgggacaccctatgctgagtatggaggctggtacaaggcctgcaaagtgagcagccccacagtgaacactactctgagaaacctgggagctctgtataggcgccagggaaagctggaggctgctgagaccctggaggaatgtgccctgcggtcccggagacagggcactgaccctatcagccagacgaaggtggcagagctgcttggggagagtgatggtagaaggacctcccacgagggccctggagacagtgtgaaattcgagggatgtgaagatgcttctgtggctgtggagtggtccggggatggcagtggggaccctgcagaggagtggctctcttg

SEQ ID NO: 186848 - DNA, 1689 bp, Homo Sapiens
ttgggtggcattaatatggagggagaattcctgaccactgcaagcatggtttctattttacctcaagactccagccttccttgcattcacttctttacagggactcctgatcctgagagatctgtttttaagcctttcatatttgtgccacatatttcacaactattggataccagttcaccaacatttgaacttgaagatctagttaaaaagaaatcacattttaagcctgacagaagacacccactctaccaaaaacatcaacaggcattggaagtagtaaataataatgaggaaaaagccaaaataatgttggacaacatgaggaaactggagaaagaactattcagagagatggaatcaatccttcaaaacaagcatcttgatgtggagaaaattgttaatctctttcctcagtgtacaaaagatgaaattcaaatttatcagtcaaagttagttcttagtgatcatatggtcagctaatattagttcttagtgatcagtggtcagtaatcttcaaagtcagaatctatcaccttggtaaattatataaacctaacttgagcagatctgattattcttggatagtattcaagtggtatcttgactattaaactacgtatagtgttgctgaaatagaaagaaaacagcattggaattggattcatgtatcgtgggatacaggtgttatttcaggtgatgtacttgcattattttctttagccatagtaactttttgtcacaataactaagtattcaattatatataaagagtgaaacattaaaatgacgcatggatttatatttattataattatgtagtaccctcaaatcattttgtcagttacatcaagaaagcagatttttctttagtcatgaaaaatatctcaagtggtaagttgtttgtgctttaggcaaacattaaccagctctaacaagaaaaatgtctagatttacacattgtcaatacagtatattagttctgcaaatgcacttttgttaaactcaaacatgctctttgtcaagacttggctaaccagtgagcttgtagctctgattatctagcatttttagggtcattctccttaataggcttttatgttaataagatatatttttagaagagcttgtttgggagattagagaataagataaaagaaccaaaaccttaggatatactgtttctgggtctgaaatctctctcattgtttacttctgttcactcagtgaaaacagaaacaagaatgaggtagtggcaatgaaatagaattattagtatattatgaacattataacattttgaacactataatgcattatatattatgaacttttatgaactttatacatgagtaatagcttcctaaagtttataaaacattgtttaggttacataaagattaccaagtaagactcaaaattgcaaatataaacaaaagaaaaatccaactgaaaataacactaagtatttttgagttcctagaatgtccattttggtatttggtacattatcatatttactagtcactatcagcacaattaattaataaagaagtgggtcattatattcaaagagtgctcaggaagttatgtgttcaaagttctctcataaataccatcgtctgcctgatactgctcttgtctaatagagggttgacattacaaaagaaaagatgtctgactcaagaa

SEQ ID NO: 186849 - DNA, 1611 bp, Homo Sapiens
  misc_feature (661)..(706): n is a, c, g, or t
  misc_feature (1172)..(1225): n is a, c, g, or t
ttggctgatataacccttttaaaaaatggtgactcaaatattatgaacagctttgccgaagtagcaagattttctaaaataataaaggatgacccttcctttgttttatgatagctacacttctggaaaattcagtatggacagtctccgacttaggatttttcaactttaggatggtgtgaaagagacacccattcagtagaaactgtacttcgagttttgcattttgatcttttcctggcctagtgataatgtggtacagtacactcttgtgatgctgggcagcggcagcgagccacagctcccagtcacccattttatcacgggaatcaacaacccatcctctaccgtgtactgtgttgtcagcttttttggatattgtgttttgtgttttcacattccatcatgtctacaaaatgtccatcagtgtctcctgtttctggtgagatgaagaagaggaaggcaattactcttgaaatgaaactcaagataattgcccagcatgaaggtggcaagccagtaatggccattgcacgtgagttaggactttggcaatccacgatttcaaccatcttaagggataagaagcaaatcagtgatgcagcgaaatcgtcagcatcagttaaatccactgtcatcacaaagaaaagggctggaccannnnnnnnnnnnnnnnnnnnnnnnnnnnnnnnnnnnnnnnnnnnnntacagaagcgtataccacttagcctactgatgatccaggctaaggcaagaagtctttttaatatgctaaaagaccgtgccagtgatcctacatatacacaaatgtttaaagcaagtcatggatggttccagcgcttcaaaaggcgtcataattttcacaatgtaaagatcactggtgaggcagcacgtgctggtaatgaaggtgccatagcttttaaggaacagctgcataggataattatggctaaagatctttgcaataaggagctgattgcactggaggaagaaagaggtaaaggcgttgaggcagtggaagaagttacacccacggcacctagaaagttcacagcaaagaaactggccgaggcatttgctgctatcagcagtggcctacacgttagaagaaatggacgtcaattacgagagattcgccacagttgacaggcagatacaggatgctcttgctnnnnnnnnnnnnnnnnnnnnnnnnnnnnnnnnnnnnnnnnnnnnnnnnnnnnnnggtatcttcctgaagaacaacactatgcttgctaaaccatcaactagtgttgatgtcccaatgccttctaccacctattctcgatgttcatcagaagagagagaaattgaggaccctgttgcatccccatcatccagcaattaattctatttcagtgcttcaaacatttttcaggaccactgtgctttcagctgtgtaaattaatgatgccctccaaatccttggttatggaatatttggctcatcccagtacactcggcttggctgttgggagttgcttgtggcatgtgcctgggctggagccttcgagtatgctttgggatgctccccaaaagcaagacgagcaagacacacacagatactgaaagtgaagcaagcatcttggg

SEQ ID NO: 186850 - DNA, 1188 bp, Homo Sapiens
  misc_feature (1031)..(1076): n is a, c, g, or t
ttgctttcctctgtgtcgccttatatccattgctttttctttttgctctatctcttgaccccacctcaaacgaatttctgccccaccaaagacagtaaccccttttatgttaaaattagtggaaagaatgttaatataatgccctaactttaaagaagaacataaaggaaatttataagtacttccagggctgtcatctatgccgtgccaatcatgcagtgcacaattccaagggcaccactttacattacaaatacagtgcattacaaatatagtggccccatgtttataaatgcttagataatactccactagaaaaagaaactgatagttgcttgccacatagaagcactgtgaatccagcagcctcatttgtagactgatataagtgtcttattggtgactcaaatattatgaacagctttgccgaagtagcaagattttctaaaataataaaggatgacattcctttgttttatgatagctacacttctggaaaattcagtatggacagtctccgacttaggatttttcaactttaggatggtgtgaaagagacacccattcagtagaaactgtacttcgagttttgcattttgatcttttcctggcctagtgataatgtggtacagtacactcttgtgatgctgggcagcggcagcgagccacagctcccagtcacccatgtgatcacgggaatcaacaacccatcctctaccgtgtactgtgttgtcagcttttttggatattgtgttttgtgttttcacattccatcatgtctacaaaatgtccatcagtgtctcctgtttctggtgagatgaagaagaggaaggcaattactcttgaaatgaaactcaagataattgcccagcatgaaggtggcaagccagtaatggccattgcacgtgagttaggactttggcaatccacgatttcaaccatcttaagggataagaagcaaatcagtgatgcagcgaaatcgtcagcatcagttaaatccactgtcatcacaaagaaaagggctggaccannnnnnnnnnnnnnnnnnnnnnnnnnnnnnnnnnnnnnnnnnnnnntacagaagcgtataccacttagcctactgatgatccaggctaagggcaagaagtctttttatatgctaaaagaccgtgccagtgatcctacatatacacaaatgtttaaagc

SEQ ID NO: 186851 - DNA, 863 bp, Homo Sapiens
  misc_feature (292)..(304): n is a, c, g, or t
ttgggttacccagggctctgcagcacctcacctgagacctccactccacatctgcatcactcatggaacactcatgtctggagtcccctcctccagccgctggcaacaacagcttcagtccatgggtaatccgttcatagaaattgtgtttgctaacaaggtgccctttagccagatgctaggctgtctgcgaagaaggctaggagttcatagaagggagtggggctggggaaagggctggctgcaattgcagctcactgctgctgcctctgaaacagaaagttggaaaggnnnnnnnnnnnnngcaattaggtagcacagcactttggttttgctgagatcgaagaggccagtaggagacacgacagcacacacagtggattccagtgcatggggaggcactcgctgttatcaaatagcgatgtgcaggaagaaaagcccctcttcattccggggaacaaagacgggtattgttgggaaaggaacaggcttggagggaagggagaaagtaggccgctgatgatatattcgggcaggactgttgtggtactggcaataagatacacagctccgagctgtaggagagtcggtctgctttggatgattttttaagcagactcagctgctatacttatcacattttattaaacacagggaaagcatttaggagaatagcagagagccaaatctgacctaaaagttgaaaagccaaaggtcaaacaggctgtaattccatcatcatcgttgttattaaagaatccttatctataaaaggtaggtcagatccccctccccccagggttcctccttcccctcccgattgagccttacgacactttggtttaagcggtgctgtccgggtg

SEQ ID NO: 186852 - DNA, 1001 bp, Homo Sapiens
ttggcttatgagtgtaaggtctgtgggaaagccttctgtcaaagctcatctcttactgtgcatatgagaagccatacaggtgagaaaccctatggttgtaatgaatgtgggaaagccttttctcagttctcaacccttgctctgcacatgagaatccatactggtgaaaaaccttatcagtgtagtgaatgtgggaaagctttcagccaaaagtcacatcacattagacaccagagaattcatactcattaaagttctctatgaatgccttggatttagcaaaacgttcagcagattttacacttaatagtgtattggaaaattcattttacattaaagtgacatgaatgtgggaagtccttcagcagcaattcaaaacttaaatactatgatgtttaataagtattatagtgtaaagaaaacccgtacccccaaaactcccacaacaagcattatcaatgctgtacttctaggagtatactcattaaagttaggatctagtcatggacactacttaatgtgttcctggaaggcctacagatgcattaagaaatagatatgagatgtatgaggatttgaaattaagagacaaaattatcatttttgtgatgttttgctacatatatgaattgtaaaactagaatcatcaaaattatttgttgttgaagcagtcataaaactgagactgagacagaatattgaattcagaaatgtgtgcatgaatatatggggaattggtaattgatagaggcggtatcccagattggtggggaaatcatggattacttaaaaattaattgactcttcatatggaaaaataatatctcccatcataatataaaatatttttcttatgaattcttaaagtactaaagactaaaatgcaaaaagcaatacttaataatataacagttttataagaagatgtttttaaaaccttagggcaggaaagaacttctaaaacattccagaataccccggtagttccactcttgagtatg

SEQ ID NO: 186853 - DNA, 1121 bp, Homo Sapiens
ttggttcagtaccaccctgggcctggccgcggtgaccgaggcgggccgcgtcgcggagacttctgggagtgcttcctcgctctccgagtgcgcaagcgcagcgcaccgagtggacattttggctttgtccgcgggtcagtacggcccctgggtccacgtggcgcgaaagtaggagttaatatgatcctctgttgaagcaagaagacaaactgtatggtggagaaagaagtgggaaggatctgcgcggaagaagcctgagaagatgatgcacagatagagaggcaccaggacttgagaggcaccaggacttgggaggcatgttgatccatctccaggaaagactgagaaaaagagcgttgaatataagaaaaaatacttcctctgttctcagatcgtatttgttttaaggccacacctttttgaagttttcagtttgaaacacaacctggactgaaatcatgagggaggttgtgtaggaaagaatcatcaagggacttagttgggagcttctctaccacagcttactccttatggtattaaccccctttaagtgtaaatgtctttggtttaaaacgtttgtacctcatctgttaccagagtgttcatactggagagaaaccctatgaatttactgaatgtgggggaactgttactcatatgttgcatttcgtcgaacgtgcaagtcatgctgaagagaaaccctgtgcttctaaggagtattgacaagcccttagctagatgacaatctcattgagaagcagaaaattcatgctggagagaaactagtgaaggtagcaatacttcattgaatattagaaaatttttctagagagaaagcattgaatatactgagtatgataacatttcctctcaaaccttatcccttactctgcatttgggagatcatacacagagaagccttataaatgtaagagatgtggaaatatcttcagccaaaagtaaatcctcactcatcaagaaatttttactggagagaaaccttgtgaatgtgggaaagcttccattcagatgtcacacctcagccagcagagaatttacagtggggaaaacccctttgcctgtaagtatgtggaaaagtcttcagccacaaatcaaacctc

SEQ ID NO: 186854 - DNA, 2281 bp, Homo Sapiens
  misc_feature (1815)..(1875): n is a, c, g, or t
actttgtacaaaaaagttggattgaatatactcgagtatgataacatttcctctcaaaccttatcccttactctgcatttgggagatcatacacagagaagccttataaatgtaagagatgtggaaatatcttcagccaaaagtaaatcctcactcatcaagaaatttttactggagagaaaccttgtgaatgtgggaaagcttccattcagatgtcacacctcagccagcagagaatttacagtggggaaaacccctttgcctgtaaggtatgtggaaaagtcttcagccacaaatcaaacctcactgagcatgagcattttcacacgagagagaaaccttttgaatgtaacgagtgtggaaaagcctttagccaaaagcagtatgtcattaaacatcagaacacccatactggcgagaagcttttcgaatgtaatgaatgtggaaaatcatttagccagaaggaaaacctccttacgcaccagaaaattcacactggagaaaaaccttttgagtgtaaagattgcgggaaagctttcattcagaagtcaaacctcatcagacaccagagaactcacacaggagagaagccctttgtatgtaaggagtgtggaaaaaccttcagtggcaaatccaaccttactgagcatgagaaaatccatattggagagaagccttttaaatgtagtgaatgtggaacagcctttggccagaagaagtacctcataaaacatcagaacattcacactggagagaaaccctatgaatgtaacgaatgtggaaaagccttctctcagcgaacatcacttattgtacatgtgaggattcattcaggtgataaaccttacgaatgcaatgtttgtggaaaagccttctctcagagctcatctctcactgtgcatgtgagaagccatacaggggagaagccctatggttgtaatgaatgtgggaaagctttctctcagttctcaacccttgctctgcatttgagaatacacacaggtaagaagccttatcagtgcagtgaatgtgggaaagctttcagccagaagtcacaccacattagacaccagaaaattcatactcactaaaaaccccatgaaagccttgaaagtgggaaagctttcattagaaatttgcacctcatcatgccccagaaataatccttctgaagcaaagcaccacgaatgaggttaactttaacaagtactaaaaacttaagggacaccagaaaatttgtactgaagagaaagacatgcatatgattaaaaccctgtgtccaacagagaaacctgcagcagagataatggtgaaagtttaggcacattttcactaaaagtgggaacagaaaatggaggcctgttttttattgctaccaccatagatctggagatcttcgccagtaacaagaaaaattaagttgtaaatattggaaaggaacagacaaaaatagatgacatggtcatctacaactaatattaagactcctgtggtattgattgagcagagcagaagagatttcaaaaaaagacctatgcatttattagaatttggaatatgatacaagtggcatcaggaaatgaggaaataatggaactattttttttaagtggaggtagtttgttctccaagggggaaaaatagaccatgaactatacacaaaagtgaatccagagattaaaaacagaaatatggaaaagctatgtactaaaatgcatatgaccttgggaatagggaaacattccttggaacaatttgagaaatacttagcggttctacttatgagtatgaatgctcaggaaatacgcactaggnnnnnnnnnnnnnnnnnnnnnnnnnnnnnnnnnnnnnnnnnnnnnnnnnnnnnnnnnnnnncgaacaatatgggaaattcttatgtaatactatatatctgtaaaatgcaacaaatgaaatccacatgtattaacagaaagatcccagaattgttgaggggggatcaagttgcagaatgatacagatagtacaatgacttttttgtaaatttgaattaaaagtttcctcataaaactcagtactatctattggtaatggatgcatatatgtatgtacatgtttttgaaacggattgggaaggatacagaccaaactcttgatagtggtcacctgtgaagagtggagaagggaaaataatgagtgtgggaggtgggatgggtattggttaaaggggacttcagctttttatataaacatccacttctcttttcaaaagacttcaagtaaatattaagaagatactgat

SEQ ID NO: 186855 - DNA, 991 bp, Homo Sapiens
ttgggtaaagttctttttgagtacattccacaaaatgaggatgaactggagctgaaagtgggagatattattgatattaatgaagaggtagaagaaggctggtggagtggaaccctgaataacaagttgggactgtttccctcaaattttgtgaaagaattagaggtaacagatgatggtgaaactcatgaagcccaggacgattcagaaactgttttggctgggcctacttcacctataccttctctgggaaatgtgagtgaaactgcatctggatcagttacacagccaaagaaaattcgaggaattggatttggagacatttttaaagaaggctctgtgaaacttcggacaagaacatccagtagtgaaacagaagagaaaaaaccagaaaagcccttaatcctacagtcactgggacccaaaactcagagtgtggagataacaaaaacagataccgaaggtaaaattaaagctaaagaatattgtagaacattatttgcctatgaaggtactaatgaagatgaacttacttttaaagagggggagataatccatttgataagtaaggagactggagaagctggctggtggaggggcgaacttaatggtaaagaaggagtatttccagacaattttgctgtccagataaatgaacttgataaagactttccaaaaccaaagaaaccaccacctcctgctaaggctccagctccaaagcctgaactgatagctgcagagaagaaatatttttctttaaagcctgaagaaaaggatgaaaaatcaacactggaacagaaaccttctaaaccagcagctccacaagtcccacccaagaaacctactccaccctaccaaagccagtaatttattgagatcttctggaacagtgtacccaaagcgacctgaaaaaccagttcctccaccacctcctatagccaagattaatggggaagtttctagcatttcattaaaatttgaaactgagccc

SEQ ID NO: 186856 - DNA, 1108 bp, Homo Sapiens
tataatggccaactttgtacaaaaaagttggcattcacatcttgcagtgcattggagaattcataccggcgagaaagcttataaatgcaatgaatgtggcaaagttttcagcatacattcacgacttgcagctcatcagagaattcatactggagagaaaccttacaaatgcaatgaatgtggcaaggtcttcagtcaacattcacgtcttgcagtgcatcggagaattcatactggagagaaaccttacaaatgcaaagaatgtggcaaggtcttcagtgaccgttcagcttttgcaaggcatcggagaattcatactggagagaagccttacaaatgcaaagaatgtggcaaggtcttcagtcaatgttcacgtcttacagtgcatcggagaattcatagtggagagaaaccttacaaatgcaatgaatgcggcaaggtctacagtcagtattcacatcttgtagggcatcgaagagttcatactggagagaaaccatacaaatgtcatgaatgtggcaaagcctttaatcagggctccacactcaatagacatcagagaattcataccggagagaaaccttacaaatgcaatcagtgtgggaattcctttagtcagcgtgtccatcttagacttcatcagactgttcatactggagacagaccttacaaatgtaatgagtgtggcaaaacctttaaacggagctcaaacctcactgcacatcagataattcatgcaggaaagaaaccatataaatgtgatgaatgtggcaaggtattcaggcatagttcacatcttgtaagtcaccagagaatccacactggagagaaaagatacaaatgtattgaatgtggcaaagcctttgggcggttgttttccctcagcaaacaccaaagaattcattctggcaaaaaaccttataaatgtaatgagtgtgggaaatcttttatttgtcgctcaggcctcactaaacatcgaataagacatactggagagagccttacaactaaactcaatgtgacaaggccttagacgttgtcctagtttctggaatcaccgaataattcctacttactgatataccttgtatatttaccccttctcttg

SEQ ID NO: 186857 - DNA, 1944 bp, Homo Sapiens
attttcaaaatagttaagccagactgtttcctagagatacttcatttattttcattttcagatactactggctattttggtaagggctacacattaatactgaccagtttagcttcctgactgttaaactattccacaatgaacctgccttcacactgcagacattgtggagatcctttaacatacacatattctaaaatatatgctcaaagtaaaaagatccaaattcacaagagtatgaaatatttataaaaaaatcatgcatcagactgtacagcctagaaataaaagaagattcaaattcagtaataaaggtaagagctatacttgctctaaacattttaagaaagactttggagtctcagaatgtcctggggctcaattatccttttccgtttgcagagaagcagtagccagagctactgctgtgactggctgggcaattccatggagctgcatctttgcaagtttcttctgttcacattctgtgaccaaacggttcaactccgctgcactgtatccaataagagtcttcaagtcacagacaaacttgtacacaaatctcttgccttgaactttacaaatcatgtccccatcgtaataatatcttaatgcacgactgagtttctcatagttcatcgtaggcttatttttacgctgtccccatttctgtgcaaccagttcaggctgatttagcttaaattcaccttcatcaccaacccaagaaatgcagtctcgagcgtccttatcagtaagaagttctagcaaaaactgccatagttggatttggccattgtttcctgttctgttcccaggtgagcttctatcttctcctgaaatcctcggcgctctttgtactttggctgctttcgcactactatttataactttaatggtagtaggtgtagcagattgcactgatgctggaataatttgcacaggttgatcaattgtaactatttcattcatctgttgttcttgacttgccaatacatattttcggagaagttccagatgactccagagaatttctccccgaggaacccgctgaaaaaaatcttcttggttgagactacataattctctccccgaaatgttgagtgtggtgaggtctatatcggtcatgctgaattccttcattacccaaaccacccaatgcaggacttggtctgtggaccactgtatgggatcatagggtatcccaaggcgttcttgttctttcctatagccttccagtgcagcagcccatcttgtcacttgttctgaagtttcatctgaaatggttgtgatgtgttttgtgccatcaagagttatcacttgagcttcttcaacaagatgtgcttctgattcagcatggtgggcatctggatcaataacaacctcaacagtgtccgcaggtttaacaatttcaaggatgtttaactttggttcaattccttggtaagaaattacctgtacactaagctgtacagttccatctgtttttactccttggtcaaataaacttcgttctggatccagctggatatcttgcagacaaatttcatgagcatccaaagaacactgtagtcttggttctagcagtttctttaaattgcctattggttcattgatgtctatggcctggcttacacattcagctggcgcgtaggtttgttctacaatgctttcttctgtgcactctgctttctctgttccatcaatctcaatttctatcagctcctctgcttctcttttagtcatggctggagtatttcaaaggatcagtcccactccggaatcggccctgtcgcccccgcccgcactccagagccggctgagaacggcagcggcgagggctccacgtgcagcgtctctccgggtaagacctgcagctcccgcgactagaagtgtgaggtcccagggcccttcccgcggaatcggcgctgagaagccccaacccaa

SEQ ID NO: 186858 - DNA, 1423 bp, Homo Sapiens
ggctggttttctaaaggcggatggagactcggacagctgcaaacacagcccggcatggcagagccacagctgggggccccttcccggagcgtaggccctgatgaactgaacgtgttcaccacacacccgacagatgatccaccacgttctggaaaagccgagttccctttccagatggccctggcccacgcctcagctcatgaaatgtggacctgccgagcccagaggctcccacacgagggtgacacgggcatggacagagtcctccagcttcagtgccttgaggtacagaaacacaaagacagtcaaggaacagagtgactcggaggtgaccggggccctgagcggagccatggccagggctgacgtttcaccttcatcatcagggacagcttcagctccgggtgctcttccaagaatgttctggatggggtagaaatgcaacctaaccactgggtaaatccagccaaggaaaagaacttccagaaaccaaggcaagggctcactggcttcttgtgacctgcgagaagatctggccacgtccaggtcactccggtagcagcgtctgccctcagatgcaaggaaatcgtccagccacgccctgatttgctgagcctgttaaggctgaacaggagagccctaggtgacgggcctagaaacttccgtaggaagccccatgggcagcttgggcggcatcactgggggacaggtgtgtctgccgtctgtttccctgggccaagcccaggcccaggctgcccacgccgtcctccgtgcctgtcccagagtgccgtgatgctgttgggcattaggagtagatggtgatcacctcccggccgccacccctgaccaggaggactctgttcagcccctcggtcaggacttcaagaaactccatgtagttctcgtctccctgccggtttttgggaggacctggcatgttgagcaggaccagctgcgcatcctgggacttgttgaggacgacgccattgagcttcacagccgtgtgcatccgcctgacgttggactggtccctgcaggggaggtgggcacggtcagcgggcggcgggtgcaccccacgctccggacacgaggctgagctgagccctgatgagctgcattcacacgtgttggaaagggctgtgtgagtcaggatcaggcggattctctgaccctgaaggatgcagaagtggcggctccgagcgaaaggcgctgactgcagccagggcgggcgttcagcagcgggatgctttggcctccagggacctagaactcagcccactaaggctgccaagcttctaagggctacagtcacacaacacaaaccgcaagcgctttcctaactacatctacatctgcaaagcaggcagaacagtggaagccgtctgggtggcccatgtgcctgacgccttcaaggctgacccaa

SEQ ID NO: 186859 - DNA, 832 bp, Homo Sapiens
actttgtacaaaaaagttggggaagttcttttccttggctggatttacccagtggttaggttgcatttctaccccatccagaacattcttggaagagcacccggagctgaagctgtccctgatgatgaaggtgaaacgtcagccctggccatggctccgctcagggccccggtcacctccgagtcactctgttccttgactgtctttgtgtttctgtacctcaaggcactgaagctggaggactctgtccatgcccgtgtcaccctcgtgtgggagcctctgggctcggcaggtccacatttcatgagctgaggcgtgggccagggccatctggaaagggaactcggcttttccagaacgtggtggatcatctgtcgggtgtgtggtgaacacgttcagttcatcagggcctacgctccgggaaggggcccccagctgtggctctgccatgccgggctgtgtttgcagctgtccgagtctccatccacctttagaaaaccagccacttcttttcataagcactgacagggcccagcccacagccacaggtgcgatcagtgcctcacgcaggcaaatgcactgaaacccaggggcacacgcgcgcagagtgaacagtgagttcccccgacagcccacgacagccaggactgccctccccaccccaccccaccccaggagcacggcacacagttcagcctctgacctggctcacacgtgccatccccaccccggtgctccaggggaaagaagacacagacccgacgtgggaggtcctcatgcaccagtggcgcctggtgtcgggtctgtctggcttagtcccgggcgtcccctg

SEQ ID NO: 186860 - DNA, 2035 bp, Homo Sapiens
ttggctccccgtccccgccgctgcagccgtcgccttcggagcgaagggtaccgacccggcagaagctcggagctctcggggtatcgaggaggcaggcccgcgggcgcacgggcgagcgggccgggagccggagcggcggaggagccggcagcagcggcgcggcgggctccaggcgaggcggtcgacgctcctgaaaacttgcgcgcgcgctcgcgccactgcgcccggagcgatgaagatggtcgcgccctggacgcggttctactccaacagctgctgcttgtgctgccatgtccgcaccggcaccatcctgctcggcgtctggtatctgatcatcaatgctgtggtactgttgattttattgagtgccctggctgatccggatcagtataacttttcaagttctgaactgggaggtgactttgagttcatggatgatgccaacatgtgcattgccattgcgatttctcttctcatgatcctgatatgtgctatggctacttacggagcgtacaagcaacgcgcagcctggatcatcccattcttctgttaccagatctttgactttgccctgaacatgttggttgcaatcactgtgcttatttatccaaactccattcaggaatacatacggcaactgcctcctaattttccctacagagatgatgtcatgtcagtgaatcctacctgtttggtccttattattcttctgtttattagcattatcttgacttttaagggttacttgattagctgtgtttggaactgctaccgatacatcaatggtaggaactcctctgatgtcctggtttatgttaccagcaatgacactacggtgctgctacccccgtatgatgatgccactgtgaatggtgctgccaaggagccaccgccaccttacgtgtctgcctaagccttcaagtgggcggagctgagggcagcagcttgactttgcagacatctgagcaatagttctgttatttcacttttgccatgagcctctctgagcttgtttgttgctgaaatgctactttttaaaatttagatgttagattgaaaactgtagttttcaacatatgctttgctagaacactgtgatagattaactgtagaattcttcctgtacgattggggatataacgggcttcactaaccttccctaggcattgaaacttcccccaaatctgatggacctagaagtctgcttttgtacctgctgggccccaaagttgggcatttttctctctgttccctctcttttgaaaatgtaaaataaaaccaaaaatagacaactttttcttcagccattccagcatagagaacaaaaccttatggaaacaggaatgtcaattgtgtaatcattgttctaattaggtaaatagaagtccttatgtatgtgttacaagaatttcccccacaacatcctttatgactgaagttcaatgacagtttgtgtttggtggtaaaggattttctccatggcctgaattaagaccattagaaagcaccaggccgtgggagcagtgaccatctactgactgttcttgtggatcttgtgtccagggacatggggtgacatgcctcgtatgtgttagagggtggaatggatgtgtttggcgctgcatgggatctggtgcccctcttctcctggattcacatccccacccagggcccgcttttactaagtgttctgccctagattggttcaaggaggtcatccaactgactttatcaagtggaattgggatatatttgatatacttctgcctaacaacatggaaaagggttttcttttccctgcaagctacatcctactgctttgaacttccaagtatgtctagtcaccttttaaaatgtaaacattttcagaaaaatgaggattgccttccttgtatgcgctttttaccttgactacctgaattgcaagggatttttatatattcatatgttacaaagtcagcaactctcctgttggttcattattgaatgtgctgtaaattaagtcgtttgcaattaaaacaaggtttgcccacat

SEQ ID NO: 186861 - DNA, 907 bp, Homo Sapiens
ttggagaagctgcactggggccgggactcggaggcgcgctgcgtgagccggccgcagagccatggcgggcggggaagaccgcggggacggagagccggtatcagtggtgaccgtgagggtgcagtacctggaagacaccgaccccttcgcatgtgccaactttccggagccgcgccgggcccccacctgcagcctggacggggcgctgcccttgggcgcgcagatacccgcggtgcaccgcctgctgggagcgccgctcaagttggaggattgtgctctgcaagtgtctccctccggatactacctggacaccgagctgtccctggaagagcagcgggagatgctggagggcttctatgaagagatcagcaaagggcggaagcccacgctgatccttcggacccagctctctgtgagggtcaacgctatcttggaaaagctgtatagctccagtggtcctgagctccgccgctccctcttctcactgaagcagatcttccaggaggacaaagacctggtgcctgaatttgtgcattcagaggggctgagctgcctgatccgtgtgggtgctgctgccgaccacaactaccagagctacatccttagagcgctcggccagctgatgctctttgtggatggaatgctgggggtggtggcccacagtgacactattcagtggctgtacacattgtgtgccagcctgtcccgcttggtggtgaagacagccctgaagctgctgttggtgtttgtagaatactccgaaaacaacgcaccgctgttcatccgtgcagtgaactctgtggccagcaccaccggtgctcctccctgggccaatctggtgtccatcctggaggagaaaaatggcgctgaccctgagttgttggtgtacacggtcacccctcatcaa

SEQ ID NO: 186862 - DNA, 1178 bp, Homo Sapiens
cttaaaaaagccaactttgtacaaaaaagttggctaggtgataccattactgagacagatttaagaaatcatttctaccagttcggagagatccggacgatcactgttgtgcagagacagcagtgtgctttcatccagtttgccacacggcaggctgcagaagtggctgctgagaagtcctttaataagttgattgtaaatggccgcagactgaatgtgaaatggggaagatcccaggcagccagaggaaaagaaaaagagaaagatggaactacagactctgggatcaaactagaacctgttccaggattgccaggagctcttcctcctcctcctgcagcagaagaagaagcctctgccaactacttcaacttgcccccaagtggtcctccagctgtggtgaacattgctctgccaccgccccctggcattgctccacccccacccccaggttttgggccacacatgttccacccaatgggaccaccccctcctttcatgcgggctccaggaccaatccactatccttctcaggaccctcagaggatgggagctcatgctggaaaacacagcagcccctagcaccttgtcaccactctggggctctgtggaagaaagggcacttaaaactcccagtaaatcttggaataaatatatttttccttcccttgtagtttccatggtagctgaatgtgctcagatgtgagcagtcagagactgacagccatgctttcctatacttgttcaaaggatcgatggaccgtaaataagctgccattaacacatctggttactgctgtaacatgactaataaaaccgaacgcctgttccccttacccgtgtgggggacacgcagatgagtgaattggaatgtccagcagagttaccctcccaattatatgttcattttgtatattttttggtcgggggaaaaattgacctgcagtaaaaaaacctttgaccatttttatgtccattggatactttcctttttatcatcttaaaaaaagataactagtactaatcattgtagtggcctaagtgtgatttaactcttgaagtcacaccctccgaaagatgagtagaaaccagcaccagcacagcccagatcttctctttcctctccttttcctcatttattcctaaaggaatctgaccattttacgtctctacggccc

SEQ ID NO: 186863 - DNA, 1113 bp, Homo Sapiens
ttgggtcattatcaccagaaaagataaaattgaaactcaaatcagttagcttcaaacaaaaacgaaagttagaccaagggaacgtattagatatggaagtaaagaaaaagaaacatgataaacaagaacagaaaggaagtgtgggagctacattcaaattaggtgactctttgtcaaacccaaacgaaagagccattgttaaagaaaagatggtatcaaatactaagtctgtagacacgaaagcgagttcatctaaatttagtagaattctaactcctaaggagtatttacaaaggcagaagcataaagaagctctgagtaataaagcatcgaagaaaatctgtgtgaaaaacgtgccatgtgattctgaacatatgagaccaagtaaacttgccgtgcaggttgaaagttgtgggaaatcaaatgagaaacacagcagcggcgtgcagacctctaaagaatcattaaatggcttgacaagccatggtaaaaacctcaaaatccaccattctcaggagtctaaaacatacaacattctaaggaatgttaaagaaaaagttggtgggaagcagcctgataaaatatggattgataagactaaattagacaaattaaccaatataagcaacgaagctcaattcagccaaatgcctccccaagtaaaggatcaaaagaaattatatctgaatagagttgggtttaaatgcactgaacgtgaaagcatttctctcaccaaattagaaagttcacccaggaagcttcataaagataagagacaggaaaataaacataagacctttttaccggtgaaaggtaacacagaaaaatcaaacatgctggagtttaaattatgtccagatatcttactaaagaatacaaactctgtggaagaacggaaggatgtaaagcctcatcctaggaaggagcaagcccctctgcaagtttcaggaataaaaagtacaaaagaagactggttaaaatttgttgctacaaagaaaaggacacagaaagacagccaagagagagataatgttaattcaagactctcgaagagaagcttcagtgcagatggatttgagatgctacaaaactcagtaaaagattcaaaagaaa

SEQ ID NO: 186864 - DNA, 962 bp, Homo Sapiens
ttggcctgtcattgcgtctaatttcaaatatacagaatctccttaagagctgttgccttatttttttgtaaagcctctctgacatcaaatggggagaaatggtggcacctccagacaccctgaaactacacaccatttcttccctgctcagcttctgctcaggagttctgtgagctatgggaaggccattggttgtatttgctacttttactttcatcttcctctgctgtagagccatttaatgttattgtcatatgctgctggtgaggtaaaggtgggtccgggtgccttcccaggggttagaggatgttcaaagggccgatttcagcaggagttcagagggcttatgatggatggtgagagatttgacaaccaccagagcacatgtgctctgaccctctcctgggcattggttcctgctggtaccgggcggttcagaccttcaaataggttgctttcaaaagagctttcaggcacttattgagaattaatgtttaaacagacataatagcctagatgaactcccaagagatctattaaatcttgtgggctgaataaatatctcgtgcaggactgtgcaacagtagcccagagcatcctgcctgtgggcatccacctcccaggtgagggcagtgggaagctggcccgacggcagccagaacttgtttctcacctcccaccagcaaccccccacccaactctgggccccaggcacacgaagcacaagtctcatgggaccattcccacattgggggatcctgagggagcccatcaccgcctcttgcatacaaactgtccactaggaggcacgcccagtgtgggagagatgtatgggtcttgccttccatctgtaaaaactgcacatatgcaagccatttgcactctggaactgcatgccgtgaaaactcctaatggtgtggaacttagtttgaatttgaaatcacgccgcatgcacaaaggga

SEQ ID NO: 186865 - DNA, 1860 bp, Homo Sapiens
  misc_feature (1218)..(1273): n is a, c, g, or t
  misc_feature (1569)..(1630): n is a, c, g, or t
ttggcagaaaatagagagagctctgtggtccaagcaggaggttccaaaaagcactcaaaccatctcagaaaattggtgtttgatgatttttgtgattcttcaaatgtttctaataaagattcttcagaagatgatataagtagaagtgaaaatgaaaagaaatcagaatgtttttcttccccaaagacaggattttgggactgttgttccacaagctatgcccaaaacttagattttgaaagttcagaggggaacacgatagcaaattctgttggagaaatatcttcaaaattgagtgagaaatcaggcttatgtttatccaaaaggttgaattctattcgctcttttgaaatgaaccggacaagaacatccagtgaagcatcgatggatgctgcttaccttgacaaaatctctgagttggattcaatgatgtcagagtcagacaacagcaagagcccttgtaataacggttttaagtcactggatttggatgggttatcaaagtcatctcaaggcagtgaatttcttgaggaacctgataagttggaagaaaaaactgagctaaacctttccaaaggttctctaactaatgatcagttagaaaatggaagtgaatggaaacccacttctttttttctcctctctccatctgaccaagaaatgaatgaagatttttcactccattccagttcttgtccagtaactaatgaaatcaaacccccaagctgcttgtttcagacagagttttcccagggcattttgttaagcagttcacatcgactatttgaagatcaaagatttgggtcatctttgtttaagatgtcctcagagatgcacagtcttcataaccaccttcagtctccttggtctacttcctttgtgcctgaaaagaggaataaaaatgtgaatcaatcaacaaaaagaaaaatccagagcagcctttccagtgccagcccatcaaaagcaactaaaagttgactcattagaaaggtgtcatttgtggttttgtcctgagagaaatagaaaagttgttaaagttaccttttttcctcataaaagttctatacaaattggaattgataatctttagtcaagtatcaagtcaggatggtggattaacctgtacccagaatacttattgttcattttgaaaagactttgttcttttcatttttatttgggagtctttgtgaccagagaagttagggaggaggttannnnnnnnnnnnnnnnnnnnnnnnnnnnnnnnnnnnnnnnnnnnnnnnnnnnnnnnactgaatttgatatgtatctcggttggatatacattgtttttttaaaaaatgttatttaactgttagatacagtggcctgttgataagccccacttgtcttcagaacttggatttcttaaataaaacttttagtgttgtctatacactgctcaataagacacttgagtttaagcttttcccagggtggaaattattttacctgtccctttttatttatgtttagtgatggcctagtttttctgcagggccatgatggagaaatagcactctagccttagtccaatattgatttacnnnnnnnnnnnnnnnnnnnnnnnnnnnnnnnnnnnnnnnnnnnnnnnnnnnnnnnnnnnnnngtgaaaatgttctgctagtatgaaagaaaacattttctatatgaagacatttgttttatgttaggtagcttacattttctcctctgcgtgtgtgtgtatgtgtgtaaaatcagaaatttagcatactatggaaagaaggcatggagcacttgggtttagaggtacctaaaaacatcatagcttcattgtccagatgtaacaggtttgaaagagctcatcgccaagttctt

SEQ ID NO: 186866 - DNA, 1653 bp, Homo Sapiens
  misc_feature (1063)..(1071): n is a, c, g, or t
ttggcggcgcccgcgctcgcaggccactctctgctgtcgcccgtcccgcgcgctcctccgacccgctccgctccgctcctactcagcgccatcgccttcgacatcatcgcgctggccggccgcggctggttgcagtctagcgaccacggccagacgtcctcgctgtggtggaaatgctcccaagagggcggcggcagcgggtcctacgaggagggctgtcagagcctcatggagtacgcgtggggtagagcagcggctgccatgctcttctgtggcttcatcatcctggtgatctgtttcatcctctccttcttcgccctctgtggaccccagatgcttgtcttcctgagagtgattggaggtctccttgccttggctgctgtgttccagatcatctccctggtaatttaccccgtgaagtacacccagaccttcacccttcatgccaaccgtgctgtcacttacatctataactgggcctacggctttgggtgggcagccacgattatcctgatcggctgtgccttcttcttctgctgcctccccaactacgaagatgaccttctgggcaatgccaagcccaggtacttctacacatctgcctaacttgggaatgaatgtgggagaaaatcgctgctgctgagatggactccagaagaagaaactgtttctccaggcgactttgaacccattttttggcagtgttcatattattaaactagtcaaaaatgctaaaataattttggagaaaatattttttaagtagtgttatagtttcatgtttatcttttattatgttttgtgaagttgtgtcttttcactaattacctatactatgccaatatttccttatatctatccataacatttatactacatttgtaagagaatatgcatgtgaaacttaacactttataaggtaaaaatgaggtttccaagatttaataatctgatcaagttcttgttatttccaaatagaatggacttggtctgttaagggctaaggagaagaggaagataaggttaaaagttgttaatgaccaaacattctaaaagaaatgcnnnnnnnnngtttattttcaagccttcgaactatttaaggaaagcaaaatcatttcctaaatgcatatcatttgtgagaatttctcattaatatcctgaatcattcatttcagctaaggcttcatgttgactcgatatgtcatctaggaaagtactatttcatggtccaaacctgttgccatagttggtaaggctttcctttaagtgtgaaatatttagatgaaattttctcttttaaagttctttatagggttagggtgtgggaaaatgctatattaataaatctgtagtgttttgtgtttatatgttcagaaccagagtagactggattgaaagatggactgggtctaatttatcatgactgatagatctggttaagttgtgtagtaaagcattatgggtcattcctgtcacaaaagtgccactaaaacagcctcacgagaataaatgacttgcttttctaaatctcacgtttatctgggctctatcatatagacaggcttctgatagtttgcaactgtaagcagaaacctacatatagttaaatcctggtctttcttggtaaacagattttaaatgtctgatataaaa

SEQ ID NO: 186867 - DNA, 1606 bp, Homo Sapiens
  misc_feature (1003)..(1011): n is a, c, g, or t
tttgtacaaaaaagttggctactcagcgccatcgccttcgacatcatcgcgctggccggccgcggctggttgcagtctagcgaccacggccagacgtcctcgctgtggtggaaatgctcccaagagggcggcggcagcaggtcctacgaggagggctgtcagagcctcatggagtacgcgtggggtagagcagcggctgccatgctcttctgtggcttcatcatcctggtgatctgtttcatcctctccttcttcgccctctgtggaccccagatgcttgtcttcctgagagtgattggaggtctccttgccttggctgctgtgttccagatcatctccctggtaatttaccccgtgaagtacacccagaccttcacccttcatgccaaccctgctgtcacttacatctataactgggcctacggctttgggtgggcagccacgattatcctgattggctgtgccttcttcttctgctgcctccccaactacgaagatgaccttctgggcaatgccaagcccaggtacttctacacatctgcctaacttgggaatgaatgtgggagaaaatcgctgctgctgagatggactccagaagaagaaactgtttctccaggcgactttgaacccattttttggcagtgttcatattattaaactagtcaaaaatgctaaaataatttgggagaaaatattttttaagtagtgttatagtttcatgtttatcttttattatgttttgtgaagttgtgtcttttcactaattacctatactattccaatatttccttatatctatccataacatttatactacatttgtaagagaatatgcacgtgaaacttaacactttataaggtaaaaatgaggtttccaagatttaataatctgatcaagttcttgttatttccaaatagaatggactcggtctgttaagggctaaggagaagaggaagataaggttaaaaattgttaatgaccaaacattctaaaagaaatgcnnnnnnnnngtttattttcaagccttcgaactatttaaggaaagcaaaatcatttcctaaatgcatatcatttgtgagaatttctcattaatatcctgaatcattcattttagctaaggcttcatgttgactcgatatgtcatctaggaaagtactatttcatggtccaaacctgttgccatagttggtaaggctttcctttaagtgtgaaatatttagatgaaattttctcttttaaagttctttatagggttagggtgtgggaaaatgctatattaataaatctgtagtgttttgtgtttatatgttcagaaccagagtagactggattgaaagatggactgggtctaatttatcatgactgatagatctggttaagttgtgtagtaaagcattagagggtcattcttgtcacaaaagtgccactaaaacagcctcaggagaataaatgacttgcttttctaaatctcagtttatctgggctctatcatatagacaggcttctgatagtttgcaactgtaagcagaacctacatatagttaaaatcctggttctttcttggtaaacagattttaaatgtctgatataaaacatgccacagga

SEQ ID NO: 186868 - DNA, 1802 bp, Homo Sapiens
  misc_feature (1140)..(1148): n is a, c, g, or t
ttgggcgcccgcgctcgcaggccactctctgctgtcgcccgtcccgcgcgctcctccgacccgctccgctccgctccgctcggccccgcgccgcccgtcaacatgatccgctgcggcctggcctgcgagcgctgccgctggatcctgcccctgctcctactcagcgccatcgccttcgacatcatcgcgctggccggccgcggctggttgcagtctagcgaccacggccagacgtcctcgctgtggtggaaatgctcccaagagggcggcggcagcgggtcctacgaggagggctgtcagagcctcatggagtacgcgtggggtagagcagcggctgccatgctcttctgtggcttcatcatcctggtgatctgtttcatcctctccttcttcgccctctgtggaccccagatgcttgtcttcctgagagtgattggaggtctccttgccttggctgctgtgttccagatcatctccctggtaatttaccccgtgaagtacacccagaccttcacccttcatgccaaccgtgctgtcacttacatctataactgggcctacggctttgggtgggcagccacgattatcctgatcggctgtgccttcttcttctgctgcctccccaactacgaagatgaccttctgggcaatgccaagcccaggtacttctacacatctgcctaacttgggaatgaatgtgggagaaaatcgctgctgctgagatggactccagaagaagaaactgtttctccaggcgactttgaacccattttttggcagtgttcatattattaaactagtcaaaaatgctaaaataatttgggaaaaatattttttaagtagtgttatagtttcatgtttatcttttattatgttttgtgaagttgtgtcttttcactaattacctatactatgcccatatttccttatatctatccataacatttatactacatttgtaagagaatatgcatgtgaaacttaacactttataaggtaaaaatgaggtttccaagatttaataatctgatcaagttcttgttatttccaaatagaatggacttggtctgttaagggctaaggagaagaggaagataaggttaaaagttgttaatgaccaaacattctaaaagaaatgcnnnnnnnnngtttattttcaagccttcgaactatttaaggaaagcaaaatcatttcctaaatgcatatcatttgtgagaatttctcattaatatcctgaatcattcatttcagctaaggcttcatgttgactcgatatgtcatctaggaaagtactatttcatggtccaaacctgttgccatagttggtaaggctttcttttaagtgtgaaatatttagatgaaattttctcttttaaagttctttatagggttagggtgtgggaaaatgctatattaataaatctgtagtgttttgtgtttatatgttcagaaccagagtagactggattgaaagatggactgggtctaatttatcatgactgatagatctggttaagttgtgtagtaaagcattagggtcattcctgtcacaaaagtgccactaaaacagcctcaggagaataaatgacttgcttttctaatctcaggtttatctgggctctatcatatagacaggcttctgatagtttgcaactgtaagcagaaacctacatatagttaaaatcctgggtctttcttggtaacagattttaaatgtctgattataaaacatgccacaggaaatccggggatttgagtttctctgaatagcatatatatgatgcatcggataagtcattat

SEQ ID NO: 186869 - DNA, 1254 bp, Homo Sapiens
  misc_feature (1157)..(1166): n is a, c, g, or t
tgtacaaaaaagttggcttggagaacctcaccaatggcccccgatcccgaggtccctgatggcctaccccctgtggcctacaacccctggatggacatcaggcaacgggaagacgtccaagccttaaacatcagtgtgccgtatggtccaattcctgtggactttcagcggaaaatccgccagagctactttgcctctgtgtcatatttggatacacaggtcggccgcctcttgagtgctttggacgatcttcagctggccaacagcaccatcattgcatttacctcggatcatgggtgggctctaggtgaacatggagaatgggctttatacagcaattttgatgttgctacccatgttcccctgatattctatgttcctggaaggacggcttcacttccggaggcaggcgagaagcttttcccttacctcgacccttttgattccgcctcacagttgatggagccaggcaggcaatccatggaccttgtggaacttgtgtctctttttcccacgctggctggacttgcaggactgcaggttccacctcgctgccccgttccttcatttcacgttgagctgtgcagagaaggcaagaaccttctgaagcattttcgattccgtgacttggaagaggatccgtacctccctggtaatccccgtgaactgattgcctatagccagtatccccggccttcagacatccctcagtggaattctgacaagccgagtttaaaagatataaagatcatgggctattccatacgcaccatagactataggtatactgtgtgggttggcttcaatcctgatgaatttctagctaacttttctgacatccatgcaggggaactgtattttgtggattctgacccattgcaggatcacaatatgtataatgattcccaaggtggagatcttttccagttgttgatgccttgagttttgccaaccatggatggcaaatgtgatgtgctcccttccagctggtgagaggaggagttagagctggtcgttttgtgattacccataatattggaagcagcctgagggctagttaatccaaacatgcatcaacaatttggcctgagaatatgtaacagccaaaccttttcgtttagtctttattaaaatttataattggtaattggaccagnnnnnnnnnnaatttccctctttttaaaacagttacggcttatttactgaataaatacaaagcaaacaaactcaagttatgtcatacctttgggatac

SEQ ID NO: 186870 - DNA, 935 bp, Homo Sapiens
tgggacagctttgggattgtacaggaagatcctagaggtcccaaggtagctgacttgcgaagctgaggctccagccgagggctccaggcctctgaccggcccagcagtgagcgcggctgcccgacgcttcagggccgggagcagggagcgtgagtcgccatggcgacgccggcgggtctggagcgctgggttcaggacgagctgcactcggtgttggggctgagcgagcggcacgtcgcccagtttctgatcggtaccgcacagcgctgcacctctgccgaggagttcgtgcagcgcctacgagacactgataccttggatctcagtgggccggcccgggacttcgccctgagactctggaacaaggtaccacgaaaggcagtggtagaaaagccagctcgggcagcagagcgagaggcccgggccctgctggagaagaaccgatcttataggttactggaagacagtgaagagagcagtgaggagactgtgagtagggctggaagcagcctccagaagaaacgtaaaaagcggaaacacctcaggaagaagcgtgaggaagaagaggaggaagaggcttctgagaaagggaagaagaaaacaggggggagtaaacagcagacagagaagccagagtcggaagatgagtgggaacggacagagcgtgaacgccttcaggacctggaggagcgtgatgcctttgctgagcgggttcgacagcgggacaaggatcggactcgaaatgtcctggaacggtcagacaagaaggcttatgaagaggctcagaagcgcctcaagatggccgaggaagaccggaaggccatggtccctgagctgcggaagaaatctcgccgagagtacctggctaagcgggagcgagagaagcttgaggacctggaggcggagctggctgatgaggagttcctttttgggga

SEQ ID NO: 186871 - DNA, 1001 bp, Homo Sapiens
  misc_feature (852)..(909): n is a, c, g, or t
tgttgtgtgaagttggctaacagtaccgacgcggaggacatggagctggcctctggtctggtacagcacccggttggccctcagtgtgagatagtagcccctctgggagaagttggcaggagcagggatgtcctggtttgtccgtggggccgtgaagctctgggtggcgttgctgagggccaccaccagccagatggtatccaagtcagagatgttgtggctgctgaactggcctagaggctgctccagcgtgaaggtggacagggtgagcctccccgccaaggtgtcgtttgagagctggggcacatagctgatgtgctctggggcagccacgtctgtcccaggctggacacgggtcagtagcagcaacagcgacactagcagctgggactgtcccgcagagagccctatggccgggccaagcctccagctgttgtccatctgtctgtccgtccgtctgcagtgtctgcagccccagaggctcccctgtctgtagtctgtgctgtgctaggggaagctgttcctggcatctcctgctgcccctcccagctaccccctcctctcaaacaactggttggacaggtttgggggcagaatctgccagcccagtgaatctggcatcgccagggaggggtctgaagagaacatacagttgcaagacaagcctggactaccccccccacccaccaggagcgcctgaccagggaggggctgaggaaggaggcggggcagcctcaggatccaggctgccccagggacaatcccgccaagtctaccccgtggatctccttgtccaaacagtccccaatgtagcgactcttcctttaggacctgaggtgggaggatcactcnnnnnnnnnnnnnnnnnnnnnnnnnnnnnnnnnnnnnnnnnnnnnnnnnnnnnnnnnnatgacagagtgggaccctcagttccccgaggggattcagatgttcacctcaactcacaagaaaaacttctggccgggcgcagtggttcacac

SEQ ID NO: 186872 - DNA, 1614 bp, Homo Sapiens
  misc_feature (872)..(893): n is a, c, g, or t
  misc_feature (1064)..(1076): n is a, c, g, or t
ttgggtcaaaatgtgcctccagagtgataaagctctgtatatgttagattccagctaaacctaacttggctgtcatttttcttccattatagtgtgagtggagactgccccccctccccaacatattccttcccatatctctcatgattgtccctctgtaatttcaaaatgaatgaaattcatgtgaatgtaggttgagagggcactgaagacctgaatctacactagtaatctcaagaaagattattcattctatctcagagttaccggcaagcatataaaatgctacttggataatatctacatgaatattgcatgctacatggttgataacactatttccattattgggcagaatctcagtgtttactttcaattcctaggatatgtgatcgtgaatcagatcacatataaaaagtctggattgtcagtagtattagatctgatcaaggtaggaattacaattgcatgcaggtagcaagcaagaaagcagaaacatgccgccagttctcaagttttcctcctaactccatttgaatgtaagggcagctggcccccaatgtggggaggtccgaacattttctgaattcccattttcttgttcgcggctaaatgacagtttctgtcattacttagattccgatctttcccaaaggtgttgatttacaaagaggccagctaatagcagaaatcatgaccctgaaagagagatgaaattcaagctgtgagccaggcaggagctcagtatggcaaaggttcttgagaatcagccatttggtacaaaaaagatttttaaagcttttatgttataccatggagccatagaaaggctatggattgtttaagaactattttaaagtgttccagacccnnnnnnnnnnnnnnnnnnnnnnggaatatttgtacccaacagctagaaggattgcaaggtagatttttgttttaaaatggagagaagtggacagataaggccatttaatatatcaaagatcagttgacatctcctagggaatgatgaaaacagcaggctattagaaaattatttcatatagttctcgtgttcnnnnnnnnnnnnnaatccctgaagggatgatcagtaacatagcttctcttttctgtactctagaccaccccttttcatcattttgctttttatgtctcccataagaaatgtgctttttagagcttcctaatgcatgtgttgcattattgcagcattagaaaaggagaggtagcatttttgctgaaatcgggcctgtcactctccaataaaggttctggcacttcaatgccaggcaggtctcctaaatgaacagaatgatctgtgtgagccgatgcctgcccttccagaggggccactgtccccagtcgcagccaactgtgtcccacaggaatgggagcctaggtttccaatcttgtgattctttaggagaaacatgaaacctggatttcgtgtgaaatgtcccgattgttaaaaagttggctcaattatttttaaaacattttgtaagccaacaaaagtctgtgggctgccagtttattacttttgtcttaaaacatgatcattgttctctcacggtatccttctgtcttcccgttgcaaattcacttttt

SEQ ID NO: 186873 - DNA, 2615 bp, Homo Sapiens
  misc_feature (57)..(78): n is a, c, g, or t
actttgtacaaaaaagttggattgtttaagacactattttaaagtgttccagacccnnnnnnnnnnnnnnnnnnnnnnggaatatttgtacccaacagctagaaggattgcaaggtagatttttgttttaaaatggagagaagtggacagataaggccatttaatatatcaaagatcagttgacatctcctagggaatgatgaaaacagcaggctattagaaaattatttcatatagttctcgtgttcttttctcttttttaatccctgaagggatgatcagtaacatagcttctcttttctgtactctagaccaccccttttcatcattttgctttttatgtctcccataagaaatgtgctttttagagcttcctaatgcatgtgttgcattattgcagcattagaaaaggagaggtagcatttttgctgaaatcgggcctgtcactctccaataaaggttctggcacttcaatgccaggcaggtctcctaaatgaacagaatgatctgtgtgagccgatgcctgcccttccagaggggccactgtccccagccgcagccaactgtgtcccacaggaatgggagcctaggtttccaaatcttgtgattctttaggagaaacatgaaacctggatttcgtgtgaaatgtcccgattgttaaaaagttggctcaattatttttaaaacattttgtaagccaacaaaagtctgtgggctgccagtttattacttttgtcttaaaacatgatcattgttctctcacggtatccttctgtcttcccgttgcaaattcacttttctttcttcctgacattgccattgagggctttgttaccacaagctaagaaactgagtttaacagcccagttatctgcaacatgtcaattacctttgctcctctcctgtgattcccaccatgctgtgaccctcagctgtctccctttgctgggaattctgcaccaatgtctcccctcaacccattccctggttggtcctactcccgtgtggccagagacatcctagcaaatccttcctcctattatatctgacactaatttcttttcaacagcgctcatgtctcttggcccagtcaggtgctgccaggtttagataggaaagtacatgtcccattttcatgggtgcccttaatgtggtccacgtcctatatcttattatatttactcatggctcaatgggggcctccagagaccctctcaggctgctgagctagactaaggaatgcatccactgtcatcacatgagacactgactctgtgacgacaaaagtacaaacagtctgaggctaagaaaggttcatctcacaacaggaaaaacaaatctcaacacacattagagataattgattcaggggttttctctcccagtctcccagcagggactgatttcatttctgacccactaggttttctttccagaaataggtagcaaggacaagaactaaacaatcccagccccacccagcaacacagaacacaggagtttgcttttggcttctcactctccaagtaaccctgaattaggcccagaatggctgaggcttggagcatctcctcagacagagcagaggcgacacctcttcaggggtgtgtggagtaaatagctcgaagagctgaagacagaaaaccagtttcacgccaggtgcgagagagagcataatggagggaagcccgctttctctctcctcttcttttctctttatttctttagagcacttgacttttttttctctctctctctagtattctaaactgaccccatgaccaactgagaatttatttttgtttcattggttgtttcacagaattagaacacacacgactttttattcctccattgcaaaatggaatcaagatactacacaagacctgtgctttcttcctttgcatgatttacacctccgcctgttttggtgctagctgtctagaacttctctcttggtttgaatctgattccttcacactacactagaagtttatttcatcttgttttgtctagactccagatacagagggacagctggactgaggacaagcaattccatctagcatagggtctctcagggttggtgcatccagccacatgggcagggccagtcacatctagtctatgtccccagagcccttggagttgcgcagcttagctgacttgactccaaggaaattagtacagaagtaaccactctattaagtgtgttctgctatgttcacatgcctgtagtacctgcaaaccatgccaggttcatctaaagacataggggaagattaaggactcttttggacagaccatgaattgaatttgctgccaggtgctgccagactgaatttggctgacagaactcccagcccaggaaagttccatgacaatgactgtcgcagaaggaaatttcccactaaagtcagtccattttcaagttttggtcttcagagacaaaagaacgtcccagccacctgattttgatggtgaggtaactctaagttgaattcacgctagtgttgcagtatagcgttggcatgttcatgagtgagcacccagaatgtgttgaaccaacccccacccctaactactgactatgactgcagtgggtttttatgggg

SEQ ID NO: 186874 - DNA, 1585 bp, Homo Sapiens
tggaacaacttgaccttagaatacttagccgatgaaatggggcttggaaagaccatacagaccattgcactcatcacttatctgatggagcacaaaagactcaatggcccctatctcatcattgttcccctttcgactctatctaactggacatatgaatttgacaaatgggctccttctgtggtgaagatttcttacaagggtactcctgccatgcgtcgctcccttgtcccccagctacggagtggcaaattcaatgtcctcttgactacttatgagtatattataaaagacaagcacattcttgcaaagattttgtggaaatacatgatagtggacgaaggccaccgaatgaagaatcaccactgcaagctgactcaggtcttgaacactcactatgtggcccccagaaggatcctcttgactgggaccccgctgcagaataagctccctgaactctgggccctcctcaacttcctcctcccaacaatttttaagagctgcagcacatttgaacaatggttcaatgctccatttgccatgactggtgaaagggtggacttaaatgaagaagaaactatattgatcatcaggcgtctacataaggtgttaagaccatttttactaaggagactgaagaaagaagttgaatcccagcttcccgaaaaagtggaatatgtgatcaagtgtgacatgtcagctctgcagaagattctgtatcgccatatgcaagccaaggggatcctttctcacagatggttctgagaaagataagaaggggaaaggaggtgctaagacacttatgaacactattatgcagttgagaaaaatctgcaaccccccatatatgtttcagcacattgaggaatcctttgctgaacacctaggctattcaaatggggtcatcaatggggctgaactgtatcgggcctcagggaagtttgagctgcttgatcgtattctgccaaaattgagagcgactaatcaccgagtgctgcttttctgccagatgacatctctcatgaccatcatggaggattattttgcttttcggaacttcctttacctacgccttgatggcaccaccaagtctgaagatcgtgctgctttgctgaagaaattcaatgaacctggatcccagtatttcattttcttgctgagcacaagagctggtggcctgggcttaaatcttcaggcagctgatacagtggtcatctttgacagcgactggaattctcatcaggatctgcaggcccaagaccgagctcaccgcatcgggcagcagaacgaggtccgggtactgaggctctgtactgtgaacagcgtggaggaaaagatcctcgcggccgcaaaatacaagctgaacgtggatcattaaggatgacgctgaagtagaaaggctcacctgtgaagaagaggaggagaaaatatttgggagggggtctcgctagcgccgtgacgtggactacagtgacgctctcacggagaagcagtggctaagggccatcgaagacggcaatttggaggaaatggaagaggaagtacggcttaagaagcgaaaagacgaagaaatgtggataaagat

SEQ ID NO: 186875 - DNA, 2207 bp, Homo Sapiens
ttggataagaaggggaaaggaggtgctaagacacttatgaacactattatgcagttgagaaaaatctgcaaccacccatatatgtttcagcacattgaggaatcctttgctgaacacctaggctattcaaatggggtcatcaatggggctgaactgtatcgggcctcagggaagtttgagctgcttgatcgtattctgccaaaattgagagcgactaatcaccgagtgctgcttttctgccagatgacatctctcatgaccatcatggaggattattttgcttttcggaacttcctttacctacgccttgatggcaccaccaagtctgaagatcgtgctgctttgctgaagaaattcaatgaacctggatcccagtatttcattttcttgctgagcacaagagctggtggcctgggcttaaatcttcaggcagctgatacagtggtcatctttgacagcgactggaatcctcatcaggatctgcaggcccaagaccgagctcaccgcatcgggcagcagaacgaggtccgggtactgaggctctgtaccgtgaacagcgtggaggaaaagatcctcgcggccgcaaaatacaagctgaacgtggatcagaaagtgatccaggcgggcatgtttgaccaaaagtcttcaagccacgagcggagggcattcctgcaggccatcttggagcatgaggaggaaaatgaggaagaagatgaagtaccggacgatgagactctgaaccaaatgattgctcgacgagaagaagaatttgacctttttatgcggatggcatggaccggcggagggaagatgcccggaacccgaaacggaagccccgtttaatggaggaggatgagctgccctcctggatcattaaggatgacgctgaagtagaaaggctcacctgtgaagaagaggaggagaaaatatttgggagggggtcccgccagcgccgtgacgtggactacagtgacgccctcacggagaagcagtggctaagggccatcgaagacggcaatttggaggaaatggaagaggaagtacggcttaagaagcgaaaaagacgaagaaatgtggataaagatcctgcaaaagaagatgtggaaaaagctaagaagagaagaggccgccctcccgctgagaaactgtcaccaaatccccccaaactgacaaagcagatgaacgctatcatcgatactgtgataaactacaaagatagttcagggcgacagctcagtgaagtcttcattcagttaccttcaaggaaagaattaccagaatactatgaattaattaggaagccagtggatttcaaaaaaataaaggaaaggattcgtaatcataagtaccggagcctaggcgacctggagaaggatgtcatgcttctctgtcacaacgctcagacgttcaacctggagggatcccagatctatgaagactccatcgtcttacagtcagtgtttaagagtgcccggcagaaaattgccaaagaggaagagagtgaggatgaaagcaatgaagaggaggaagaggaagatgaagaagagtcagagtccgaggcaaaatcagtcaaggtgaaaattaagctcaataaaaaagatgacaaaggccgggacaaagggaaaggcaagaaaaggccaaatcgaggaaaagccaaacctgtagtgagcgattttgacagcgatgaggagcaggatgaacgtgaacagtcagaaggaagtgggacggatgatgagtgatcagtatggacctttttccttggtagaactgaattccttcctcccctgtctcatttctacccagtgagttcatttgtcatataggcactgggttgtttctatatcatcatcgtctataaactagctttaggatagtgccagacaaacatatgatatcatggtgtaaaaaacacacacatacacaaatatttgtaacatattgtgaccaaatgggcctcaaagattcagattgaaacaaacaaaaagcttttgatggaaaatatgtgggtggatagtatatttctatgggtgggtctaatttggtaacggtttgattgtgcctggttttatcacctgttcagatgagaagatttttgtcttttgtagcactgataaccaggagaagccattaaaagccactggttattttatttttcatcaggcaaattttcgaggtttttatttgttcggtattgtttttttacactg

SEQ ID NO: 186876 - DNA, 1922 bp, Homo Sapiens
  misc_feature (705)..(757): n is a, c, g, or t
actttgtacaaaaaaagttggatctgatctctgctggatctacagacaccgatgcagaccactcgatttcatgaccggccctattgcactatggaagttaaagtgtcacgactgctctatgcatattggatttaggggaattttcattgttacataaatgtgtgaactagtttcaacagtgttctttcatatttactctgcaaatacaaaaaaccaaaacctgcagccagtggtcatttcaaaatctttttatgttcagatactgagccttcataagggttgactacctcagatttgctgcactcattgtggacttcatgtggatcacaacttctggataagaagattacaactattaagtgtcgatgtgaaccttgcaaccagctctactggattcttatcagaaatcctgcataaaaagtcagccatctgggttctgatctgctgtaaaagatgaagatttaagtgaccttaattaacctgtcctgtgccctacccttaaggaatactctctgtagtaggctgttgttatattaaacttcctggaacacaccgctgaaaagaactgatgtgttcagatcatctgtgtagggctgtgatttgtaatttaaactaattgtattctgaggtaaccacaaaataaattcaaccaaactggggtccaccaagtgggggaaggggaagggagagaataatcttgggggnnnnnnnnnnnnnnnnnnnnnnnnnnnnnnnnnnnnnnnnnnnnnnnnnnnnngttctgcattaaggccttttttgctttgacttgaaataagttctttgacagagcatattgcttggttaattaagtaacctaaagtatgcattaggattgtgaaatgtctcgtgagtatgccaatcctgagggtggaaccaaatagcctttgatgaaaagggcagtggattctggaggctctacttcaggtgctgctataatgcctcatctaatcaggactaaattgtgtaggaaactgcagtgggaagaatatgctttctgctcaggctaagagggtcactgatctgtccttagaaattcagagtaacatgagcaaaacctcagctaaaacccatttaagtggcatggattgtgcatgatctttgataagaattcctcatgtacttgtgcctagtttttcaaggtattggctgttctatagatgcagtgattgtcccagctagctctgttaccagccttttggtgtgtctttatgttcatttggagagtcagggcgaaagacaggtgatgtagcacttctgtttttaataattattgcttaaaatacctattaatagttttgggtcatttaaagggacttgaggaagctacccaggattacagaagagtgtccacctaacaagatggtctggcagtttcctagttttgtatctggttcaatagaaatatgtgaaagtggtaatgtcatcatttgatgcagagtccgggtttctctataataaatccctttgccaaatgcatgagttgcagacttgctactggcaagagtgaagcaagtgggtgagtaaaactattttgacgtgggagcgttttcagataggagtttagtcttgacgaaagtgtccgtgcaggaattggactccgaggagggttacagtatctcctgacgggacctgccactcgcatctgggcaatgttgacatttgaggtggcaggcaggatgcctgccttctaatatatttgggtgagtaactgagccagccaagggaaggttgaatgattaaatcagaaatgggattcttggtaaactgaagacttttatttgggaatgaaaaaccttaaaaaaatctcttcatcgttgaactgtgcattttccctgcattttttcccaacaaatttttgttgggggttatgttactgagaatgaacagatgagtaagtggag

SEQ ID NO: 186877 - DNA, 641 bp, Homo Sapiens
tgtacaaaaaagttggctccaggatcgttctgacaacgcgcctcttcctccggcacgcgccgctgctagccgagcactctcgccagaacctctggctcgcgcgtgccttttcccctcaggttgtggggagagcggaatcctgctccgccgtcgcagcagcagcggcagccccggcagcctcgggcgacagcggcggcgcgcgagcccccgggcggaccgtaccaccgctcgccagcacgcagggggagccgcccgtctcgccgcgcacgcctcggcgaccccgcggggctgaggcgtcgccgcgcccggcagcgtgagcgcagagccggtctcgaccccgagctcggagccccgcgggccgcgcccgccgccggccccacccatccgggtcgaggaggccgaggccatggctgagacggaggagcggagcctggacaacttctttgccaagagggacaagaagaagaagaaggagcggagcaaccgggcggcgagtgccgcgggcgcagcgggcagcgccggcggaagcagtggagccgcgggtgcggcgggcggcggggcgggcgcggggacccggccgggtgacggcgggaccgccagcgcgggggctgcgggcccagggtccgccaccaaggctgtga

SEQ ID NO: 186878 - DNA, 881 bp, Homo Sapiens
  misc_feature (623)..(635): n is a, c, g, or t
agtagtccaggtatattcctgatcaaaatttggcatttttgatgatactactctacacagatcaaactcatgtgcagaatcgtgcctggagagagaggtttggttaagacagagatttctggaaacattcaaattgcaaatggaaacttgaaacccacaatctaatgaggaatgtactggaaaaataatctgaagagttgacaaattgtgtactagattgaacacatggaatgcaatgcaatgagactttctgcactaaaacttatcctcatatgtacaacaatttttttgtgtattatataacagtgatgtgtacatttctgacaccccatacatactatacacagtttgtataaatgcatacatttaaaaatatatatgtacaatacagctaacataaaactgtagtacgcctgaaggatattactagtgcctaatattgagtatgagtcactgcgtgttcgcatcaacttggaagtgcagtaattgttataaaattaatcagtgcagccaacattatttatgaatcacatctttgaaactgtgcagtagcatatacatatatatttttaaataacatttttcacagttttccagagttactgttgaaatctgcatcaccnnnnnnnnnnnnngcaagatttttttaacaatgtagacactcttcagacccagtaatctgcgtgtgatttcctatttgtagattcccaagagactttagcagtcaccagccttaatgcatgtacaggatattattgtgacttaatttatctgcagtttttaatccatgtgaaattggaatttataaacggacttggattaaacatgtctgcctttctaaggttgcaaatgttacattaaatgatttatgttgtaaatga

SEQ ID NO: 186879 - DNA, 1679 bp, Homo Sapiens
ctttgtacaaaaaagttggctcctcgagcgctactgttgaaacctgtaaaactagaatttgatgtatctgatggcgccaccagcaaaagggcacccccaccaaggagactgcggagagaggtccgggctcaagcctcccttgaggaaagcagcagtgaggcagcaaaaggccccgcaggaggtggaggaggacgacggtaggagcggagcgggagaggacccccccatgccagcttctcggggctcttaccacctcgactgggacaaaatggatgacccaaacttcatcccgttcggaggtgacaccaagtctggttgcagtgaggcccagcccctttttagccctgagaccaggctgggccagccagcggctgaacagttgcatgctgggcctgccacggaggagccaggtccctgtctgagccagcagctgcattcagcctcagcggaggacacgcctgtggtgcagttggcagccgagaccccaacagcagagagcaaggagagagccttgaactctgccagcacctcgcttcccacaagctgtccaggcagtgagccagtgcccacccatcagcaggggcagcctgccttggagctgaaagaggagagcttcagagaccccgctgaggttctaggcacgggcgcggaggtggattacctggagcagtttggaacttcctcgtttaaggagtcggccttgaggaagcagtccttatacctcaagttcgaccccctcctgagggacagtcctggagaccagtgcccgtggccaccgagaccagcagcatgcacggtgcaaatgagactccctcaggacgtccgcgggaagccaagcttgtggagttcgatttcttgggagcactggacattcctgtgccaggcccacccccaggtgttcccgcgcctgggggcccacccctgtccaccggacctatagtggacctgctccagtacagccagaaggacctggatgcagtggtaaaggcgacacaggaggagaaccgggagctgaggagcaggtgtgaggagctccacgggaagaacctggaactggggaagatcatggacaggttcgaagaggttgtgtaccaggccatggaggaagttcagaagcagaaggaactttccaaagctgaaatccagaaagttctaaaagaaaaagaccaacttaccacagatctgaactccatggagaagtccttctccgacctcttcaagcgttttgagaaacagaaagaggtgatcgagggctaccgcaagaacgaagagtcactgaagaagtgcgtggaggattacctggcaaggatcacccaggagggccagaggtaccaagccctgaaggcccacgcggaggagaagctgcagctggcaaacgaggagatcgcccaggtccggagcaaggcccaggcggaagcgttggccctccaggccagcctgaggaaggagcagatgcgcatccagtcgctggagaagacagtggagcaaagactaaagagaacgaggagctgaccaggatctgcgacgacctcatctcctagatggagaagatctgacctccacggagccgctgtccccgcccccctgctcccgtctgtctgtcctgtctgattctcttgtgtcatgttcttttttctgtcttgtcttcaactttttttaaaactatattgctttgaaaa

SEQ ID NO: 186880 - DNA, 862 bp, Homo Sapiens
ttggcgccccggccgccgctttccccgggaagcgtcccccacggctcctcctggggccgccgccagaacctgtaccgcgccctgtcatgggacccggccctagaccgaccgccgggctgggccccctggatggtggccaggggcggctagagctgggccaagaccgacggcggagcgggcgccccgagaatgagtctgcaggtcttaaacgacaaaaatgtcagcaatgaaaaaaatacagaaaattgcgacttcctgttttcgccaccagaagttaccggaagatcgtctgttcttcgtgtgtcacagaaagaaaatgtgccacccaagaacctggccaaagctatgaaggtgacttttcagacacctctgcgggatccacagacgcacaggattctaagtcctagcatggccagcaaacttgaggctcctttcactcaggatgacacccttggactggaaaactcacacccggtctggacacagaaagagaaccaacagctcatcaaggaagtggatgccaaaactactcatggaattctacagaaaccagtggaggctgacaccgacctcctgggggatgcaagcccagcctttgggagtggcagctccagcaagtctggcccaggtgccctggctgacctggactgctcaagctcttcccagagcccaggaagttctgagaaccaaatggtgtctcctaggaaaagtgtctggcagccctgagcaagccgtggaggaaaaccttagttcctattccttagacagaagagtgacacccgcctctgagaccctagaagacccttgcaggacagagtcccagcacaaagcggagactccgcacggagctcgaggaagaatg

SEQ ID NO: 186881 - DNA, 1597 bp, Homo Sapiens
gggggtgggccctggcacaggaatgtccagtgctcccaagaaatcgaactccacaagcttggcttcccgcggacgtctgagagagtctcatttgcaccgtgcatgctgctggtctcggtggccacgggcactggtctaccaggactgtccctcaggagggggtcgaacttgaggtataaggactgcttcctcaaggccgactccttaaacgaggaagttccaaactgctccaggtaatccacctccgcgcccgtgcctagaacctcagcggggtctctgaagctctcctctttcagctccaaggcaggctgcccctgctgatgggtgggcactggctcactgcctggacagcttgtgggaagcgaggtgctggcagagttcaaggctctctccttgctctctgctgttggggtctcggctgccaactgcaccacaggcgtgtcctccgctgaggctgaatgcagctgctggctcagacagggacctggctcctccgtggcaggcccagcatgcaactgttcagccgctggctggcccagcctggtctcagggctttctgggggctgggcctcactgcaaccagacttggtgtcacctccgaacgggatgaagtttgggtcatccattttgtcccagtcgaggtggtaagagccccgagaagctggcatgggggggtcctctcccgctccgctcctaccgtcgtcctcctccacctcctgcggggccttttgctgcctcactgctgctttcctcaagggaggcttgagcccggacctctctcccagtctccttggtgggggtgcccttttgctggtggcgccatcagatacatcaaattctagttttacaggtccgctcctcgaggagctggccatttggcctgcagccacttcttcctgaggactcagggtcatggccctgccagccaccaggtggttggttggggctgtgctctcaggagcagaggtgtgtgcacaggtaagggtctgagtgccatctgctggcacgggggtgcccacacccgcagggcagcccagggcttcgccaggcagaccctgcaggggtgctcctccgcaggcttccttagggattgcaccaggaggcgaagtggccactgctgcgggagcacagaccccaccgtgccggcattcctcctcggctccgtgcggagtctccgctttgcattcttcctcggctccgtgcggagtctccgctttgtgctgggactctgtcctgcaagggtcttctagggtctcagaggcgggtgtcactcttctgtctaaggaataggaactaaggttttcctccacggcttgctcagggctgccagacacttttcctggagacaccatttggttctcagaacttcctgggctctgggaagagcttgagcagtccaggtcagccagggcacctgggccagactcgctggagctgccactcccaaaggctgggcttgcatcccccaggaggtcggtgtcagcctccactggtttctgtagaattccatgagtagttttggcatccacttccttgatgagctgttggcttcatagctttggccaggttcttgggtggcacattttctttctgccaa

SEQ ID NO: 186882 - DNA, 1821 bp, Homo Sapiens
acactattagaaaatgctctggaggtggcggggagttgttgatttgtgaggacagattgaaagcaactcccagggtggccttgtccacctccccatcgagaatatggctgccggcctctttgaagattgtggtctggcataaggagaggtgcaggcgcctggttctgagcaccttggaatttccagccgcacagcatctggtgccctcccctccaccctcacaaggagctgccatcctgtttggattttctgtttgtggaccagaaacaaacgtttttccaaaggattagcaaataggttgatttcctgtgtaacgctgctctggggcctcttcctcatcctggcagaaggagcctggagcccatgaggcagccagcactgtgcccttgctcagtcgtgctgtcccctccctctccctcagtctcttctccatgcccaagtcagtttccagccgctggtcttcatggcattcccagcacagctggacaccaagaggcaaaacccaaggcctggcttggccgtgttaacgattgtacagacatttttttaaataactttgtgtaatacttttctagaatagtaagttcttgttgaactgtcacagatgagcttctaggaacacaccgggtgtggttacttccactgggtgtgtccatggtcgtggtctgtgcctttgtaaacaaacagaacacttgaaccaccttccgaattgggtcatctgcttctttacattgatacttagagatttgcagctctctaactttcaaggaaacttcccctactgaaaggcataaaaaggttaaaaaagaaaatccgagagtcccaattccctgtataacagcattaaaataatctgcctgcctggaaagatgagaacactgttgcacaacccaaaatgtgtttttaatttgtgaaaaattaccatggtgagtcagacagtcattttaaacagctgaacagagactatcatcagcaaatagagctcagctttgtagctgcctttaaaatccttgtcccaaatccggtgagctctgcttgctgccgccgcgctcctgggtgatcactcagacgggtcagtgggaataacgggccaacaagacagctttttacatgtgtccaaaggatggcctttcgaaggcctggaagtatttcactgttggaagaagtaaacaagaatgacattccagatggaaatagaattctctctcttgcctttgaccaacatggtactaaggggtttcttctttcccaatgtatgtacgtgccctgctgggggccttactttatagaatgagagcatccgagcttccctaatgaatctggctagttctgtgtctggctgaggatacaggagtgggacatccactctcggatccctcagagcacagaaaccttcagctttgctgtctctgaagtatttcctccagtttccctgcgggcccctatgtttgagtttgatggctgctggatcctcactcaacgaaaactcggttggaaactgttccgcctggcagtccttttttgttgttttccatctcatttcccttccatctgaaagtggcattcagctgacttgctcatttagactgttcacggagtctgaatctgccaacgtggtgttggaggctccaccttgaaaagggccacagtcagggcaactttccccatacaggaaaaacttgaaaattacatcaacagtctacgtcacagccaaattatattttcctttataccaaaccaaactatggagaactaaaagtacatcacacaaaacgtttatagtgtttttgcatgtgacctatttcagtattatataactag

SEQ ID NO: 186883 - DNA, 1492 bp, Homo Sapiens
ttggaacaaacactattagaaaatgccctggaggtggcggggagttgttgatttgtgaggacagattgaaagcaactcccagggtggccttgtccacctccccgtcgagaatgtggctgccggcctctttgaagattgtggtctggcataaggagaggtgcaggcgcctggttctgagcaccttggaatttccagccgcacagcatctggtgccctcccctccaccctcacaaggagctgccatcctgtttggattttctgtttgtggaccagaaacaaacgtttttccaaaggattagcaaatagggtaatttcctgtgtaacgctgctctggggcctcttcctcatcctggcagaaggagcctggagcccatgaggcagccagcactgtgcccttgctcagtcgtgctgtcccctccctctccctcagtctcctctccatgcccaagtcagtttccagccgctggtcttcatggcattcccagcacagccgggcaccaagaggcaaaacccaaggcctggcttggccgtgttaacgattgtacagacattttttaaaataactttgtgtaatacttttctggaatagtaagttcttgttgaactgtcacaggtgagcttctaggaacacaccaggtgtggttacttccactgggtgtgtccatggtcgtggtctgtgcttttgtaaacgaacagaacacttgaaccacctcccgaattgggtcatcggcttctttacgttgatacttaagagatttgcagctctctttcaaggaaacttcccctactgaaaggcataaaaaggttaaaaaagaaaatccgagagtcccaattccctgtataacagcattaaaataatctgcctgcctggaaagatgagaacactgttgcacaacccaaaatgtgtctttaatttgtgaaaaattaccatggtgagtcagacagtcattttaaacagctgaacagagactatcatcagcaaatagagctcagctttgtagctgcctttaaaatccttgtcccaaatccggtgagctctgcttgctgccgccgcgctcctgggtgatcactcagacgggtcagtgggaataacaggccaacaagacagctttttacatgtgtccaaaggatggcctttcgaaggcctggaagtatttcactgttggaagaagtaaacaagaatgacattccagatggaaatagaattctctctcttgcctttgaccaacatggtactaaggggtttcttctttcccaatgtatgtacgtgccctgctgggggccttactttatagaatgagagcatccgagcttccctaatgaatctggctagttctgtgtctggctgagatacaggagtgggacatccactctcggatctctcagagcacagaaaccttcagctttgctgtctctgaggtatttcctccagtttccctgcgggcccctatgtttgagtttgatggctgctggatcctcactcaacgaaaac

SEQ ID NO: 186884 - DNA, 1200 bp, Homo Sapiens
  misc_feature (613)..(661): n is a, c, g, or t
ggcaaaggtttgccttggacctactcagcagaatacctgattctcagcgatgtgcaacggaaggtcctctatgtgatggagctgctgcacaaccaggaggagggccacgcctgcttcagctccatctcggagttcctgctcacccaccctgtgctgagctttggtatccaggttgtgagtcgctgccggctacggcacactgaggtgctgcctgccgaagaggaaaatgacagcctgggtgctgatggtacccatggagccggtgccatggagtctgcggccggtgtgctcatcaagctcttttgtgtgcactctttttgcactgcaagatgtgcagatccgcttccagccacagctgaaccctgatgtggtggccccactgcccacccacactgcccacgaggacttcacatttggagagtctcggcccgaactgggctctgagggcctggggtcagccgctcacggctcccagcctgacctccgacgaatcgtggagctgcctgcacctgccgacttcctcagtctgagcagtgagaccaagcccaagttgatgacacctgacgccttcatgacacctagcgcctccttgcagcagatcactgcctctccnnnnnnnnnnnnnnnnnnnnnnnnnnnnnnnnnnnnnnnnnnnnnnnnntcccttacagctgtgtctgccatgagcagcacctcagctgtggacccctccttgaccaggccacctgaggagctgaccttgagccccaagctgcagctggatggcagcctgacaatgagcagcagtggcagccttcaggcaagcccgcgtggcctcctgcctggcctgctcccagccccagctgacaaactgactcccaaggggccgggccaggtgcctactgccacctctgcactgtccctggagctgcaggaagtggagcccctggggctaccccaagcctcccctagccgcactcgttcccctgatgtcatctcctcagcttccactgccctgtcccaggacatccctgagattgcatctgaggccctgtcccgtggttttggctcctctgcaccagagggccttgagccagacagtatggcttcagccgcctcggcactgcacctgctgtccccacggccccggccagggcccgagctcggcccccagctcgggcttgatggaggcctggggatggagatcggcataataccccc

SEQ ID NO: 186885 - DNA, 1652 bp, Homo Sapiens
  misc_feature (531)..(539): n is a, c, g, or t
  misc_feature (1376)..(1384): n is a, c, g, or t
tgtacaaaaaagttggggaagccaattttctatgtatgaatatgctttaacctaggatttcagtccactctgactgactttctaaactttaacttgggtttttacagtgactatgcattagtgctgactctttggtataagccataaaatattttccttcctatcaatttatctgaactttggtcttttcactaaattgtacagtattctacttctgtttaaaaaggggagatgagaaagggaatactatctaaccaataacttgaacaaaaacactaaactaagcatttaatagaaatgctttttattgaggaggtattatccagagttcatgcttagaacaaatgcatctttgcgtatcctagacttaacaattcatcagtttctgagaccacagaatcaggttttccgtagtagataaagactctctggtgcttcaaattctgttcaagtgttttgactcatcagcttctactctttctattactgcctttgcctggcttgttttgtctctttgcaactgattttgcnnnnnnnnnttgtagctttaaaataacagggtctaagtattttaaatgtgcctatttcacagctctcttggtcacaaaaacatgctatttttattggaacttcaaaccaaatccccactgagtgtgtactggttcctgcaggtagcagtctcctattatctcctgtttagcaccaaaagagctaatattattggaaactgaccttttaaaggccactggcagtaggatttaaaaagcagcccactgctcagtttccaggatcagcttcctccttctgtcacttgtgtaagttggcactaccttgtgcctctcagattgctgaagtgctgctggtaagcatgtgcatgctctgcctttcttgtgaaagttttcaatcagcgatatcagcacttacagtaagaagtaaaagtagtgcacagcaaagctaatttgcctttgcctggggtgttcagcttgaaagaataaagctcatttggtttagttaaatgtcttactctactgtgcctatgcttttagctgtgttactaagcaagggaaaaataacagtttctctgagccagagaagacttgatcacagttctccaagcatcgtgatagcaatgcttaaccccaggaagatttcaaggcagggagaagaacatttcaaataagattcttgttaacccatttatgcctagtgttccattattggaatgctaagcttgtgggagtcatttacatcctactgctcaaagtcattgccaaggtctgatttttcacacaaaaaattgcaacccccagcataaatgggttagctactgtcatcagttagcaaattcatccacacaaacacaattagagtttggnnnnnnnnnaagcttttcaaaacttactaaactggcacaattttatatgtatgctatttgttgtatttatgcttaagagcaaaaaagttttgatgggattttaaattcaggcaaagcctacaacgctgagacaatcccctaacaacatggtagtaactaaagaaacttttatactacgcttcttagttttaaaaggaagtggcatcattgtttcagttctagtttgtatttttctctcagatatttttcttctttaaaatctttcccagaaagttgg

SEQ ID NO: 186886 - DNA, 989 bp, Homo Sapiens
ttggctcaatacagataaagataaatatgtgactattattgggtattacacttcacttctctttaatatttttcctccaactggagggcagacaattttctgacttgcttttctctaggtggttcattttgaaaggggacagaaatataactaaatgcttccaggagaaaaattccaagagttacaatctggacttggtacctaaatatcattttttaaattcttgatgcctatttggactagaggtaaacatactttcagattggcctgtttttgtcggtaaggcatacagccttcagaagccaacatttttaatcaaaaacttataaaacatgatgatcattgtgaaaattctgagttgaaggttagtttaagataagctaacaataacagtctgtgttttctctaaaataatctgagttttttggaactctttatttaaatatgtgtgtttttcagtattcaaataagatcaggaagccaattttctatgtatgaatatgctttaacctaggatttcagtccactctgactgactttctaaactttaacttgggtttttacagtgactatgcattagtgctgactctttggtataagccataaaatattttccttcctatcaatttatctgaactttggtcttttcactaaattgtacagtattctacttctgtttaaaacggggagatgagaaagggaatactatctaaccaataacttgaacaaaaacactaaactaagcatttaatagaaatgctttttattgaggaggtattatccagagttcatgcttagaacaaatgcatctttgcgtatcctagacttaacaattcatcagtttctgagaccacagaatcaggttttccgtagtagataaagactctctggtgcttcaaattctgttcaagtgttttgactcatcagcttctactctttctattactgcctttgcctggcttggtttgtctctttgcactgattttggc

SEQ ID NO: 186887 - DNA, 1593 bp, Homo Sapiens
  misc_feature (541)..(549): n is a, c, g, or t
ttggctcagattgctgaagtgctgctggtaagcatgtgcatgctctgcctttcttgtgaaagttttcaatcagcgatatcagcacttacagtaagaagtaaaagtagtgcacagcaaagctaatttgcctttgcctggggtgttcagcttgaaagaataaagctcatttggtttagttaaatgtcttactctactgtgcctatgcttttagctgtgttactaagcaagggaaaaataacagtttctctgagccagagaagacttgatcacagttctccaagcatcgtgatagcaatgcttaaccccaggaagatttcaaggcagggagaagaacatttcaaataagattcttgttaacccatttatgcctagtgttccattattggaatgctaagcttgtgggagtcatttacatcctactgctcaaagtcattgccaaggtctgatttttcacacaaaaaattgcaacccccagcataaatgggttagctactgtcatcagttagcaaattcatccacacaaacacaattagagtttggnnnnnnnnnaagcttttcaaaacttactaaactggcacaattttatatgtatgctatttgttgtatttatgcttaagagcaaaaaagttttgatgggattttaaattcaggcaaagcctacaacgctgagacaatcccctaacaacatggtagtaactaaagaaacttttatactaggcttcttagttttaaaaggaagtggatcattgtttcagttctagtttgtatttttctctcagatatttttcttctttaaaaatctttcccagaagttggttcctagaaaactcaataccatcatctcttatctctatacagggactaggtaataaaaccttcaaaggttgtcaaaggtcatcaagcagtgttcatttatcctgtcacatgtttctgtttctatagtaatttagaaattgcaaatagttaacttttcatcatgtaaaaagttaacattatcctatttccatagataccatggacggcggtgtggcctgagttgtcagtctttaatcctgagtcatgtggctctcttttcatctttgatgtcagttccaattatttggcatcaaaaaccttcatggtaggtagagttttaggtaaaagtggatctagggttactttctttattaacatttcctaaataactgaattgagagacatactctgctactatgtcctcaggttaatttttgtctgatcttacgatgccctgccttttactagctactttagaaatagaaaatgtgaagagtgactatttacatgtatactcctttggctgctagaactcatctgtagtcctttattatttacactgaattccaatttcatttctgcttccgctaagtaagagcacctcattcctgtgttttctctactattgagctgtagacgaactgtttctctaattataaagcaaactgtttgggatattcagggaaactaccccaatgttatgttgtcatttaatgggaaaggctgggatcatatgtatttctatgttctgtaaagtatttgacttactagttctcaataaaattttattaggactat

SEQ ID NO: 186888 - DNA, 1523 bp, Homo Sapiens
  misc_feature (1159)..(1173): n is a, c, g, or t
tttgtacaaaaaagttggcgcgtccctcggtgtcctccgcgggccggcgcgatgcggctgggcccgaggaccgcggcgttggggctgctgctgctgtgcgccgccgcggccggcgccggcaaggccgaggagctgcactacccgctgggcgagcgccgcagcgactacgaccgcgaggcgctgctgggcgtccaggaagatgtggatgaatatgttaaactcggccacgaagagcagcaaaaaagactgcaggcgatcataaagaaaatcgacttggactcagatggctttctcactgaaagtgaactcagttcatggattcagatgtcttttaagcattatgctatgcaagaagcaaaacaacagtttgttgaatatgataaaaacagtgatgatactgtgacttgggatgaatataacattcagatgtatgatcgtgtgattgactttgatgagaacactgctctggatgatgcagaagaggagtcctttaggaagcttcacttaaaggacaagaagcgatttgaaaaagctaaccaggattcaggtcccggtttgagtcttgaagaatttattgcttttgagcatcctgaagaagttgattatatgacggaatttgtcattcaagaagctttagaagaacatgacaaaaatggtgatggatttgttagtttggaagaatttcttggtgattacaggtgggatccaactgcaaatgaagatccagaatggatacttgttgagaaagacagattcgtgaatgattatgacaaagataacgatggcaggcttgatccccaagagctgttaccttgggtagtacctaataatcagggcattgcacaagaggaggcgcttcatctaattgatgaaatggatttgaatggtgacaaaaagctctctgaagaagagattctggaaaacccggacttgtttctcaccagtgaagccacagattatggcagacagctccatgatgactatttctatcatgatgagctttaatctccgagcctgtctcagtagagtactggctccttttataatttgttaccagctttacttttgtgataaaatattgatgttgtattttacactcttaagtcttaaccacagtcagaattatcttaatgtagattataattttggtcttttaggnnnnnnnnnnnnnnntctgatatttatttcaaaacgtattgaagcaacaaaatattaatattgtgccatatgacaacaaagtctttcctaaatactccatctgtttagtactgtattgtggaatatttgagttctatttccatacttgaaaacatggaggattttagagatgcctgaacaatattatttaagtagtatgtgaccgagctataaatttttgtttttgttctaagtagatttaatttgggaactgacaggacaatgtttttaggtttagcattttgtttaaaaacctttaaagaaacctttagaaggacttagacctcacatattaatgttgagaagttctgctaattttaaatggg

SEQ ID NO: 186889 - DNA, 1071 bp, Homo Sapiens
tgggtttctaagcccctgaaacggaaatgaaacttctctttgggactgcaagaactggcaatggggtggacttacctgtgatcactatgaagaagccaaaattacctgctcagcccacagggaacccagactggttggaggggacattccctgttctggacgtgttgaagtgaagcatggtgacacgtggggctccatctgtgattcggacttctctctggaagctgccagcgttctatgcagggaattacagtgtggcacagttgtctctatcctggggggagctcactttggagagggaaatggacagatctgggctgaagaattccagtgtgagggacatgagtcccatctttcactctgcccagtagcaccccgcccagaaggaacttgtagccacagcagggatgttggagtagtctgctcaagatacacagaaattcgcttggtgaatggcaagaccccgtgtgagggcagagtggagctcaaaacgcttggtgcctggggatccctctgtaactctcactgggacatagaagatgcccatgttctttgccagcagcttaaatgtggagttgccctttctaccccaggaggagcacgttttggaaaaggaaatggtcagatctggaggcatatgtttcactgcactgggactgagcagcacatgggagattgtcctgtaactgctctaggtgcttcattatgtccttcagagcaagtggcctctgtaatctgctcaggaaaccagtcccaaacactgtcctcgtgcaattcatcgtctttgggcccaacaaggcctaccattccagaagaaagtgctgtggcctgcatagagagtggtcaacttcgcctggtaaatggaggaggtcgctgtgctgggagagtagagatctatcatgagggctcctggggcaccatctgtgatgacagctgggacctgagtgatgcccacgtggtttgcagacagctgggctgtggagaggccattaatgccactggttctgctcattttggggaaggaacaggcccatctggctggatgagatgaaatgcaatggaaaagatccc

SEQ ID NO: 186890 - DNA, 1411 bp, Homo Sapiens
ttggattgatttgaatgggaagaaatatgcatggtggggtgttgctctcttgccattcgtggatgagcgaaggctacgagctgccctagaagaggtatacccagacctcactccagaagagaccagaagaaacagccttggaggtgatgtcttatttgtggggaaacatcacccactccatgacttcattttagagctgtaccagacaggttccacagagccagtggaggtaccccctgaactatgtcatgggattcaaggaaagttttctttggatgaagaagccattcttccagatcaaatagtatgttctcctgttcctatgttaagggatctgacacagaacactgtagtcagtattaattttaaagacccacagtttgctgaagattacatttttaaagctgtaatgcttccaggagcaagaaagccagcagcagtactgaaacctagtgactgggaaaaatccagcaatggacggcagtggaagcctcagcttggctttaaccgtgaccggaggcctgtgcacctggatcaggcagccttcaggactttgggccatgtgatgccaagaggctcaggaactggcatttacagcaatgctgcaccaccacctgtgacttaccagggaaacttatacaggccgcttttgagaggacaagcccagattccaaaacttatgtcaaatatgaggccccaggattcctggcgaggtcctcctccccttttccagcagcaaaggtttgacagaggcgttggggctgaacctctgctcccatggaaccggatgctgcaaacccagaatgcagccttccagccaaaccagtaccagatgctagctgggcctggtgggtatccacccagacgagatgatcgtggagggagacagggatatcccagagaaggaaggaaataccctttgccaccaccctcaggaagatacaattggaattaagcttttgtaaagctttcccaaatcctttcatcattctacagttttatgctatttgtggaaagatttctttctcaagtagtagtttttaataaaactacagtactttgtgtatttcttttaactgtgtatatttctactgatctgatctcactgtttatgttgctttccaaagatgtatgttgcataatacagtggatctgaatttattattgcttataaaacacatttgatggaataggagtactggtttttcataatggttaaaaatgaaaccagctgtggatttcaaaacacagtgtattctagatcatctaagatccatgctgatttttattgcacaagaattaggtttgaactcgagctggaacctcagcaaactagagtatatattgttcagtatttctttggaaacatttcattaatgtacttgtcttacagaaatttctgaactttagt

SEQ ID NO: 186891 - DNA, 2146 bp, Homo Sapiens
  misc_feature (406)..(414): n is a, c, g, or t
  misc_feature (1121)..(1143): n is a, c, g, or t
  misc_feature (1561)..(1571): n is a, c, g, or t
  misc_feature (1626)..(1710): n is a, c, g, or t
  misc_feature (1814)..(1822): n is a, c, g, or t
ttgggatatagtatgaaagccaggtgctagcaacagacaaattctgagcccaatatgctttatactgctagacagggattggtgtgtttgcacctgtctttcatttgtcataagagattttcctatttcttctacccaatagaatattttcatgcctggaaataggaaaatgtgtgaacagcgtattctcttcacacagaaatctgtagcactgcttttttgaggccagtagcaacatccagagatcattcttccatactttactccctcctttttcagacttgtttgtaaagtacagaatctgaattcagcctttatgattgtatatgatccacagaagacctgatttatgaaattttgtactaaaatcatttggaaatgattgtattgtaaactgaggctaaannnnnnnnnaaacctgtttcatgtgttataaaggccagcttgtaaaagaagctgcaacagactttctctgctcatgatttgcactcttagggttttgttagcccttttgtactactttctttttaaattgagaacatggttctttacatataaatctgcttcaaccttaggatgttttcagaccagaggcaacttattcatgaatttttatgaaaactatctactaggacagataagctgaacagtgatgatctgtagacatttatggactgaatgtaatggttgatatatgtacattctgatatttttaaatctttaactttttaaagttaaaaacctacagctgcttaggtccagcttcttaactctttttgagacacttcctgtcctatctccactgtgcctgcctaaatttgttctcaccaagcactgcctgtgcatgcagagaaaatctgtgcatcctcttttatatttttaaaatactgtttaacatttgtgagaattttatgaaaatgcttttgtatgagctgtggctttttcccattgtgaagcattgaatatcacattttggaacatgttatagggtgagtccctggatctttgctcaccagatccaagcactgcttctcggtgtcattgcagtgtgctgcttgtcacccagaatactactatcatgtgaattctttttgtcgtcagtgtcttttccttagtctttnnnnnnnnnnnnnnnnnnnnnnnttaatcattccttttttaagaagaagtaattttccatttatgaagcagtatgaattagatgtattttcaaaacaggtccctaagacaattcttcagatcatttttaaaatgactaagtcattttagtatgtcaagcaagataaaaattacatcataccgtctattttgcccatagtgccatttagagatgaaaaccagctttaactttgcaaagtgaacatgtacatggtctgctctcatttattcattcttctctcaaaagtcaaatgaatgcagagggagcttggtcaaactgcttttgtttcaactgcaggcaggggagcaaaaggacgccatgtgagcattaggaaaaaaaatactcactcttactaaccatttttatacagaaaatgagtcattttggaaatgattcttatgnnnnnnnnnnnctccttttagaaaattctccaaaaggttttgatgttgaatcttggtcttggaccnnnnnnnnnnnnnnnnnnnnnnnnnnnnnnnnnnnnnnnnnnnnnnnnnnnnnnnnnnnnnnnnnnnnnnnnnnnnnnnnnnnnnaagttgtgctgacaccaaacacatccagtttataatcagtatattggaaagctggtattgatgtagaaccagtgcataactttttatggggttttgttattggnnnnnnnnngtaaagtgtgaataaaaggtatgtttactcatttttcctgaacactgtgttggtaatgtgcatcatgacaatttccagtgaaggtgagctggagctggttggactaatgagactgaggaagcagcttttcctacgatctgcattatgtaatcacaggtccagagagctttatgaaagcgggagaggaggagcactttactcatgttgtatttgttaatgggaggatgtcatcttttcatagatgctggaactaaaagtgcacttgttaaatgctaaaggtttgagctttacacaaaatgtcttcatctgtattttgttattgtc

SEQ ID NO: 186892 - DNA, 1564 bp, Homo Sapiens
  misc_feature (409)..(431): n is a, c, g, or t
  misc_feature (848)..(858): n is a, c, g, or t
  misc_feature (913)..(950): n is a, c, g, or t
  misc_feature (969)..(997): n is a, c, g, or t
  misc_feature (1101)..(1112): n is a, c, g, or t
ttggatctttaactttttaaagttaaaaacctacagctgcttaggtccagcttcttaactctttttgagacacttcctgtcctatctccactgtgcctgcctaaatttgttctcaccaagcactgcctgtgcatgcagagaaaatctgtgcatcctcttttatatttttaaaatactgtttaacatttgtgagaattttatgaaaatgcttttgtatgagctgtggctttttcccattgtgaagcattgaatatcacattttggaacatgttatagggtgagtccctggatctttgctcaccagatccaagcactgcttctcggtgtcattgcagtgtgctgcttgtcacccagaatactactatcatgtgaattctttttgtcgtcagtgtcttttccttagtctttnnnnnnnnnnnnnnnnnnnnnnnttaatcattccttttttaagaagaagtaattttccatttatgaagcagtatgaattagatgtattttcaaaacaggtccctaagacaattcttcagatcatttttaaaatgactaagtcattttagtatgtcaagcaagataaaaattacatcataccgtctattttgcccatagtgccatttagagatgaaaaccagctttaactttgcaaagtgaacatgtacatggtctgctctcatttattcattcttctctcaaaagtcaaatgaatgcagagggagcttggtcaaactgcttttgtttcaactgcaggcaggggagcaaaaggacgccatgtgagcattaggaaaaaaatactcactcttactaaccatttttatacagaaaatgagtcattttggaaatgattcttatgnnnnnnnnnnnctccttttagaaaattctccaaaaggttttgatgttgaatcttggtcttggaccnnnnnnnnnnnnnnnnnnnnnnnnnnnnnnnnnnnnnnctaggatttcattgtgatnnnnnnnnnnnnnnnnnnnnnnnnnnnnnaagttgtgctgacaccaaacacatccagtttataatcagtacattggaaagctggtattgatgtagaaccagtgcataactttttatggggttttgttattggnnnnnnnnnnnngtaaagtgtgaataaaaggtatgtttactcatttttcctgaacactgtgttggtaatgtgcatcatgacaatttccagtgaaggtgagctggagctggttggactaatgagactgaggaagcagcttttcctacgatctgcattatgtaatcacaggtccagagagctttatggaagcgggagaggaggagcacttactcatgttgtatttgttaatggaggatgtcatcttttcatatatgctggaactaaagtgcacttgttaaatgctaaaggtttgagctttacacaaaatgtcttcatctgtatttgttattgtctacaatatatttgaatttggggcagcatattaagaagtaatggcctgtttgtcttgaaaatacttgttttgcctcttccaggcatactgcattctgtggatcagtttgaacagcttctccaccttatttgga

SEQ ID NO: 186893 - DNA, 1560 bp, Homo Sapiens
  misc_feature (1240)..(1252): n is a, c, g, or t
  misc_feature (1458)..(1471): n is a, c, g, or t
ttgggtctcaagttacagtttgggatattaactatctctgcattcccctcctcccccagacttcagagatgtttttctggcgtctcagttgacatgatctgttgtgcgtcttttctgtcaggtcactcttcccttgggacccgagatcacaccctcatttttcacattattctgtttctgttggagagacagcatataaaacagtattgaaataggctgggagagagcaatgtttctgtgctatattggatgctcagaagtgcaggagacgctggacccaattctctctgctgggtagttaccttatagcatttggggatttgggttagatgatctaaccaggaggccatcactggatggtcacccccccaaaaaaaattccatttgagcatcaaaacctgctttgcacaatcctatttgatgcccccagttcagcagagtcagtggccaaagaaaactttggacgtgagtaacacccttcagcagtcgcaacgttattttggttttgtgaaggactctgaaaccatctaccctgtataaattctggctttagaaatttgcccaagaatgctcattctgagagctttcctcagcagcatatatcatcagcctcatcctaaaataggcagggagcccctcccatgagtttatccaagttctcagctcctaaaatgcaggctgccaagaccctacacctgccctggctctacagccacttacctggtttctggactgtcaccctcccagctgacctgcccgtagccaaggaatgaggacctaacttgagttggcccaaagtctgacctggctgtatgtccctgtggcccacacccagcctgtcttgctcattcatgcagcctcaacactggcctccaaagttcccttaacacttgcaaagtcctttttacctgtgcatttggacttgaggacactggtttctatcacaggtgagagccatgttcaatacctccagcaagctctcctggctccctgcactgtgcacgctcctcttcccaaggtcccaataccagcacctctagttagagttagggtcagggtcaggcctctcccaacatcccagtagtttctcctctgagacacatgggcaagagacaatttggagtcaagattttccatttggatctattttaaatcttttagaaatgcatttgaaacagtgtgtttgttttttcccttctagttaagggactatttatatgtgtataggaaagctgtctcnnnnnnnnnnnnncctttaacaaggtccaaagaaagatgcaaaaggagatcacacccttgccccgctgagccccgtgataacaagtcactccagactaacctgtgtgccagacatttgtgcattgttgcactttgaggttattatttatcaagttcttgaggaagcagaaagagggactcctctctccctccgtgtatagtctctatgtttgtgctagnnnnnnnnnnnnnnctctgtgtccagtcagccacagggcccgcctccctgcagaataaggggtaaaacgttaagtgttgtttggccagaaaccacactgactg

SEQ ID NO: 186894 - DNA, 1294 bp, Homo Sapiens
  misc_feature (211)..(224): n is a, c, g, or t
ttggctgtgttctccgttttctctgtctgctgtctaaccctgtgccttgcctgggataaggacaatgatgaggttactggtttggattgtaagtagaggacttttattaattggtttagaggttcactgctgctttgtcactttctcaatcaaattggccacttaagaaataaagagctggtagaattgcatcctcagatgattattgacnnnnnnnnnnnnnnaaaacagacattccagtgccacccaaatatatatctgtaacgtgcccaagaaatcctagctgcgctcttgagagtgcatgccatggagactggtttagacaccgcgtggagcctagttgcctgttgtcacggcatcttgcactttaggagactaagaccgtcctggttcgtctgtgtgtggtgtgaccaatggtgtgcccagagcactactctcaaaatcactagtgttagcaagtcgtcccgggctggggagcgttcgccgtagtctttggaagctttggctttagatttaccaagccccgcctccccgctgccagtgccctgctctcccgttcgcctctttctgtttctgtgtgaactttcccggtaatatcactcgttaaataggttttctttaaacttaattaaagaaaaactatttaaaggtaaaggatattttgttgacatcggtggctcgatcatccttaagcaactgaagttaaaattgttgaaggaaaaggcacttaaattggttactttcatgtccagctgtatataagtccagtgtgttcatctagatgacgcaaagaatctcctggtagagaagcgacatgtaaaaaactggtggaaaaaggttttggattttttttccagtggggtggggggagggcaagctggatttacaggtcacggctggactgaatgggcctttttatcttcccactgtatcatggaagtagctgcttgcttgtactgtccatccttcaggcatccctaaagctcactctgaagatgttagagacaaacacaaactcttcgagttaaagttgatcctgacactgacatgaaggcaagccttgatttcgtatgaacgttgctgaagtggtaattgaggaaaacagttccccagattgttaagagttcactgaagatattgacacaattttaaaaaatcagtaaaggaatgtatataatattgctctcgtgttttacagtaagatttgttgctctcagactgtgtaaaacaaaatttattcatgttttctgcatattaaaaaatcttattgtaccaactggtaaactattaaatg

SEQ ID NO: 186895 - DNA, 1216 bp, Homo Sapiens
  misc_feature (656)..(711): n is a, c, g, or t
gccactgtgtctggcctattgtatgattatgcatgagtcacgcaatgatctggtcctggattccaggagtagaggacctagctttagatcaattagtttcagctaagctgactagaaccgggtcaaagtgtaattctccctccagctcccccaaaccccagagttttggggttgtggttgatgcagtgtgggatgtccctgaaaggtaccaagtctagggtggtgagttcctgctatgcaaccaaatttaagctcctcactttttgtgacacatggtgtcagatatggggtcccgcacctatatctggatgaaaaggtataaactctggacctcattaatgacttatttcttggccttcttctaaggactaggacagctccttatctgtctgagaatggggaccagctctgagtggggttgctgactggattccctgtttctcaggaacttacatgggtctggggaggctaggtaggtgattgtacgtggttgctcttctccttggctgggggaggtaatgagcagatctctgtgggtgtggagcttgttggggggatgtctaggaagcttcagcttagccacattcccaagtttaggtgcactgagccatatagcccagtgtatgcatgtgtgggtgtgttcatgcacacacacnnnnnnnnnnnnnnnnnnnnnnnnnnnnnnnnnnnnnnnnnnnnnnnnnnnnnnnnaggtcacttgtacacttggtttcctagtagaagctcacttgccacctctcaggggggtcccggattgcatccatcacaatcccaaaactagagttggggggaactggagggagcaaaacactgatttgatactggtcagtttgcttgaaactagttcacctaaagctagatctcttaaaaccaatttactgaaaacttgtttgcttaaagttaatgacttaatgactaatttgccaaaagctcaattcctattttggtgtgtttatatccatttaggtgtcctattcttttttgtcatgctttggatatttcaaggatttatatctattcatccaagagtacttctgagttattatcagcaacataaatttatcaaatttgcagcactttgtaaatgatgagattgcttcctacctttatggatgtctttttctatgttatctaccattcaaaaacttttttaaaaagtttaaagtttctagcaataaatacaattggtacagac

SEQ ID NO: 186896 - DNA, 1394 bp, Homo Sapiens
ttgggggagggctctggcgtcctggatggaggtgcgttcctttctgtggctggcgctggatccaccctgggtctccaaccagggctgcagagagggtagagccgtttcttaggccagagtggagtgggacaggaggtgccgagagaggactgaggtggcttgggacatggaagcgctgcagccttcgagcccggcatccagcattgcagccgccgcggcggcctaagagctcgaaccctttcacacgcgcgcaggaggaggagcggcggcggcagaacaagacgaccctcacttacgtggccgctgtcgccgtgggcatgctgggggcgtcctacgctgccgtacccctttatcggctctattgccagactactggacttggaggatcagcagttgcaggtcatgcctcagacaagattgaaaacatggtgcctgttaaagatcgaatcattaaaattagctttaatgcagatgtgcatgcaagtctccagtggaactttagacctcagcaaacagaaatatatgtggtgccaggagagactgcactggcgttttacagagctaagaatcctactgacaaaccagtaattggaatttctacatacaatattgttccatttgaagctggacagtatttcaataaaatacagtgcttctgttttgaagaacaaaggcttaatccccaagaggaagtagatatgccagtgtttttctacattgatcctgaatttgctgaagatccaagaatgattaaagttgatcttatcactctttcttacactttttttgaagcaaaggaagggcacaagttgccagttccaggatataattgaagtcagcaactaagtcttccttcaaagttgtgatttttgggaaaatcatatatcctatcttctcaaaggagaaatattgtacaataatatgaaggcttatattttaaataattattttttctcaactaatttttttcacttaaacttgagagaacaagttcagcttttatcataagaaactcatatgcctagctagaatatatgactgactattcaataccatactgaagagtttgatactattaaaataagccgctttgttttttaaatatgcaggcatgggttcagcttaattccataattcccttccagattattaactcttcatacttacagcaatgaatctgacaatgtttttcaaaaatgtatgctcaggggttatttgtttcaagtcataggccagaacttctaaccatgtttattgtgtctaaaagagttggttgctattttccttcattatgaatagtcagtattttaaaagctcaaagtagaagaggagtcactaagccctaacagcttgtccaaagatttaaattcttatttcaaatttgatttgtcctt

SEQ ID NO: 186897 - DNA, 1722 bp, Homo Sapiens
tattttatttcaattttatgatactacaatttcaaagtaattattcagaactctgaatataaaatagccctaaaccttaaaggacaaatcaaatttgaaataagaatttaaatctttggacaagctgttagggcttagtgactcctcttctactttgagcttttaaaatactgactattcataatgaaggaaaatagcaaccaactcttttagacacaataaacatggttagaagttctggcctatgacttgaaacaaataaccctgagcatacatttttgaaaaacattgtcagattcattgctgtaagtatgaagagttaataatctggaagggaattatggaattaagctgaacccatgcctgcatatttaaaaaacaaagcggcttattttaatagtatcaaactcttcagtatggtattgaatagtcagtcatatattctagctaggcatatgagtttcttatgataaaagctgaacttgttctctcaagtttaagtgaaaaaaattagttgagaaaaaataattatttaaaatataagccttcatattattgtacaatatttctcctttgagaagataggatatatgattttcccaaaaatcacaactttgaaggaagacttagttgctgacttcaattatatcctggaactggcaacttgtgcccttcctttgcttcaaaaaaagtgtaagaaagagtgataagatcaactttaatcattcttggatcttcagcaaattcaggatcaatgtagaaaaacactggcatatctacttcctcttggggattaagcctttgttcttcaaaacagaagcactggaaattatagaaagattttaataacatttctattctcgtattacataacagaaactatacagttcttttatcttagcattccagtacacttcgtgattttaataagcatactattaaatacacagttctgtgataaattaagagcatcttttcatctcaatgagttctgctttaaggatgaagaacaaattctaatcttaaaagcagatatccatttggtttggttctcaatctctgcatagcaggtatagatagtgaagaaaaatagcttgatgtttagaagaaattcgttttcagaaatcacaagatctactaaaacactaagtttcatactaaaccgtttcatgtatctttatcatattctgtaaagtttacactttgatgtacctgtattttattgaaatactgtccagcttcaaatggaacaatattgtatgtagaaattccaattactggtttgtcagtaggattcttagctctgtaaaacgccagtgcagtctctcctggcaccacctgttttaaagaatatatatattatcaatactttgaatctcacaaagttcctcttttccctgctaaattagtctcattattttgcctattcatcagaccataatacctaatctaatgtagggttcagcaaaataaattgtgaatattacccataaacatatctgagtttaaaaacttacttgcatatgtcaatgaagaaccaatgttctaatatccataattagttatgaactgtcctcttgtatatttgaggtcttcaaggaataatcggcaaattacattatttaaaatgtgtccaagccaatcatatcacagccctagcccaacttttctgtaacacttatacctgaatgtcatgattgactattttttttaaaagatacc

SEQ ID NO: 186898 - DNA, 1351 bp, Homo Sapiens
  misc_feature (366)..(375): n is a, c, g, or t
tttgtacaaaaaagttggaaccatgtttattgtgtctaaaagagttggttgctattttccttcattatgaatagtcagtattttaaaagctcaaagtaaaagaggagtcactatgccctaacagcttgtccaaagatttaaattcttatttcaaatttgatttgtcctttaaggtttagggctattttatattcagagttctgaataattactttgaaattgtagtatcataaaattgaaataaaatacatctactaggctgttagccaaagcatcaccattacaagtccatgaatgttaaaatgtacaggtgggattgtgaagatttactgacatcaaaagttcttctggaaacaaattttgttnnnnnnnnnngtattaaattattttaatagtgatttatttgtcatcaaatgtacaacttattctaaatattttcattttctgtgttctaaatagaaatattaagttgcagtaaaaagagaaaaaaaggctatttagcattacaaagaatcatatttaaaggctgcccaatgtagagtctagtgacctgttcaggacacctgaaatataattaaatgacaattatcaaggttttaacaatttataattctaaaccagaggattataaagaagtgcaaattgacttttacattcaactttagttaaatgaaggcactcagtattcttcctgaataatacattcagtttctcacattttatgctttcatctattcagaattatttcatagtaaaataatctactcttatcacagctgtgtgacgatttctaaatgtaggaaggcctgtgaaacatgacactgcagttaaattggttggcctaaggactaagtaatttttcttctgctgaagttttaagtgagtatttgttccaaacaagttctgttgaaatctcacgctgttgtcaggaatcagtgttatcctggaactgttactctatttaatcttcattatagcagaaatgtgccaccatggctttgacatgttggtaggtattgtcttccaggcttcaaagctgcacagaggctacgttttagagagttggcacctttgatgtggtagtgagctgatcatccactttcttctcagtcaccatcattttgagctcctttgtgctggtgagcatcaatttcttcataaatagctctgaaacaaagccatcacagcaaaagggttatgtatcaatttcaaagtgctattttggtttttaactgccagcactgtaattaaaaattgagctggttttggagttcaggctacatatgagtaaaaataagtctctgccctgaagtgtgtattctagtttatttaaattctaaggttgcacttc

SEQ ID NO: 186899 - DNA, 1550 bp, Homo Sapiens
aatgaagggcactcagtattctttctgaataatacatttcagttctcacatttttagcttctcatctattcagaattaattccatagtaaaataatctactctatcacagctgttgtgacgatttctaaatgtaggaaggcctgtgaaacatgacactgcagtttaaattggttggcctaaggactaagtaatttttcttctgctgaagttttaagtgagtatttgttccaaacaagttctgttgaaatctcacgctgttgtcaggaatcagtgttatcctggaactgttactctatttaatcttcattatagcagaaatgtgccaccatggctttgacatgttggtaggtattgtcttccaggcttcaaagctgcacagaggctacgttttagagagttggcacctttgatgtggtagtgagctgatcatccactttcttctcagtcaccatcattttgagctcctttgtgctggtgagcatcaatttcttcataaatagctattatcatatgcgtggcttgaggtgaggttttggctggtcctttgggcaaacttaagcctgaaagttgattattcatggtgttgagttctcccagagtggccctaggcatccggggactgggacttaggtcgaggagatcttgagatggggcagaaggctcactggtagtattggtggcttccttctggttcttattttgctccaaaatcctttgttggtttctagtaaacctctcatatccaaggatagcattattcaaatcctcattcacctgaattagctcaacagttacatcttcgttctccaccaccacaagcaggtccatgatcctctcctgcatctcccgacctgttttatagagtttctgcagaagctctatgtcttcatggttttcagacccaggagtattctccatcaatatggcggacatcactcgcacattcattttcaccatatccaattcactgtgcagttttccaatctgttctgggaccaatgtaacagtcgagttctttggagcaattacagaagaaagagctggtgcagtagggacagatgttggaggatttgatgagatttgagcagtctcttgtcttgctgtttcagcctctgcttctgagggaggaaactgaacgcctttcttaaccaggtcgaggtatacttctttgacttcgcttacatccacacctcctgggaagccctgtgaccaagtcttaatgaaattcaagattctattctgaatgtctaatggcaagttgtatctgggattcagtagcttaactaaattctctttaacaaattccttcttcacaatcagagactggaaacttggaccacagtttgacaaggtaagttggatttctttatgattgtagtttttggaaatccttttcttcaaagctttcactgcatcttttggcccatcctgggtagtgttaattatgtcacagatgtgcatgaactggccccaatcttcagtctgaactccagcaaatgtagcctatgaggtggcccacggaggtcgcgtagggatcccggtgacccaa

SEQ ID NO: 186900 - DNA, 1065 bp, Homo Sapiens
ttggctcggagctttgcggccttcctggcctccaggctgattgggggcatcagcaaagggaacgtcagcctctccacggccatcgttgctgacctgggctcgcctctggcccgcagtcaaggcatggcggtcattggggtggccttctcactgggcttcaccctgggccctatgctcggagcctccctgcccctggaaatggcaccctggtttgccctgctcttcgcagcctccgacctgctgttcatcttctgcttcctgccagagacgctgcccctggagaaacgggcgccctctatcgccctggggttccgtgatgcggctgatctgctcagccccctggccctgctgcgcttctcggctgtcgctcgtggccaggacccaccctctggagacaggctcagcagcctgcgccgcctgggcctagtctacttcctctacctcttcctgttctcgggcctggagtacacgctgagcttcctcacacaccagcgcttccagttcagtagcctacagcaggggaagatgtttttcctcatcggcctcaccatggccaccatccagggtgcctatgcccggcggatccaccctggcggggaagttgctgccgtgaagcgggccctcctgctgctggtgcccgccttcctcctcatcggctggggacgttctctgcccgtgctgggcctggggctgctgctctactcctttgccgccgccgttgtggtgccctgcctgtcctccgtggtcgctggctatggctcaccagggcagaagggcacggtcatgggtacactgcgcagcctaagtgctctggccagggccgcggggcccctggtggccgcttcagtgtactggctggccggggcccaggcctgcttcaccacgtggtccgggctctttttgctccccttcttcctcctgaagaagctgagttacccggcacagacgctcaaggctgactagctgagccactgtgcccaggctgtgggcaccaggcaaagtgggagcctaggtcaggcccctgcccactgcctgacccccaccccccgccagtcaagggagacc

SEQ ID NO: 186901 - DNA, 1424 bp, Homo Sapiens
ttggctaggtctgcgccctggagggaggtgtagaaagaggtacatggagaacaagtttgtcaatccgtctgaacttcagttgccttacctgtaagaattagagcccattgggaacgatgccaccaccgtcagacattgtcaaagtggccattgagtggccaggtgctaacgcccagctccttgaaatcgaccagaaacggcccctggcatccattatcaaggaagtttgtgatgggtggtcgttgccaaacccagagtattataccctccgttatgcagatggtcctcagctgtacatcaccgaacagactcgcagtgacattaagaatgggacaatcttacaactggctatctccccgtcccgggctgcacgccagctgatggagaggacccagtcatccaacatggagacccggctggatgccatgaaggagctggccaagctctctgccgacgtgactttcgctactgagttcatcaacatggatggcatcattgtgctgacaaggctcgtggaaagtggaaccaagctcttgtcccactacagtgagatgctggcattcaccctgactgccttcctagagctcatggaccatggcattgtctcctgggacatggtttcaatcacctttattaagcagattgcagggtatgtgagccagcccatggtggacgtgtcaatccttcagaggtccctggccatcctggagagcatggtcttgaacagccagagtctgtaccagaagatagccgaggaaatcaccgtgggacagctcatctcacacctccaggtctccaaccaggagattcagacctacgccattgcactgattaatgcactttttctgaaggctcctgaggacaaacgacaggatatggcaaatgcatttgcacagaagcatctccggtctataatcctgaatcatgtgatccgagggaaccgccccatcaaaactgagatggcccatcagctatatgtccttcaagtcctaacctttaaccttctggaagaaaggatgatgaccaagatggaccccaatgaccaggctcaaagggacatcatatttgaactgaggaggattgcatttgacgcagagtctgatcctagcaatgcccctgggagtgggaccgaaaaacgcaaagccatgtacacaaaggactacaaaatgctgggatttaccaaccacatcaatccagccatggactttacccagactcctcctggaatgctggccttggacaacatgctgtacttggctaaagtccaccaggacacctacatccggattgtcttggagaacagtagccgggaagacaaacatgaatgcccctttggccgcagtgccattgagctcaccaaaatgctctgtgaaatcctgcacgttggggaactaccaaatgaagacgcaatgactaccacccga

SEQ ID NO: 186902 - DNA, 1572 bp, Homo Sapiens
ttgggttttgaatgatttctctatttgtgtttcttaattcaagctatatcaagaaggtcatttgcttggtaaattgtgaaatatggtatgagagagacaagcttcattaaaacgttccatcttcattcctttaaaagacggaatgggtagctgatttatcagagtgccattcttgcgtatttatgattatcttatggtggtaatgttcatttgatatacacaggatataaaagttgtgtaagtatttggtttttatttttctgtgttctattcttaattatttttctatgtcttattggtttggcttggccacattttggtcattgtttagactttttattgtaacgtttctttgtactgttgattacatttatttacttattttactcactttagggtcatgatcagagttcgactcttgcccaacactctgttgaactgactttacccaatcatcatccatttcatagagatttgctccgatatgccaagctgatggagtggctaaagagtacagattatggaaaatatgaaggactaacaaagaattacatggattatttatcccgactatatgaaagagaaatcaaagatttctttgaagttgcaaagatcaagatgactggcacaactaaagaaagcaagaagtttgctacactgcctcgaaaagaaagtgctgtcaaacaggaaacagagagtcttcatggaagttcggggaaattaactggatctacttctagtctaaataagctcagtgttcagagttcagggaatcgcagatctcagtcatcttccctgttggatatgggaaacatgtctgcctctgatctcgatgttgctgacaggaccaaatttgataagatctttgaacaggtactaagtgaactggagcccctatgtctggcagaacaggacttcataagtaaatttttcaaactacagcaacatcaaagtatgcctggaactatggctgaagcagaggacctggatggaggaacattatcacggcaacataattgtggcacaccactgcctgtttcatctgagaaagatatgatccgccaaatgatgattaaaatatttcgctgcattgagccagagctgaacaacctaattgcattaggagacaaaattgatagctttaactctctttatatgttagtcaaaatgagtcatcatgtgtggactgcacaaaatgtggaccctgcttctttcctaagtactacattgggaaatgttttggtgactgtcaaaaggaactttgacaaatgcattagtaaccaaataaggcaaatggaagaagtaaagatctcaaaaaagagtaaagttggaattcttccatttgttgctgaatttgaagaatttgctggacttgcagaatcaatcttcaaaaatgctgagcgtcgtggagacctggataaagcatacaccaaacttatcagaggagtatttgttaatgtggagaaagtagcaaatgaaagccagaagacccccagggatgtggttatgatggaaaactttcaccatatttttgcaactctttctcgattgaaaatctcatgtctagaagca

SEQ ID NO: 186903 - DNA, 1762 bp, Homo Sapiens
  misc_feature (1568)..(1581): n is a, c, g, or t
cccagaggcaagcatcagagcaagagagaggaggtgggaagtccattcagaggcagacgtagattctacgttccagttacggctgatctatggactctcgtgagcccgcccccagaactgccgcaactctccaaaggcttttattctttgaaatagagttgccattgaattaaaagcctacaggagagacgggcctggtctgtggtctcactaaagcccaatgcccaattaggtccagagaagaaagaagagtgagttccctacctggatttaagaactcggaccactttggactggtttgtccaatctctcttataatgctaaattccattgctgaagcctccagaaatgatctcttctgctacatcaagcctgggagtttacacaatgatacactatgttttaccttcaaagataatgctcctaacatgagtaggacaaattagaaatctatttttttagaagctgtaacagatttgggctttcttactctctggctgagggcacacatttgtgagtgagcaggttgataaagaaagctaactagccaataatgagaatgagccaggctggctgtcagtcttcaaaccaacagagctagccagcccggggtggaaaccaggatggggagggagacccatcagtggagagtccactcctgcactcttgagcagtgaccctcaatgaggggaggggcagtttctgcaaacgtatttaaaattcccattacttttgttttcagccatgaaagacaggaaaatacaattttctgttcaccaaggtggcaaaaaggtgctaaatactgctaggaaacaaatgccactgatccctgtcataaagaacagcaagtcatctacaagaaggcagccttgctcaaagtggttagcactcgcatgtgtaaagatttccaagagttctgaagacagccagccagcactgcttatcacacacacggggaccctgaacaactgactccatcccaagaacattgtgaggttcaaatgacattatgtgagtgaaggtgctctgaaaatttgccaagttccacagaaatcccagatatcattaaaagcgaagagccctatcgtatatggttagagaagaatattgagtttcctacgtcttaaaatgagtaagaggattaccatgtattggtgcatctgcccacagtgagtacatgctgggagaaaggtgagtggtataaacagttcttttctgagtaccaaattcactttgggcaggagggagggtggggcagaggccgacgttttcatttgtgagctggtgtatcttcggaattatttttaattttaaaaccatgcaaaatgaataagcaaaaagactagtgcactccagccctaaccatattatcttcacaaaaactgcctcaactttattttctaactgaagctccctgactcatttcattctactgcagttttaacatctctaaaagtctccatccactctctcccccactttccacgcagctgttaatccattctggggaggagagaacttagccatctgctcacattctgactaaagttaatttggcacttcaaatnnnnnnnnnnnnnncacacaaaactgactttctagccacaaaataaactagtagcaaatggtatctaccaaagaatgtcccagtcataatcattgggagaaactgtgacccgcacagtagctacattaagaccaaaaactttccatactatatttttttataggcaaatattcaagccaacttttttgtacaaag

SEQ ID NO: 186904 - DNA, 1309 bp, Homo Sapiens
  misc_feature (899)..(913): n is a, c, g, or t
ttggaattaggcaatacccttgttaattgccctttggcaactaacttaaccatgtgcttcccacacagtacatcaggaaaacttacagggcaatatttttaacttggggcaggaagaagggagcagcagagaattgactagatatagcacctattaaaagagaactcttgcttcttctgagatttttcaagctgtgctttgtgtgtgtgccagtagacttacgcaaggacagggtacaaacttagctggaagtctgcccaggctgaatgatctcttccctagagttgattgtcgggtacacagtgtgaacccccgaagacggaacctcacagtcttccatgttcccttcttaactgtcgtgtggctcgttgctaaatcatgacaatggctgcctatctgctgcttcttaggttgctgttgtacatggaaccaggactagagattttttcagatttatagacttaaaaaattagaattttattaccaggctttccttctcaccccttttttctgactttgccaagtaatttgttgacacgaaaattttggaggaaccaattgaaaacacacttccagtctagatgatgctttgtgtgatacattaagttcttattttggattaaaagaagttttccatttgatacttctctaaattaaataaattatagaatgtagttgggtggattttggggtggccatatagtaatggaaagctgcaataattagttttaatacagcttgaatatttgctatatagaaatatagtatggaaagtttttggtcttaatgtagctactgtgcgggtcacagtttctcccaatgattatgactgggacattctttggtagataccatttgctactagtttattttgtggctagaaagtcagttttgtgtgnnnnnnnnnnnnnnnatttgaagtgccaaattaactttagtcagaatgtgagcagatggctaagttctctcctccccagaatggattaacagctgcgtggaaagtgggggagagagtggatggagacttttagagatgttaaaactgcagtagaatgaaatgagtcagggagcttcagttagaaaataaagttgaggcagtttttgtgaagataatatggttagggctggagtgcactagtctttttgcttattcattttgcatggttttaaaattaaaaataattccgaagatacaccagctcacaaatgaaaacgtcagcctctgccccaccctccctcctgcccaaagtgaatttggtactcagaaaagaactgtttataccactcacctttctcccagcatgtactc

SEQ ID NO: 186905 - DNA, 1846 bp, Homo Sapiens
  misc_feature (1431)..(1464): n is a, c, g, or t
actttgtacaaaaaagttggctctccactgatgggtctccctccccatcctggtttccaccccgggctggctagctctgttggtttgaagactgacagccagcctggctcattctcattattggctagttagctttctttatcaacctgctcactcacaaatgtgtgccctcagccagagagtaagaaagcccaaatctgttacagcttctaaaaaaatagatttctaatttgtcctactcatgttaggagcattatctttgaaggtaaaacatagtgtatcattgtgtaaactcccaggcttgatgtagcagaagagatcatttctggaggcttcagcaatggaatttagcattataagagagattggacaaaccagtccaaagtggtccgagttcttaaatccaggtagggaactcactcttctttcttctctggacctaattgggcattgggctttagtgagaccacagaccaggcccgtctctcctgtaggcttttaattcaatggcaactctatttcaaagaataaaagcctttggagagttgcggcagttctgggggcgggctcaggagagtccatagatcagccgtaactggaacgtagaatctacgtctgcctctgaatggacttcccacctcctctctcttgctctgatgcttgcctctgggcctctccatgcccaaggtggtctttcatccttgacaggctggtaatgtgctggccacctccagctcctgcatcgagtctgtaaaccagagctggttctcatggccttcgtcacgataccaggatacggaggggagcccagggccatccatacccaccccagggtaacggggctggcctggcattagtcattatttagtttccaggccaaccatccagatagagattccctctttcctttgagcagtgctctcaagagctccgtgcctgtccacaatgacctagagtgcatcctgctcattgtcagtgtagcccctcgcccctatattcatccaggatacttggaagtgctaaaataggaagggattcggctttcaactttgctaccatcttccctgaagcaggaaaatgaacatggacttaaatgttctttgaaaaaaccaaagttttaagatttgctgtgtgatgaagtgacagggagggccggagtcagcaggtgccagactttctgttctgtctgccatgggtttgtccagctcaggtagctctaggagcaccatcctgccctagcagagcccaggccttgccctcatgaagcatcattgaaatagcaggagcatgttgatttcttggttaggttgcattataataacaagagtcagaacattaattcgaaacaacttgcagtatgcatttcttcacaccagtacattcttaagtgtacttgtttataaggaataacataaactaatctgtaccttnnnnnnnnnnnnnnnnnnnnnnnnnnnnnnnnnnaactgtatagtgtacatggtaatgatttattgctatgccccagatccttaatgtagttctcatcctccgcatgccctcagccacaagcgggtgactgactgttccctgatgatttggcccacctcctgtgtttggacctctagggaggagggttttggtcatactctccttatcctcgtgcacagaaatgctcagggtccccatgtgcctgatgttcagccctctctcttgttccctttctgagcatgtggtccttccccaggctgtgggacagctgccttcccacgaaagtgtaaagcagtattaagatcattactgcatgtgccctaaaacccaagttttctattcccttaggacagaaaattgcatgtgaggtgggata

SEQ ID NO: 186906 - DNA, 1572 bp, Homo Sapiens
aaataatcaggaaccattttatataaaaaccatatagtagataactggttatgtgtattttccattgcattttcatccaaaattgcttgtttcttttcctttattatgtgcagaaagagactcatccgctgaatacacagcactgttaatctacagtcttctgtccccacagagtctgctagatcttcctcttctgagtcatcctcttcttcctcctctggtgctgacgaactggaggtgggccctttgcaggttttcaggtggcgggtgagatggtatttggttagataagcctttgtacatttttcacagacataatcccgttttccttcatgagaattgagatgcttctttaagtgatttgttctcaagaacagcttatcacacttgggacacttgatctggcgttcttgagtgtggatgagcacgtgctgcttgaggtcctgcctccgcataaacaacttgtcacagtaatcacacttaagattcttctccccagtgtggataaccatgtgggactccaggtgagccttctgggtgaaagacttgtcacacaaggtacacctgtagttcttctgacctgtatgtatcttgaggtgggtccgcaggttgctgggatcactaaaagccttgctacagaaatcacacttgtggggcttcatacccatgtgacccataaagtggacatgaagtttggaaggagagataaaagcttgggggcacattgagcacttccacttcctttctttgctgtgacttggcccatggctgccgctatgtccctgggtaggaagatggttatggatgtggctggtcagatgggctttgaactctgtgtaagaattgcactccttgccacagttacagagatgcacatctgggtgttcaggaacaccaatctgttgagcataatctcggctataataaaaaagcagttcattttcaggagggatatcttgtgaggtgcagaaaaagatttttccatcatgaggataagccaccaaattctgctcttcccggttcctggctttgcgcacaaacatcatccaattacattcattttcatcagttgtaatgatgcagaattctaggacaccattgtggtatatcttccagatatggttaactgccttgtctgtccattctgctacttccatggagtgactctgctggccaattagaggtccaaagcaagtccgcacaggaatggtttctccagtccatacaccaacttctgctcccacaattgactgacggagaacaagctgctttgggagagaaagccttgctctgctctctattggagtgtcaggaacaaaagtcactggtccatgttcgggacagtccgagggataggcgcggtcacacagagtacaccaaattgtaaacaaggttgccatgttctccttgtttgaattggagtcttccatttgcagtgaaggtgatacaaaagaaagactgtctgaagatacatctacatgacctgtccccatagcaacctcctgggtgatggaggagacagccacaggttctaggctgaggccaacttcatggagggaaacagattcccaa

SEQ ID NO: 186907 - DNA, 1545 bp, Homo Sapiens
ttggattggatttttccaagagaaagtttgtaaaattccttacactgtagatgtggatcagatacgatgattcagtagaagagcacatgtcaggggcagtggaggctggctgctgaaggatgaacggagaggaagaattctttgatgccgtcacaggctttgattctgataactcttctggggaattttcagaggcaaatcagaaagtcacgggaatgattgacttagacaccagcaaaaataataggattgggaaaactggggagaggccctctcaagagaacggaattcagaaacacaggacatcgctgccggctcccatgttcagcagaagcgacttcagcgtgtggaccatcctgaagaagtgtgttggcctggagctgtccaagatcacgatgccaatcgccttcaacgagcctctgagcttcttgcagcggatcacggagtacatggagcacgtgtacctcatccacagggcctcctgccagccccagcccctggagaggatgcagtctgtggctgcttttgctgtttcggctgtggcttcccagtgggagaggaccggcaaaccatttaatccactcttgggagaaacgtatgaattaatcagggaagatttaggattcagatttatatcggaacaggtcagtcaccacccccccatcagtgcgttccactcggaaggtctcaaccatgacttcctgttccatggctccatctaccccaagctcaagttctggggcaaaagcgtggaggcggagccccgaggcaccatcaccctggagctgctcaaacataatgaagcctacacctggaccaaccccacctgctgcgtccacaacgtcatcatcgggaagctgtggatagagcagtatgggacagtggagattttaaaccacaggtgacagcaccccaccgttgggtgagagcgcgaggctccgggtggggatgggcgagccggggagcgtgagcatccgtgctcctggtgggttttagctcagcctcacgagctgctgccgtgtccccgccagcccaggcatagcagctgcctagacttgactctgaccggtgttggccatgaatgctcctcgttcaagacctcgtttttcgtcacggttgttactttaaggctttgagctatgctgaagagctgtgtcattgccaggtgcagcgcagtggccgtccacggccgttggccactgtctaggcttgaatgccctattcctggaagctcatgactggtgggctttgccttttcaccactttagtgaggtataatcgatgcatcataagactcgcccattctgaatggacacttaagtgatttttagtaaattgaccgaatcatggagccgtccccacagcccatttcaaacacttccatcgccccaaaggcccaccacacccatttgcagtcaccccccgcctgccccaagggcctccaccgcgcttctcctgttacagagttaccctttccggctgtttgctgtcttgcagcagaaacctgtgtttgtttttctcacagaactggacataagtgtgtgc

SEQ ID NO: 186908 - DNA, 1110 bp, Homo Sapiens
ttggggtgtttgaggcgtatgggtggctgttggtgtggggaggcatctgtgtatggctgttgggaacagcaaccaaaaggtgctttttggttttatttgagatgaagattgtgtttccgcttaattactagtttgtggtctatatcatagaagttatttcccaccccattttatcttgacaaccgtgtttgcatttctgtaaaacttctacaacttctgggtcagaactgtccagaagatggtactgttaactgttatttcctttgatgttttgattttgaagtttagctctcatgcaaatgtttcaggcgtacatacataggcagaaagcaatttttaggtgatttgtctgtttcttggatgaaatataaagcaagctttaatgttctgacttgttcatttgaaatacaaaaaagtaagtgaattttaatgttttgcattaactaaagaaatctgaagattaatgttgaggaaattgtatggacatgcctttgtgaaaccaggaagtattttaagttaaaaatgaaaaaggttttaattgctttgtgtgtgttttaatggagccccattttagaattattttttccgtctccctttaccaacaaaaggaacaatgccaccgtgaatggaatagtttggggaaagctttgccaaacacaaccctgatttcagagcaggaacatggtttggatagatcttcagttccgcttgaattattctgttactgcgctgtcattttcagaagatttccattcctttgcagatgctgttgggagttcgggattatgttcatttcttctgttttaatggcattcagtactaattttataagtgcatcttgtgtgaatctcaataaattcagttttgtaatcttttttaaaaaggtcactgaatttattttaatatttactattgtatttggtagagtgaatttcccactgtataataagtatttatttgtaattcacaagtgatagagctatcttaatttgaattattgctttggtcttaatggtggcaaaatgtttaattttgtctttggaaaaaataggctcggccttgattatagaccatttaatatttctcagcaaatgaaggtatttgcatttt

SEQ ID NO: 186909 - DNA, 1274 bp, Homo Sapiens
ttggggacaccagcgatgacaactacggagagcgcagtgaggccaagcgcagcagcatgatcgagacgggccagggggctgagggtggcctctcactgcgtgtgcagaactcgctgcggcgccggacgcacagcgagggcagcctgctgcaggagccccgagggccctgctttgcctccgacaccaccttgcactgctcagacggtgagggcgccgcctccacctggggcatgccttcgcccagcaccctcaagaaagagctgggccgcaatggtggctccatgcaccacctttccctcttcttcacaggacacaggaagatgagcggggctgacaccgttggggatgatgacgaagcctcccggaagagaaagagcaaaaacctagccaaggacatgaagaacaagctggggatcttcagacggcggaatgagtcccctggagcccctcccgcgggcaaggcagacaaaatgatgaagtcattcaagcccacctcagaggaagccctcaagtggggcgagtccttggagaagctgctggttcacaaatacgggttagcagtgttccaagccttccttcgcactgagttcagtgaggagaatctggagttctggttggcttgtgaggacttcaagaaggtcaagtcacagtccaagatggcatccaaggccaagaagatctttgctgaatacatcgcgatccaggcatgcaaggaggtcaacctggactcctacacgcgggagcacaccaaggacaacctgcagagcgtcacgcggggctgcttcgacctggcacagaagcgcatcttcgggctcatggaaaaggactcgtaccctcgctttctccgttctgacctctacctggaccttattaaccagaagaagatgagtcccccgctttaggggccactggagtcgagctcagcgttcacaccaggcgggctgggtcccctgcccacctgcctccctgccccctgtgacggagggggcaagcaagcccccagaggccgtgtctctggacagacggatagacatacggaagcgaggcctggaccaagagaggcccaggctactggaggagtagaaggatgggccccgtggggtccccactgccccggtacgagggggcccaagaccctggcaggtcagggggccctggccaagccagatctggagctgctgctccctgctgcggagaccgcgggaggcttcgcgttgaccaagttcccttaaagaactggctgatgggggcaggaggtcaaggccctgggctct

SEQ ID NO: 186910 - DNA, 947 bp, Homo Sapiens
ccccagcctggaggggattttctttctttcctggattattgtatctgtgtactgattcaacactcggcttaacttctggaagcggtagccttgagggctgagtttgaaaattatgtcactgtgatacaacaaactgtacaagcggtgaaatatgattttgctgagttcaaatatggcttttgcataaggatcatgggtgctgtttgtctggcagttggtctccttgctgaaagcgcatttcatgattatatccagagacatcgagttgatgtgctcatagacctccacgcttgtgtcctgagtgctgcaaatcttctcccacttatccagcatcattttcacagaatgagccatcacctcaatgtatgctttcaggatgttaaaatggaatccaggagttagtaggcgacgatgctggaaccacttgggtccgtctagagccgctagtccttttccaagaagtggaggtgagaatttctgcaggtactgggacttgggatctgttctgctcagaagtgtctttgcatagtctgggtcatagatacagaaaaatgcctgaaagggcccaatccagaaagggaaggcacgagggtatttttcaataatttcctcaagcttctccatgttatcatcctgaataaacttctggtgcccaaggaaccagtgggtggggggcgctgggaaggggcgcaggtcccgcagcagccgctgcctccgcaggtacagcttaatggcctgcagcagccccagggccaggcagaacacgaacgccaggtaaaagggccgcgcccagcgcgtctccagccaggagaattccatggctctgcgcagcgccgaacgccggcggtttcctggggcgcgggagagggtgggctttctcccgcccggagctggcgtagggtcgcccaccccaccgcctctctgggccctcgcgaagcttctgccaa

SEQ ID NO: 186911 - DNA, 1231 bp, Homo Sapiens
  misc_feature (189)..(209): n is a, c, g, or t
ttggcctttatcatatttgagaacatttatgtaaattatctttaatatttaatcactatgttttaatcatacagctctcacgatatccagaaagcatgttaacagcaactatacctgagtgcattcagttcttaagagatgtgtctgaaatatataatactctatttttctttctgttaagcagtgccnnnnnnnnnnnnnnnnnnnnnaggtattaataggggaccctattaccacatgtctttctccctcagtgtatgatataatttgtaatcttgggtttcaactcagagaaaattgtgatatcaatagcattgtaactcagaatggtgaagtatgctggaaaacaatcacagactgtgtgagctacacagagtcagagcagggtctggattactggggaagcgtgaggctgctgggccctgtgtgtgaggctgtccattcacatttcttatctctgaccaaggggcaatttgaaattcgatatgcaccgtggttccagtggacaagttttccagagttatttcctgaaatatttgatgccttggaaagtctacaatctcctgctatttctcttagcttaatgaaactgacatcgtgtctagaacgagccttgggtgatgtatttttactgattgggaaggaatgcccctttcttttaagagatctgctttcatctgaggagcttgctcaagtcttcagtcagtctgtgatgaatgtgctaaaagtcttcgttggctctccgtgtggtctcaacctgcgtaacgtcttatggcatgggtttgcgtcacctgaagaaattcctccaaaatactgttcaatgatgatactgttgacggcaggattgggtcagttactgaagagttaccttcaaaacactaaacttacattggcacatcgctctttcatatctcttacaaacctcgaggatttgattgtttttcctgatgttacttatgaggtgctttcagtattagaagaagtgatgatgaaatctgcttttatattaaaaatcatgttaccatattgggaagttgcactggtcaagttcaagtcacacaggtttgctgactgcgccatattgttgctgacacaactggagactggacttaggaatgtttttgccacacttaacagatgtccaaaaagactcctgactgctgagtcacagctctttataccacctttgatcaaatattggcaaaacacttgaatgatggtaaaatcaatc

SEQ ID NO: 186912 - DNA, 1806 bp, Homo Sapiens
ttggagaaaatgtttacttattcactgaaaataaaatatggcagttgaaatctctcgaggtttgaatttcaataaataatattgttgctttgagaagtagtttcagagtgtacatcctaatatgtgttttattgtaaatagttatttcctgaaatatttgatgccttggaaagtctacaatctcctgctatttctcttagcttaatgaaactgacatcgtgtctagaacgagccttgggtgatgtaagtgtgagaactctttcattattggcccattaaattatctgaatgaacatgaaactattttacagttgtcctcagttttcttgattattttcctataagataaaatcatttagtatgaatttttaatatttcccttttgaatgattatgaaatcaaaggattggtgtctaagtacttttcacccttcatttgtacaaacagttgcttcatggataatgtttttaatgtttattggctcataatacaactgttacacaatttttgtttgaattttaggtatttttactgattgggaaggaatgcccctttcttttaagagatctgctttcatctgaggagcttgctcaagtcttcagtcagtctgtgatgaatatgctaaaagtcttcgttggctctccgtgtggtctcaacctgcgtaacgtcttatggcatgggtttgcgtcacctgaagaaattcctccaaaatactgttcaatgatgatactgttgacggcaggattgggtcagttactgaagagttaccttcaaaacactaaacttacattggcacatcgctctttcatatctcttacaaacctcgaggatttgattgtttttcctgatgttacttatgaggtgctttcagtattagaagaagtgatgatgaaatctgcttttatattaaaaatcatgttaccatattgggaagttgcactggtcaagttcaagtcacacaggtttgctgactgcgccatattgttgctgacacaactggagactggacttaggaatgtttttgccacacttaacagatgtccaaaaagactcctgactgctgagtcaacagctctttataccacctttgatcaaatattggcaaaacacttgaatgatggtaaaatcaatcagcttcctcttttccttggagagcctgctatggaatttctctgggatttcctgaaccatcaggagggtccccgcataagagatcatttaagccacggggagatcaacttacatgaattttcaaaagaaacaactaatcagttgcttgcattttctcttgtactgctactcagattcgttgatgactgtctgctatcagtttttaaggaaaaatcagccgtagaattgttgattagtcttgcagaaggctatagttctcgctgtcatccggtttttcagcttaaaaaacaggtgctgagctgtgaggagagcatcagggtttgggctctgctgcctttccccgaagaactcactcggcaagccgtcagattagaagataattctgaaacaaatgcctgccactctttgattacaaaaatgacggatgagctgtatcaccatatgcctgagaatcgttgtgtgttaaaggacttggatcgtcttcctactgagacgtggccccagcttctccgtgagctctgcagcacacctgttcccaccctgttctgccccaggattgtgctggaagtgctggttgtgctccgaaacatcagcgaacagtgccgccgtgtgtccagccaggtcaccgttgcctcagagctgagacacaggcagtgggtggaaaggacgctgcgg

SEQ ID NO: 186913 - DNA, 1460 bp, Homo Sapiens
  misc_feature (1082)..(1166): n is a, c, g, or t
ttggcctggtcttgtgggcagactgctgatcgagttcacctcacccatgcccctggagcgggtgcagagggagaacccaggcgtgctcatgggcggccgatacacaccgcccgactgcaccccagcccagacggtggcggtcatcatcccctttagacaccgggaacaccacctgcgctactggctccactatctacaccccatcttgaggcggcagcggctgcgctacggcgtctatgtcatcaaccagcatggtgaggacaccttcaaccgggccaagctgcttaacgtgggcttcctagaggcgctgaaggaggatgccgcctatgactgcttcatcttcagcgatgtggacctggtccccatggatgaccgcaacctataccgctgcggcgaccaaccccgccactttgccattgccatggacaagtttggcttccggcttccctatgctggctactttggaggtgtgtcaggcctgagtaaggctcagtttctgagaatcaatggcttccccaatgagtactggggctggggtggcgaggatgatgacatcttcaaccggatctccctgactgggatgaagatctcacgcccagacatccgaatcggccgctaccgcatgatcaagcacgaccgcgacaagcataacgaacctaaccctcagaggtttaccaagattcaaaacacgaagctgaccatgaagcgggacggcattgggtcagtgcggtaccaggtcttggaggtgtctcggcaaccactcttcaccaatatcacagtggacattgggcggcctccgtcgtggccccctcggggctgacactaatggacagaggctctcggtgccgaagattgcctgccagaggactgaccacagcctggctggcagctgctctgtggaggacctccaggactgagactgggctctgttttccaagggtcttcactaggccccctagctacacctggaagtttcagaacccactttggggggcctcctgcctgggcaggctcttcaagtgtggccctctttggagtcaaccctccttcccgaccccctccccctagcccagccccagtcnnnnnnnnnnnnnnnnnnnnnnnnnnnnnnnnnnnnnnnnnnnnnnnnnnnnnnnnnnnnnnnnnnnnnnnnnnnnnnnnnnnnncccttgagtcccctagggcctggaagggtgggaggtatgtctagggggcagtgtctcttccagggggaattctcagctcttgggaacccccttgctcccaggggaggggaaacctttttcattcaacattgtagggggcaagctttggtgcgccccctgctgaggagcagccccaggaggggaccagaggggatgctgtgtcgctgcctgggatcttggggttggcctttgcatgggaggcaggtggggcttggatcactaagtctggttcccgcctccctgtctgaaacagga

SEQ ID NO: 186914 - DNA, 2060 bp, Homo Sapiens
ttggggcggcggctatgccgcttgctctgctcgtcctgttgctcctggggcccggcggctggtgccttgcagaacccccacgcgacagcctgcgggaggaacttgtcatcaccccgctgccttccggggacgtagccgccacattccagttccgcacgcgctgggattcggagcttcagcgggaaggagtgtcccattacaggctctttcccaaagccctggggcagctgatctccaagtattctctacgggagctgcacctgtcattcacacaaggcttttggaggacccgatactgggggccacccttcctgcaggccccatcaggtgcagagctgtgggtctggttccaagacactgtcactgatgtggataaatcttggaaggagctcagtaatgtcctctcagggatcttctgcgcctctctcaacttcatcgactccaccaacacagtcactcccactgcctccttcaaacccctgggtctggccaatgacactgaccactactttctgcgctatgctgtgctgccgcgggaggtggtctgcaccgaaaacctcaccccctggaagaagctcttgccctgtagttccaaggcaggcctctctgtgctgctgaaggcagatcgcttgttccacaccagctaccactcccaggcagtgcatatccgccctgtttgcagaaatgcacgctgtactagcatctcctgggagctgaggcagaccctgtcagttgtatttgatgccttcatcacggggcagggaaagaaagactggtccctcttccggatgttctcccgaaccctcacggagccctgccccctggcttcagagagccgagtctatgtggacatcaccacctacaaccaggacaacgagacattagaggtgcacccacccccgaccactacatatcaggacgtcatcctaggcactcggaagacctatgccatctatgacttgcttgacaccgccatgatcaacaactctcgaaacctcaacatccagctcaagtggaagagacccccagagaatgaggcccccccagtgcccttcctgcatgcccagcggtacgtgagtggctatgggctgcagaagggggagctgagcacactgctgtacaacacccacccataccgggccttcccggtgctgctgctggacaccgtaccctggtatctgcggctgtatgtgcacaccctcaccatcacctccaagggcaaggagaacaaaccaagttacatccactaccagcctgcccaggaccggctgcaaccccacctcctggagatgctgattcagctgccggccaactcagtcaccaaggtttccatccagtttgagcgggcgctgctgaagtggaccgagtacacgccagatcctaaccatggcttctatgtcagcccatctgtcctcagcgcccttgtgcccagcatggtagcagccaagccagtggactgggaagagagtcccctcttcaacagcctgttcccagtctctgatggctctaactactttgtgcggctctacacggagccgctgctggtgaacctgccgacaccggacttcagcatgccctacaacgtgatctgcctcacgtgcactgtggtggccgtgtgctacggctccttctacaatctcctcacccgaaccttccacatcgaggagccccgcacaggtggcctggccaagcggctggccaaccttatccggcgcgcccgaggtgtccccccactctgattcttgccctttccagcagctgcagctgccgtttctctctggggaggggagcccaagggctgtttctgccacttgctctcctcagagttggcttttgaaccaaagtgccctggaccaggtcagggcctacagctgtgttgtccagtacaggagccacgagccaaatgtggcatttgaatttgaattaacttagaaattcattccctcacctgtagtggccaccctctatattgaggtgctccaatcagcaaaagtgtccgcggctgctgtattggacaccacatataaagatttctcatcatccacagaaagggtcggctg

SEQ ID NO: 186915 - DNA, 2301 bp, Homo Sapiens
ttggaataatagctgtatttaaaggcttatatgcatttcttttgtttgccatgtttaaaataccttgtcaggatacttgtaattgaaaattataattttttctggttacctttccatttaacttttaatattttgatatattctaggaatgtctatattttaatttgctttatttctcttttagaattttgattcagctaaagttccatcagatgagtattgccctgcttgtagagagaagggaaagttaaaagccttaaagacttaccgaattagttttcaagaatctatctttttgtgtgaggatctgcagtgcatctatcctttgggctctaaatcacttaataacctaatttctcctgatttggaagaatgtcacactccacataagcctcagaaaaggaagagcttagaaagcagctataaggattcacttcttttagcaaattccaaaaagactagaaattatattgctattgacggtggaaaagttttgaacagcaaacataatggagaagtatatgacgaaacctcgtcaaacttacctgatagtagtggtcaacagaatccaattaggacagctgattccttggagcggaatgagattttggaagctgatactgttgacatggctactacaaaagatcctgctacagttgatgtctctggaactggcagaccttcccctcaaaatgaaggatgtacatctaaactggaaatgccactggagagcaaatgtacatcatttccccaggctttatgtgtccagtggaaaaatgcttatgctctctgttggttagactgtatcctgtcagctttggtgcactcggaagagttaaagaacaccgtgactggactgtgctcgaaggaggaatctatattctggcggttgcttacaaaatataatcaagcaaatacacttctatataccagtcaattgagtggtgttaaagatggagattgtaaaaaacttacctcagaaatatttgcagagatagagacctgtctgaatgaagttagagatgaaatttttattagccttcagccccagcttagatgcacattaggtgatatggaaagccctgtgtttgcatttcccctgctcttaaaactagaaacccacattgaaaagctcttcctatattctttttcttgggactttgaatgttcgcagtgtggacaccaatatcaaaacaggcatatgaagagtctggtcacctttacaaatgtcatccctgagtggcacccacttaatgctgcccattttggtccatgtaacaattgcaacagtaaatcacaaataagaaaaatggtattagaaaaagtatctcccatattcatgttgcactttgtagaaggcttaccacagaatgacttgcagcactatgcatttcattttgaaggctgtctttatcagataacttctgtaattcagtatcgagcaaataatcattttataacatggattttagatgctgatggaagttggctggaatgtgatgacttaaaaggcccatgttctgaaaggcacaagaaatttgaagttcctgcttcagagatacatattgttatttgggaaagaaaaatatcccaagtgacagataaagaagctgcctgccttccacttaaaaagactaatgaccaacacgctctcagtaatgagaaaccagtatctttaacatcgtgttctgtgggtgatgctgcctcagctgaaacagcctcagtaactcaccctaaagatatatcagttgcccctcgtactctttcacaggacacagctgtaactcatggagatcatttactttcaggtccaaaaggtttggttgacaatattttacctctgacacttgaagaaactatccagaaaacagcctcagtttcacagttaaattctgaagctttcctgttagaaaataaacctgtagcaaaaatacaggaattctcaaaaccaatactttgctatcacaagaatcactaatggcttcttcagtatcagctccatgtaatgaaaagcttattcaagaccaatttgtggacataagttttccatcccaagttgtaaatacaaacatgcagtcagtacagctgaatacagaagatactgtaaatactaaatctgtgaataatactgatgctactggtcttatacagggagtgaagtcagtagaaattgagaaggacgctcagttaaaacaattccttacaccaaaaactgaacaattaaaaccagaacgtgtcacatctcagtatctaatttgaagaaaaagaaactacagcagattctcaaaccacaacatctaa

SEQ ID NO: 186916 - DNA, 1206 bp, Homo Sapiens
ttggatttagtctgagatgcctacatagaagagtgacagcagctagactaaatgtttaactgctgaactagttcctcaggtatcctggctctagagattgctatgggagattggatgactgttacagatccaggtctgtcttcagaaagcaaaactatctctcaatatacctcagaaacaaagatgtctccatcaagtttatactcacagcaagtgctatgttcttcaatacctttatcgaaaaatgtgcacagttttttcagtgccttctgcacagaagataatattgaacagagtatctcatatcttgatcaggaattgactacttttggttttccttcattatatgaagaatccaaaggtaaagagacaaagagagagttaaatatagtagctgtactaaattgtatgaatgagctgcttgtgcttcagcggaagaaccttctagctcaggaaaatgtggagacacagaatttgaagctgggaagtgatatggaccatctacagagctgctactcaaaacttaaggaacaactggaaacctccaggagggaaatgattgggcttcaggaaagagacagacagttacaatgtaagaacaggaatttgcatcagctactaaagaatgagaaagatgaggtgcaaaaattacaaaatatcattgcaagtcgagctactcagtataatcatgatatgaagagaaaagagcgtgaatataataaactgaaggaacgtctacatcaacttgttatgaacaagaaagataagaaaatagctatggacattttgaattatgtcgggagagctgatggaaaaagaggctcctggaggactggtaaaactgaagccaggaatgaagatgaaatgtataaaattctcttgaatgattatgaatatcgtcagaaacaaatcctaatggaaaatgcagaacttaagaaggttcttcaacaaatgaaaaaggaaatgatttctcttctttctctccaaaagaagaaacctagagaaagagtagatgatagtacaggaactgttatttccgatgttgaagaagatgccggggaactaagcagagagagtatgtgggacctttcctgtgaaactgtgagagagcagcttacaaacagcatcagaaaacagtggagaattttgaaaagtcatgtagaaaagcttgataaccaagtttcaaaggtacacctggaaggtttt

SEQ ID NO: 186917 - DNA, 2071 bp, Homo Sapiens
  misc_feature (926)..(981): n is a, c, g, or t
ttgggaaaacacacaggcaagagtattgcatgctgaacaagagaaggccaaggtgacagaggagttagcagcggccactgcacaggtctctcatctgcagctgaaaatgactgctcaccaaaaaaaggaaacagagctgcagatgcagctgacagaaagcctgaaggagacagatcttctcaggggccagctcaccaaagtgcaggcaaagctctcagagctccaagaaacctctgagcaagcacagtccaaattcaaaagtgaaaagcagaaccggaaacaactggaactcaaggtgacatccctggaggaggaactgactgaccttcgagttgagaaggagtccttggaaaagaacctctcagaaaggaaaaagaagtcagctcaagagcgttctcaggccgaggaggagatagatgaaattcgcaagtcataccaggaggaattggacaaacttcgacagctcttgaaaaagactcgagtgtccacagaccaagcagctgcagagcagctgtctttagtacaggctgagctacagacccagtgggaagcaaaatgtgaacatttgttggcctccgccaaggatgagcacctgcagcagtaccaggaggtgtgcgcacagagagatgcctaccagcagaagctggtacaacttcaggaaaagtgtttagccctccaggcccaaatcacagctctcaccaagcaaaatgaacagcacatcaaggaactagagaagaacaagtcccagatgtctggggttgaagctgctgcatctgacccctcagagaaggtcaagaagatcatgaaccaggtgttccagtccttacggagagagtttgagctggaggaatcttacaatggcaggaccattctgggaaccatcatgaatacgatcaagatggtgactcttcagctgttaaaccaannnnnnnnnnnnnnnnnnnnnnnnnnnnnnnnnnnnnnnnnnnnnnnnnnnnnnnngcggccacgaagaccttcccaggagcagtcagcctcagccagttctgggcagcctcaagcacccctgaatagggagaggccagagtcccccatggtgccctcagagcaggtggtcgaggaagctgtcccgttgcctcctcaggccctcaccacttcccaggatggacacagaaggaaaggggactcagaagctgaggcactctcagagataaaagatggttcccttccacccgaactgtcttgcatcccatcccacagagttctagggcccccgacttcaattccacctgagcccctaggccctgtatccatggactctgagtgtgaggagtcacttgctgccagcccaatggcagctaagcccgacaacccatcaggaaaggtctgtgtcagggaagtagcaccagatggcccactacaagaaagctccacaagattgtccctgacttcagaccccgaggagggggacccactggccttagggcctgaaagcccaggagagcctcagcctccacagctcaagaaagatgatgtcactagctccaccggtccccacaaggagctgtcaagcacagaggcaggttccacagttgcaggagcagccctcagacccagccatcattcccagcgttccagtctctctggggatgaagaggatgaactgtttaaaggggcaactctgaaagctctgaggcccaaagcacagcctgaggaggaggatgaagacgaggtgagcatgaagggacgcccgcccccaacgcccctttttggagatgatgatgatgacgatgacattgactggctgggatgaagacccaggaaactggtgcaaaggtttctctgcaacccttccctaagcatgattttgcacagccaaccctgggtctaggcgagccacagggtgaggtcaaggtgagcattctgggaacaatatttgggctcagagggtgggttggccaccttctgagccccacccccgccagacctggtgaagaggatcataaccctgtcttcaagaacactgggatttctagcagcaagttggaagaaaagactgggtaggttcccttcccagcccagtcacctgtaa

SEQ ID NO: 186918 - DNA, 866 bp, Homo Sapiens
ttggggaaaactgaggcctgggagcaggaacctgtaggcagcgcttgagggtagcgggatagcagctgcaagcgcgcgtgggaggcgggggctctgggcggaacaaaaatcacaggatgtcagaggatgtttcccgggaagaactgggataaaggaagggtcccagcaccatggaggacccgaaccctgaagagaacatgaagcagcaggattcacccaaggagagaagtccccagagcccaggaggcaacatctgccacctgggggccccgaagtgcacccgctgcctcatcaccttcgcagattccaagttccaggagcgtcacatgaagcgggagcacccagcggacttcgtggcccagaagctgcagggggtcctcttcatctgcttcacctgcgcccgctccttcccctcctccaaagccctaatcacccaccagcgcagccacggtccagccgccaagcccaccctgccggttgcaaccactactgcccagcccaccttcccttgtcctgactgtggcaagacctttgggcaggctgtttctctgaggcggcaccgccagatgcatgaggtccgtgcccctcctggcaccttcgcctgcacagagtgcggtcaggactttgctcaggaagcagggctgcatcaacactacattcggcatgcccggggggagctctgagtgcagcttaagcctctccacggtgacgggtggctctgtggctggtaggactcacccatgatatggggtgcaggaactctgggggccctgaaggatttgcttccctcccctggggaaggcaaagggctctaataaagaaggacccagaagattcttatttagagcttcgttctttgggagcac

SEQ ID NO: 186919 - DNA, 413 bp, Homo Sapiens
ttggcgttccttgctgacctcccctgctcctccttcagttgctgcttctgggcttctgctgtcttcaccatctccttggtcttttcttgcttcatggtaccccttctccctctgtcctttgtcctcatcctctctgactccctcagcctcttgtttctgtacaacttcccatttctcctcagcaacttgatcttcctgggccccttgctctaggtcccttccagcttctacctgggcttcctctctttgttcatcctcttctctctcaatttctttttccttctcatctgtatactcatctcctcctggttcctccacacctttagcctccatactgtcagccttcttctgacctttggacttctcttccttggcctctgtctcttccctactcccttctctcaatctgccaa

SEQ ID NO: 186920 - DNA, 1103 bp, Homo Sapiens
  misc_feature (154)..(216): n is a, c, g, or t
  misc_feature (561)..(569): n is a, c, g, or t
  misc_feature (583)..(653): n is a, c, g, or t
  misc_feature (700)..(716): n is a, c, g, or t
ttggaggatggattctgaaatataaattctaaattatatttgttataactatattttatattgtatgttatcaggagccatcagagaatgacctttttgtgtttggaacacttggttccatgaaaagtatgctttgtgttttaactgttaaaannnnnnnnnnnnnnnnnnnnnnnnnnnnnnnnnnnnnnnnnnnnnnnnnnnnnnnnnnnnnnntcacaatttcaacatgtcaaacctatgaagggagataggaaacaatgagaaacttacttttgctcctttatacagaattattaactatattttactaactaaaaaactctagtattctttacctaaagtcaattggctggtaagagggagagatgcaaaattctccagctctgaacttggagctacttcacactctactcttaatggaaacttgaactaatgatagatagtatttttttcctctatttaaaatttttgtcttgattaggagatttttcagttctccatataataattttctacaatcagatctatgctgtggcatattttgctttatttaaaaannnnnnnnnagagatgagttctnnnnnnnnnnnnnnnnnnnnnnnnnnnnnnnnnnnnnnnnnnnnnnnnnnnnnnnnnnnnnnnnnnnnnnnaagtagctgggattacagacaggcatgtgctattacacctggctaannnnnnnnnnnnnnnnngtaaagatagggtctttctatgttgcccaggctcgtcttgagctcctggcctcaatcgatcttcctgccaaggttttggaattacaggtgtgagccaccatgcctggcctgctttgacatattttatagtgtgttaattacaaatagtcttcatatgccagaatataagagcaagtgttatctactttttagatgggaattgcagaagctgcatcaaaagtatgctttgaggtatatatagtgaaacagagcctttctgaagagaattatatcaaactaatacaaccacaaataatagtatgaagcggatgctgtttggaggacgggaaatttatcgggaaaattacaaatccctcctgattccctatccagagatagccattatta

SEQ ID NO: 186921 - DNA, 1645 bp, Homo Sapiens
ttggcacttccggtgtctgttgccaggcgcgggcccagtgggccgtaggggcgacattgttgccgtcgtctttccccccccagtcccggggatggagatgtcgggactcagcttttcagagatggagggctgccgtaacctacttggcctactggacaacgacgagatcatggccctatgcgacaccgtcaccaaccgcctggtgcagcctcaggaccgccaagatgctgttcatgcaatattagcatacagtcaaagtgcagaagaacttctgaggcgtagaaaagtccaccgagaagttatatttaagtacttggcaacacaggggattgttatacctccagctactgaaaaacacaatcttattcagcatgcaaaagattactggcaaaagcaaccacaactgaaattgaaggaaacgccagagccagttacaaagacagaggacatccacctatttcaacagcaggtgaaagaagataaaaaagctgaaaaagttgattttcgtcgcctaggagaagaattctgtcattggttctttggacttcttaattctcagaatccttttctaggaccacctcaagatgaatggggaccacagcacttctggcatgatgtgaagcttaggttttattacaacacatcagaacaaaatgttatggactaccatggagcagaaatcgtgagccttcgtttgctgtcactagtaaaagaagaatttctttttctcagccccaacctagattcacatggactgaaatgtgcatcttctcctcatgggctggttatggttggagttgctgggactgtccatcgaggaaacacttgtttgggcatttttgaacaaatttttggactcatccgctgcccttttgtggagaatacttggaaaatcaaatttatcaacctgaaaattatgggagagagttcccttgctcctggaacattaccgaaaccatctgttaaatttgaacaaagtgatctagaggccttttataatgtaatcactgtatgtggtaccaatgaagtacgacataatgtaaagcaggcttcggatagtggaactggggaccaagtttgaggtagtggaaatgagacattgctgaacaaaagagaactgggtttacctgaccctctaaagcgctaagtactgtcagcctgaaaaaaatcttctatacagaaactcttccaaatactatatcagtaatgtctgaatgatttcagatgtgaaaattgacatattttagttgaaatacctttctggactacagacttacatatcatgtgaatacttacctatttctacccgagttgcagcaagtattctgaaagcttaatgcaaataaatcccactttagatcttacagctaactgtgtgccttagaaaccaggtaatattttccttttacttagtgaatattctgctaatatctgcacttttcatgtgggaaaggattaataatggtccaggcttcccctctttaagtttcatgtttacttttgtctaaactctggataattgtattttacaaatgcatctcactgtagtatatttttaaaactattaaatattttagagatgtttaacgtaaactcaaagttctcattttagaaaattaaataacattctttttggcaaaaaagt

SEQ ID NO: 186922 - DNA, 1465 bp, Homo Sapiens
ttggcactcagtcgcgggaggcttccccgcgccggccgcgtcccgcccgctccccggcaccagaagttcctctgcgcgtccgacggcgacatgggcgtccccacggccctggaggccggcagctggcgctggggatccctgctcttcgctctcttcctggctgcgtccctaggtccggtggcagccttcaaggtcgccacgccgtattccctgtatgtctgtcccgaggggcagaacgtcaccctcacctgcaggctcttgggccctgtggacaaagggcacgatgtgaccttctacaagacgtggtaccgcagctcgaggggcgaggtgcagacctgctcagagcgccggcccatccgcaacctcacgttccaggaccttcacctgcaccatggaggccaccaggctgccaacaccagccacgacctggctcagcgccacgggctggagtcggcctccgaccaccatggcaacttctccatcaccatgcgcaacctgaccctgctggatagcggcctctactgctgcctggtggtggagatcaggcaccaccactcggagcacagggtccatggtgccatggaactgcaggtgcagacaggcaaagatgcaccatccaactgtgtggtgtacccatcctcctcccaggagagtgaaaacatcacggctgcagccctggctacgggtgcctgcatcgtaggaatcctctgcctccccctcatcctgctcctggtctacaagcaaaggcaggcagcctccaaccgccgtgcccaggagctggtgcggatggacagcaacattcaagggattgaaaaccccggctttgaagcctcaccacctgcccaggggatacccgaggccaaagtcaggcaccccctgtcctatgtggcccagcggcagccttctgagtctgggcggcatctgctttcggagcccagcacccccctgtctcctccaggccccggagacgtcttcttcccatccctggaccctgttcctgactctccaaactttgaggtcatctagcccagctgggggacagtgggctgttgtggctgggtctggggcaggtgcatttgagccagggctggctctgtgagtggcctccttggcctcggccctggttccctccctcctgctctgggctcagatactgtgacatcccagaagcccagcccctcaacccctctggatgctacatggggatgctggacggctcagcccctgttccaaggattttggggtgctgagattctcccctagagacctgaaattcaccagctaccgatgccaaatgacttacatcttaagaagtctcagaacgtccagcccttcagcagctctccgttctgagacatgagccttgggatgtggcagcatccgtcggacaagatggacactgggcccaccttccaaggcaccagacacagggcacgggggagagacttctccccgtggccgcctt

SEQ ID NO: 186923 - DNA, 1693 bp, Homo Sapiens
  misc_feature (1296)..(1321): n is a, c, g, or t
ttggcatgtctgtatactcctgtcacctagaacgtgcatccttgtaatacctgattgatcacacagtgttagtgctggtcagagagacctcatcctgctcttttgtgatgaacatattcatgaaatgtggaagtcagtacgatcaagttgttgactgtgattagatcacatcttaaattcatttctagactcaaaacctggagatgcagctactggaatggtgttttgtcagacttccaaatcctggaaggacacagtgatgaatgtactatgtctgaacatagaaactcgggcttgagtgagaagagcttgcacagccaacgagacacattgccttctggagctgggagacaaaggaggaatttactttcttcaccaagtgcaatagattactgatgtgatattctgttgctttacagttacagttgatgtttggggatcgatgtgctcagccaaatttcctgtttgaaatatcatgttaaattagaatgaatttatctttaccaaaaaccatgttgcgttcaaagaggtgaacattaaaatatagagacaggacagaatgtgttcttttctcctttaccagtcctatttttcaatgggaagactcaggagtctgccacttgtcaaagaaggtgctgatcctaagaatttttcattctcagaattcggtgtgctgccaacttgatgttccacctgccacaaaccaccaggactgaaagaagaaaacagtacagaaggcaaagtttacagatgtttttaattctagtattttatctggaacaacttgtagcagctatatatttccccttggtcccaagcctgatactttagccatcataactcactaacagggagaagtagctagtagcaatgtgccttgattgattagataaagatttctagtaggcagcaaaagaccaaatctcagttgtttgcttcttgccatcactggtccaggtcttcagtttccgaatctctttcccttcccctgtggtctattgtcgctatgtgacttgcgcttaatccaatattttgccttttttctatatcaaaaaacctttacagttagcagggatgttccttaccaaggatttttagccccaaatctctcatattcgctagtgtttaaaaggctaagaatagtggggcccagccgatgtggtaggtgataaagaggcatcttttctagagacacattggaccagatgaggatccgaaacggcagcctttacgttcatcacctgctagaacctctcgtagtccatcaccatttcttggcattggaattctactggnnnnnnnnnnnnnnnnnnnnnnnnnnccctcagcactgttacaagaggccatttaagtatcttgtgcttcttcacttacccattagccaggttctcattaggttttgcttgggcctccctggcactgaaccttaggctttgtatgacagtgaagcagcactgtgagtggttcaagcacactggaatataaaacagtcatggcctgagatgcaggtgatgccattacagaaccaaatcgtggcacgtattgctgtgtctcctctcagagtgacagtcataaatactgtcaaacaataaatggagaatggtgctgtttaagtcacatcccctgtaaattgcaaattcaaaagtgattatctctttgatctacttgcctcattttccctatcttctccccc

SEQ ID NO: 186924 - DNA, 1190 bp, Homo Sapiens
ttggggcagacgaggccggcttctccgcggacagctagggagagtgtcctgggtgtcagccagaacatgtctttcaacctgcaatcatcaaagaaactgttcattttcttaggaaaatcactgtttagtcttctggaggctatgatttttgccttactcccaaagccacggaagaacgttgctggtgaaatagtcctcatcacaggtgctggaagtggactcggaaggctcttagccttgcagtttgcccggctgggatctgttcttgttctctgggatatcaataaggaggggaatgaggaaacatgtaagatggctcgggaagctggagccacaagagtgcacgcctatacctgcgattgcagccaaaaggaaggagtgtatagagtagccgaccaggttaaaaaagaagtcggcgatgtttccatcctaatcaacaatgccggaatcgtaacaggcaaaaagttccttgactgtccagatgagcttatggaaaagtcatttgatgtgaatttcaaagcacatttatggacttataaagcctttctacctgctatgattgctaatgaccatggacatttggtttgcatttcaagttcagctggattaagtggagtaaatgggctggcagattactgtgcaagtaaatttgcagcctttgggtttgctgaatctgtatttgtagaaacatttgtccaaaaacaaaaggggatcaaaaccacgattgtgtgcccctttttttataaaaactggaatgtttgaaggttgtactacaggctgtccttctctgttgccaattctggaaccaaaatatgcagttgaaaaaatagtagaagctattctacaagaaaaaatgtacttgtatatgccaaagttgttatacttcatgatgtttcttaaaagctttttgcccctcaagacaggactgcttatagctgactatttgggcatccttcatgcaatggatggctttgttgaccaaaaagaagaagctctaaagaccaactctatggctaaatcatctgatacacagtgttacataatgcgtacttcaatgaagaaaagtatttttgtctgacagtggaatatatctggagaccacaagtaccactcctattctgttatctggactagaattttcaatcaatgtgtttgaaataatgtgctatcacctatttggttgagtttgg

SEQ ID NO: 186925 - DNA, 1344 bp, Homo Sapiens
ttggggaggcactttggaagaatgactctggagtccatcatggcgtgctgcctgagcgaggaggccaaggaagcccggcggatcaacgacgagatcgagcggcagctccgcagggacaagcgggacgcccgccgggagctcaagctgctgctgctcgggacaggagagagtggcaagagtacgtttatcaagcagatgagaatcatccatgggtcaggatactctgatgaagataaaaggggcttcaccaagctggtgtatcagaacatcttcacggccatgcaggccatgatcagagccatggacacactcaagatcccatacaagtatgagcacaataaggctcatgcacaattagttcgagaagttgatgtggagaaggtgtctgcttttgagaatccatatgtagatgcaataaagagtttatggaatgatcctggaatccaggaatgctatgatagacgacgagaatatcaattatctgactctaccaaatactatcttaatgacttggaccgcgtagctgaccctgcctacctgcctacgcaacaagatgtgcttagagttcgagtccccaccacagggatcatcgaatacccctttgacttacaaagtgtcattttcagaatggtcgatgtagggggccaaaggtcagagagaagaaaatggatacactgctttgaaaatgtcacctctatcatgtttctagtagcgcttagtgaatatgatcaagttctcgtggagtcagacaatgagaaccgaatggaggaaagcaaggctctctttagaacaattatcacatacccctggttccagaactcctcggttattctgttcttaaacaagaaagatcttctagaggagaaaatcatgtattcccatctagtcgactacttcccagaatatgatggaccccagagagatgcccaggcagcccgagaattcattctgaagatgttcgtggacctgaacccagacagtgacaaaattatctactcccacttcacgtgcgccacagacaccgagaatatccgctttgtctttgctgccgtcaaggacaccatcctccagttgaacctgaaggagtacaatctggtctaattgtgcctcctagacacccgccctgctcttccctggtgggctattgaagatacacaagagggactgtatttctgtggaaaacaatttgcataatactaatttattgccgtcctggactctgtgtgagcgtgtccacagagtttgtagtaaatattatgattttatttaaactattcagaggaaaaacagaggatgctgaagtacagtcccagcacatttcctctctatctttttttaggcaaa

SEQ ID NO: 186926 - DNA, 1206 bp, Homo Sapiens
  misc_feature (380)..(401): n is a, c, g, or t
ttcttggtgaaagcacccattctgggcctcctctccacagagttcaccccagttcagagtcagtgtgcatgtatgattgcatgtgtatgaattgtgtatgaatatgtatgtgtgtgtgcacgtatgtataggtaggtctgtctgtatgtgggtgtgtatgtgtaacttttcatggctgccacacactagcatctcccttaacattatgacgaagtgattattcagtctcttcaaaggccactttggaacagacaatgctttataaaactaaggtctgggaaggcagaagaatggccactgagttgcggatgattctatcgcaagtatccttcactggcttaaaggtatctcttgtttttgggtatatgttttcggccagnnnnnnnnnnnnnnnnnnnnnncacggttcctgtttttcaaagacactggactcccaaagaggaggatctgaccacggagactctggggccttgattgccaaatgctccgtggtgtttggactggcctttaaaccatgtgcacggacatctgggaggaggagcctggaactgccccatactgccggccatcacaagtgttggttgcctgttggttattgggtgaagggctaatcatgtgcatgctgtgctccatccctgacggcaggtactgcctctctccaaaggccccgttggaaggagaagaacagagtaaagtgctttgagaggcgctcagtttttccgggcttgcagctagcctaggggaagtggggaaattgtatccatacaggttgtaagggttgtgaagggagaaggcattgtaggagctctgctgcatgtggctgcccccgaacatgtgtggtgatgaggagctggaggcagcattgcctgcctgcatgacatactgaaactgggaagtgggaaaggaccccagctggccaccgtaggcttccatcttgctgttgccaggcaacgagggaggagttggtattcctgagatcagggatggagtcctctgaggcatgaaggtttcagagggctgagtggctgaagtggtgccactctgaagcctgttgtagccactgtcactcagccctgggtagctctgcaaggcagccatgttgcttcgggcacatggtggataatcagagaggtttagattacacagctggctttctcggcagcccacattgaaagtgttgggggccagatgaaaagttggagccaa

SEQ ID NO: 186927 - DNA, 1007 bp, Homo Sapiens
ctttgtacaaaaaagttggaagacttccgagtgcaggaactcccactggctcgtattaagaagattatgaaactggatgaagatgtgaagatgatcagtgcagaagcgcctgtactctttgccaaggcagcccagatttttatcacagagttgactcttcgagcctggattcacacagaagataacaagcgccggactctacagagaaatgatatcgccatggcaattacaaaatttgatcagtttgattttctcatcgatattgttccaagagatgaactgaaacctccaaagcgtcaggaggaggtgcgccagtctgtaactcctgccgagccagtccagtactatttcacgctggctcagcaacccaccgctgtccaagtccagggccagcagcaaggccagcagaccaccagctccacgaccaccatccagcctgggcagatcatcatcgcacagcctcagcagggccagaccacacctgtgacaatgcaggttggagaaggtcagcaggtgcagattgtccaggctcagccacagggtcaagcccaacaggcccagagtggcactggacagaccatgcaggtgatgcagcagatcatcactaacacaggagagatccagcagatcccggtgcagctgaatgccggccagctgcagtatatccgcttagcccagcctgtatcaggcactcaagttgtgcagggacagatccagacacttgccaccaatgctcaacagattacacagacagaggtccagcaaggacagcagcagttcagccagttcacagatggacagcagctctaccagatccagcaagtcaccatgcctgcgggccaggacctcgcccagcccatgttcatccagtcagccaaccagccctccgacgggcaggccccccagggtgaccggcgactgaggggcctgagctggcaaaggccaaagacacccaacacattttttgccataccagccccaggcaatgggcacagccttccctcccc

SEQ ID NO: 186928 - DNA, 1018 bp, Homo Sapiens
ttggcacgatactgggagtccaggcgccaagggagggggaagggaaaaggggaaacggtgcaaacggcgtggccgccatcttgcttgtgcccccgcttcgcgcgcgctccgttctccgtgacgcacacttccccctcccctccgccgcgcctgggcctctgcattgcccgactccgtaggagcgcgggggcggctcctgctcttcctggactcctgagcagagttgtcgagatgtccacagaaggaggatttggtggtactagcagcagtgatgcccagcaaagtctacagtcgttctggcctcgggtcatggaagaaatccggaatttaacagtgaaagacttccgagtgcaggaactcccactggctcgtattaagaagattatgaaactggatgaagatgtgaagatgatcagtgcagaagcgcctgtactctttgccaaggcagcccagatttttatcacagagttgactcttcgagcctggattcacacagaagataacaagcgccggactctacagagaaatgatatcgccatggcaattacaaaatttgatcagtttgattttctcatcgatattgttccaagagatgaactgaaacctccaaagcgtcaggaggaggtgcgccagtctgtaactcctgccgagccagtccagtactatttcacgctggctcagcaacccaccgctgtccaagtccagggccagcagcaaggccagcagaccaccagctccacgaccaccatccagcctgggcagatcatcatcgcacagcctcagcagggccagaccacacctgtgacaatgcaggttggagaaggtcagcaggtgcagattgtccaggctcagccacagggtcaagcccaacaggcccagagtggcactggacagaccatgcaggtgatgcagcagatcatcactaaccacaggagagatcccgcagatcccggtgcagctgaatgccggccagctgcagtatatccgcttagcccagcctgtatcagcactcaagttg

SEQ ID NO: 186929 - DNA, 2041 bp, Homo Sapiens
  misc_feature (81)..(136): n is a, c, g, or t
tgctccacctcgagggacgcgagcgggcggcggggctggccgtgagagagacaggagaggaaggagggcaggggcggagtnnnnnnnnnnnnnnnnnnnnnnnnnnnnnnnnnnnnnnnnnnnnnnnnnnnnnnnntgcccggcccaccgagccctggtgtggcagcggctcatggcggccgtggggcccccgcagcagcaggtgcggatggcccatcagcaggtctgggcggcgctcgaagtggcgctccgggtgccctgcctttacatcatcgacgccatcttcaactcctacccggattccagccaaagccggttctgcatcgtgctccagatcttcctccggctctttggtgtatttgcatccagtattgttctgatcttgtcacaacgatcacttttcaagttttacacgtacagctcagcctttctgttagctgcaacttcagtgttggtgaattattatgcttctttgcacattgacttctatggtgcctacaacacgtcagcttttggaattgagctgcttcctcgaaaaggtccctcgctgtggatggcacttatcgttctacagctaacatttggaattggatacgttacactactccagattcattccatctattcacaattaattattttggctcttggttcctgtaataggcttaatcacagagctaccattacacatcagagagactttactgtttacttcttccttgattctcacattaaatacagtgtttgtcctggcagtgaaactgaagtggttttattattccacacgatatgtttatcttttggtgaggcacatgtatcgaatttacggattacagttattgatggaggacacatggaagaggattcgtttcccagacatactacgagtcttttggctaacaagagttacagctcaggctacagtgttaatgtacatcttaaggatggcaaatgaaactgattccttctttatttcttgggatgatttttgggacctcatttgcaatcttataattagtgggtgcgattctacactaactgtactgggcatgagtgctgtaatttcctcagtagcccattatttggggcttggaatattggcctttattggatcaactgaggaagatgacaggcgtcttggctttgttgcacctgttttattttttattttggctcttcagactgggttaagtgggctaagaccagaagagagacttattcgcttaagtagaaacatgtgccttttattaactgcagtcctgcattttatccatggaatgacagaccctgtattaatgtctctcagtgcctctcatgtgtcatcttttcgtagacattttcctgtgctgtttgtctctgcttgcctgtttattcttcctgtcttactcagttatgttctttggcatcactatgcactaaatacatggttgtttgcagttacagcattttgtgtggaactgtgcttaaaagtaattgtttctctcactgtttatacgttattcatgattgatggctactataatgtcctctgggaaaagcttgacgattatgtctactacgttcgttcaacaggcagtattattgaatttatatttggagttgtaatgtttggaaatggggcttacactatgatgtttgagtcgggaagtaaaattcgggcttttatgatgtgcctacatgcatattttaacatctacttacaagccaaaaatggctggaagacatttatgaatcgtaggactgctgtgaagaaaattaattcacttcctgaaataaaagggagccgcttacaagaaataaatgatgtatgtgcaatctgctatcatgagtttacaacatctgctcgtattacaccgtgtaatcattatttccatgcactttgccttcgggaaatggctgtacattcaagatacttgtccaatgtgccatcagaaagtatacatcgaagatgatatcaaggataattcaaatgtatctaacaacaatggatttattccacccaatgaactcccagaggaagctggtaagaaaagctgctgct

SEQ ID NO: 186930 - DNA, 1172 bp, Homo Sapiens
ttggctcgggtcatcccggcgcccagggtcaccttcccacgggctggcacctgggcgcgggcgctgccccggagccggccggcgggacctggcgcccaatcctgggggacccggtgccgtggcccaggggccgggccgaggtcccgggggcggtgccttgcgggcccgtcccggggcggtgcctggtgggctggccccgcggctcctcccctctctgcgggcccagtcgccctttgggggcgagctaatcgtcggctcaatgacgacgaggcccgacccttcccgtccaggacctacagagacaaccgaaggagagcccaaggcggcttctttgctgtcgccgcccccactgaagcaagagctccccggctccactgaaacaccagctcatttaagctttccccaacgcccggccctccgggacgatacctaacaacgaccggcgcccgcatctggaataggctggcgagatacttagtatccgagggctcgggacttggcgccatcgaggtcatggggacccaggatccagggaacatgggaaccggcgtcccagcctcggagcagataagctgtgccaaagaggatccacaagtttattgccctgaagagactggcggcaccaaggatgtgcaggttacagactgtaagagtcccgaagacagccgacccccaaaagagacggactgctgcaatccggaggactctgggcagctgatggtttcctatgagggtaaagctatgggctaccaggtgcctccctttggctggcgcatctgtctggctcatgagtttacagagaagaggaaaccctttcaagctaacaacgtctccctaagcaacatgataaagcatataggcatgggcttgaggtacctgcagtggtggtaccggaagacccatgtggaaaagaagacacctttcatcgacatgatcaattctgtacccctaagacagatttatggttgtcccttgggtggcatcgggggaggcactattacccgtggctggagaggccagttctgtcgttggcagcttaaccctggaatgtatcagcaccggacagtcatcgctgaccaattcacagtgtgcctgcgtcgggaagggcagactgtgtaccagcaagtcctgtccctggagcgcccaagtgtcctccgcagctggaactgggg

SEQ ID NO: 186931 - DNA, 748 bp, Homo Sapiens
ctttgtacaaaaaagttggcactactaagactgggcatgttttgctggtgtggtctctgcacttcaggaatggtcacaacagggggtagccctcaaaagcactcctttttctatacctcttctcaaggccatgtaagttgcccatctctacctggctgtggacaaaaggttatctgctcttggccatctggtggtggtggcggcccagagtctgaagaaatggcacagggacagtgaatggtagtgttgccaccctgtgctgaggcctgaggcctcttcctcagctttatctccctttccttcactcaagggccatttccccagtccctatctcccccatcccctcccggcttataggccccacaggtgctatttgttgtgctggcccaggcgtggggctaccaagcaaaggcttggcatataccaaaggccagctgcatgcccatcagtctggtctttttcctctgcggtcatgttggctttcatgctggatcaaatgttttactttcccagactggtggcatctgagttccccatcctaccactctcaccccactttcctgccccacctaaaccctcgttttagtaatttgtagtgactgttcccttccctctgttgcagggaaccaggaggaaagggaaagatgttgccatatttcctactctttaggcatggactctcctttccctttgttagtgtcctgggttcccatggactcagggatttgttggctaacgtttctctgtg

SEQ ID NO: 186932 - DNA, 2081 bp, Homo Sapiens
  misc_feature (312)..(454): n is a, c, g, or t
ccctcaagatttcacaggggcacagagacgccaggcaggctgagatgaagcccaggtggttcacagccagagcaggtgagcagggccctgagagctcaggcagggcacggcaggaaactcaatgctgccgtccaacaccagccttcagaagcccctgaagttttgtcaaaacagaccgagaagcccaccctgcagaggcttaggctcagtaagtctggggtctgaaaacttgtcccaggtaatggcgttggtcaggggaccacactggttgtataaataggctgtccctgagaagatgacagaagtaggggnnnnnnnnnnnnnnnnnnnnnnnnnnnnnnnnnnnnnnnnnnnnnnnnnnnnnnnnnnnnnnnnnnnnnnnnnnnnnnnnnnnnnnnnnnnnnnnnnnnnnnnnnnnnnnnnnnnnnnnnnnnnnnnnnnnnnnnnnnnnnnnctgctaccaggagctgaagtccccaaaaccccgactgggcttcttcttggacatggggacagtggcactggttgagggctcttcctctgctgctcgcttcgtggctgctgggttgatgtacttgcccacgccctggcggaaggtctgggggccctggctccctgcctggggctggctgctcttcactttggtctccggggctaccttgagctgtgtcttccgctcctgcgcaatctgggcatcggcctcctcataggggtccacgaacactgtagtggcatcaatgcggatctcctccttagggcggtcagttttggggtcactctccacattctccatggctgtcagtacgtcaaagcccccaacaacccgtccaaagatggtatgcttcttgtccaggtaggcacaggagcgaaacgtgatgaagaattgagacctgttgctgttgggcccggagttggccatgctgaggatgccgcggcccgtgtgcgagaggttgggccggaactcgtctttgaaggacttcccccagtatgactccccacccgtgcctgtgcctgtggggtcgcccccttggatcacaaagttccggatggatctgtggaagatggtgccatcgtaataatgcttcttgcaaagcctgatgaagttttcgcaggtttttggtgtcaggtcgcagtgcagctccaggttgaggtcgcccttgttggtgtgcagccgcacgtagcccttcttcttcacaaactggtagcgcagcacatcctcgtcgatggcagctgcttcatgtgtggtctccgggaccatcgcggtggaggtgaaggaagcgctgaccttccctgtggaatagtgggcagcgttcagcttgtccactttcttcttctccggggccttcatggtggctgccagaatctcgtcccctttgaactccttgtagagctcctgcagggtctctcgggtctcggcatttgtatttttcagataataagacgggtcctgtttggccttctcttcatctgggtctattattttcatgttattcttcacatgatagaagttagagacattgaacttgtccaaattggtggggtcctggagggtgatgatgtcctgccgggagaagggctcgtcggtcagcaggtcccggaagttcttggccttgatatttagctgttccactgcctcataggcgtagacgttgccggtcgtcctcacagccacgatgtgggtgttgttggtgaacacggtaaacagcactgggcagtggtacttcccctcactgttcttggaaaagttcagcttgatcagggacctcccgtccagcttctctccattgctggggttggtcccgtacttcttaagccatggaacaatgttcagtaagtcaaagacgatgccatcgggagtgcagactgggtagacaaagggctgcagagagagactgcagtggtcaaaaggtaaacgacgaaaatttgtttgtgggagatctggcttcttgccaccataaaagtgagtgtattcagcacaggtaatgtacattttgtccttttggtgctgtcgcttccccatggcggagcggcggcggcgactagcgagcacgaaaaaacaacggctgacaactcagacccaa

SEQ ID NO: 186933 - DNA, 965 bp, Homo Sapiens
  misc_feature (801)..(816): n is a, c, g, or t
ttggctttaattggcccatttggaggcttctttgctagtggattcaaaagagccttcaaaatcaaggattttgcaaataccattcctggacatggtgggataatggacagatttgattgtcagtatttgatggcaacttttgtacatgtgtacatcacaagttttataaggggcccaaatcccagcaaagtgctacagcagttgttggtgcttcaacctgaacagcagttaaatatatataaaaccctgaagactcatctcattgagaaaggaatcctacaacccaccttgaaggtataactggatccagagagggaaggactgacaagaaggaattattcagaaaaacactgacagatgttttataaattgtacagaaaaatagttaaaaatgcaataggttgaagttttggagatatgtttctctctgaaattactgtgaatatttaacaaacacttacttgatctatgttatgaaataagtagcaaattgccagcaaaatgtcttgtaccttttctaaagtgtattttctgatgtgaacttccttccccttacttgctaggtttcataatttaaaagactggtatttaaaagagtcaaacactataaaatgagtaagttgacgatgttttaagattgcacctggcagtgtgcctttttgcacaaatatttacttttgcacttggagctgcttttaattttagcaaaatgttttatgcaaggcacaataggaagtcagttctcctgcacttcctcctcatgtagtctggagtactttctaaagggcttagttggatttnnnnnnnnnnnnnnnngattgtctacttttcaaagaagtaaccatttgccaggggaaaacattctgcttttacgtagtttcaaaattctgggaggagcctgaaatttttgccatgattggtttgttagaaagagcagcatcagactacttctgataaaattgttt

SEQ ID NO: 186934 - DNA, 1628 bp, Homo Sapiens
ttggaccacgtctgccctcgccgctctagccctgcgccccagcccggccgcggcacctccgcctcgccgccgctaggtcggccggctccgcccggctgccgcctaggatgaatatcatggacttcaacgtgaagaagctggcggccgacgcaggcaccttcctcagtcgcgccgtgcagttcacagaagaaaagcttggccaggctgagaagacagaattggatgctcacttagagaacctccttagcaaagctgaatgtaccaaaatatggacagaaaaaataatgaaacaaactgaagtgttattgcagccaaatccaaatgccaggatagaagaatttgtttatgagaaactggatagaaaagctccaagtcgtataaacaacccagaacttttgggacaatatatgattgatgcagggactgagtttggcccaggaacagcttatggtaatgcccttattaaatgtggagaaacccaaaaaagaattggaacagcagacagagaactgattcaaacgtcagccttaaattttcttactcctttaagaaactttatagaaggagattacaaaacaattgctaaagaaaggaaactattgcaaaataagagactggatttggatgctgcaaaaacgagactaaaaaaggcaaaagctgcagaaactagaaattcatctgaacaggaattaagaataactcaaagtgaatttgatcgtcaagcagagattaccagacttctgctagagggaatcagcagtacacatgcccatcaccttcgctgtctgaatgactttgtagaagcccagatgacttactatgcacagtgttaccagtatatgttggacctccagaaacaactgggaagttttccatccaattatcttagtaacaacaatcagacttctgtgacacctgtaccatcagttttaccaaatgcgattggttcttctgccatggcttcaacaagtggcctagtaatcacctctccttccaacctcagtgaccttaaggagtgtagtggcagcagaaaggccagggttctctatgattatgatgcagcaaacagtactgaattatcacttctggcagatgaggtgatcactgtgttcagtgttgttggaatggattcagactggctaatgggggaaaggggaaaccagaagggcaaggtgccaattacctacttagaactgctcaattaagtaggtggactatggaaaggttgcccatcatgactttgtatttatatacaattaactctaaataaagcaggttaagtatcttccatgttaatgtgttaagagactgaaaataccagccatcagaaactggcctttctgccaataaagttgcatggtaaatatttcattacagaatttatgttagagctttcatgccaagaatgttttcttacaaaattctctttttattgaggtttcactaataagcagcttctacttttgagcctcaacttaaagcagaactgttttctactggatttttcattaacagcaagctttttcttttatgtaaaataaatctattgtgaattgatatcagcgactcatttattaggtataaataatagccaaagaataaaattaaaatttattttaaactttctg

SEQ ID NO: 186935 - DNA, 1525 bp, Homo Sapiens
ttgggaaaggatagatggctggggaggagggagagggagttaaggggatcaaatgggtaaaagctggagggatgggtggctggagatgattggaggctttgtaggagagttcagccacatcagctttgtgggtgagaataatggttaaggaaggatttacaaacaggatgcatttgattgctagaaatctgggagcactagctgggctcccactgttgcttccagcgccccctagaaaggtgaattccagaatgaggtttaggttaccagggtgagaaaccacctaggatgagcccgctcccagctcctggcagcctcaccactgacactaggctaacaggcccttttgtcccgtgttcccaggatctttatgtcgctgaagctttatccactctggaatcctggaggagccgctacaaccaagttgtaaaagaaaagggagaccttgagctggaaattattgtcctgaatgaccgggtaacagatcttgtaaaccaacaacaaaccctggaggagaagatgcgggaagaccgggatagcctggtggagagactacaccgtcagactgctgagtattccgcattcaagctggagaatgagaggctgaaggccagctttgctccaatggaggacaaactcaaccaggcacacctcgaggtccagcagctgaaggcctcagtgaagaactatgaggggatgattgacaactataagagtcaggtgatgaagaccagattggaggctgatgaagtagctgcccagctagaacgctgtgacaaagagaacaagatccttaaagatgagatgaacaaagagattgaggcggcacgaaggcagttccagtctcagctggctgacctgcagcagctccctgacatcctgaagatcacggaggcgaagctggctgagtgccaagaccaactgcagggctatgagcggaagaacatcgacctcacagccatcatatcagacctgcgcagccggatcgaacaccagggggacaagctggagatggcgagagagaaacatcaggcttcccagaaggaaaataaacagctgagtctgaaggtggatgaactggagaggaaactggaggcgaccagtgcccagaatatcgagttcctacaggtgattgccaagagggaggaggcaatccaccagtcccagctgcggctggaggagaaaacacgggaatgtgggaccctggcaaggcagttggagagtgccattgaagatgcgaggaggcaggtggaacaaaccaaggagcacgcactctccaaggagcgagcagcccagaacaaaatcctggaccttgagacccagctgagcagaaccaaaacggaattgagccagctgcggcggagccgtgatgatgcggaccgccgctaccagagccggctgcaagacctgaaagatcgcctggagcagtccgagagcaccaaccgcagcatgcagaactacgtccagttcctcaaatcatcatacgccaacgtgtttggggatggtccctattccaccttcctga

SEQ ID NO: 186936 - DNA, 1061 bp, Homo Sapiens
ttggaattcttctaatatttatcagcctgttccctgagattcttctgatagtattaaagaatgtaagaagaagaagtgccaggagaaatctgagctgtagaagggcatctgactcattatccgccagaccttcagtcagacctcttcttttacgaacattctcagacgaatctaatgtattgtaacagaatccgaatcttgaactgcctatgttattgtcctacaagcatactgacagtggttacagctaaaaaagaaagcatgaagaaacaactacaaaaagttatcatctcaggatacttgatatgcaacacactaaaccactctcatgtctagagttcacaataaatgttcattaaaataccaaatgattctcttaagcatttaccattattgtaagtagcctttatggccaaagctgtaagttaagaattatatgaaagttgaaagcaagaatacttagaattctggctttagttagagtaatataactcaaatgggtgctcttttaacccatgaactttgtgaatggatttaaatacaatagtatgaagtagaagttatgcaatgagaatgaatagattttgctaatactactttttttgcctggcagaagaaatagactatttggatcacatttctcattcctcctaaatgatcatcttaattttttttcccaagtacataaggaatacttgaaaatacagaataactaaatagtatcaatgcatcagacagaatagttaatcccttctgtttacccatgtgctactaatgtcttggtagaatattcttgccaaaaaaataccttgaacgcttatgtggaaagtgttaacttacgggtatttttgtgggaatagaaaaaaattgtttattttttattcttctgaattaaaccccacttatgggtgtaagcctactagacttgaaaataaagtataaaacatttccaatcacttagtagcccctcaaagtagttagaaaataaacagatttttccagtgttgattttactgggatctgcagtaaagtggtgtaaaccatagttatataaaaataaa

SEQ ID NO: 186937 - DNA, 478 bp, Homo Sapiens
ctttatcatgcccactttgtacaaaaaagttggcaatttcaagtgctgccagctaaaataactgttttaacgggtatcttttgtttgttcttttcacttaattattttattgtgctttgcatctccaggcagttctctcacatttgggtaaaatgtttagcaggctgtaaacttaagaaaagggtaaaataaaattttctggagaggaacttggaatttgagggagattttatatacctttaaaaactgtaatttaattgggatgccaggtttatagcaatttgcaactttaattttccagataatctggaggttagcatttgataaatgattttttaaagtagatatgaagattttgttaatttataatttattcatgtgttattactgtaattgaaaatgttatagacacttttaaattcagtttgtgtagaaagaaatgtgttaaacaaaattatgttaataaatattcccacat

SEQ ID NO: 186938 - DNA, 1669 bp, Homo Sapiens
ttgggatgtctttagccttccaagccagcccccttctggggatctatttggcttgaacccagcgggacgcagtaggtcgccatccccctcgatactgcaacagccaatctcaaataagccttttacaactaaacctgtccacctgtggactaaaccagatgtggccgattggctggaaagtctaaacttgggtgaacataaagaggccttcatggacaatgagatcgatggcagtcacttaccaaacctgcagaaggaggacctcatcgatcttggggtaactcgagtcgggcacagaatgaacatagaaagggctttgaaacagctgctggacagataaggacggctgctctccacctcgcagactgctcttgttataagtagagatgggctcgtgctgaaacatctgaatgccaagcgaagtctgtgagcatcaaccccactccatgggtttgtctcctggtacccaaagaaatactgagttgtgtccacaacatggctgggtcttcagacccctggctcaccatgtgggtgtcttgggcagtttctatcacacatgggacaaggggagggagtttttctaacatggaaaaagattcccagcctgccgcccagcatgcaggtggcctcgctttgccgggtccgagaggctccccgtcaattttgcacgggatcctagctcttgtaggcagacaccagtgcactctagatacctcctgagacctccgtcctctgctttccgggcagctctcaccaccccaggccccggcatgaggcctttcctcagtcctgtggcctctcagaggacacctgatgctcacctgcccctctttctcctgcacttggcttgcagtgagatgctcccagatgcatttgtccagtgccccatcatgggcctgaaaggcagagaaactttttcctacacagattcttttccccatctcctcctgtggtttgcatccatggctctttggccatgaggttcctggcagtgctgggagtttggatgggatcgtgcccagctttgcttagctttctttatttctgcaaatctgttagcataattccaaggtggccaagcagatgtcacatggagttagtcaaagcacaaagtcacgattccacaatggaggggagacctggccaagggagccagccagcgtgcaactgcccaagctccaggtctccaggacaagagcagttgtctgccatgagcacccatccaggatggagaataagggcttctctgcctctcagaattctttttaattgaagatgtcttgagctctgcaaagatcagagcaggtgagcatccactttgacatgaaggacaagaagacgcatggctcatggcgggcacatgcggctgccagtgagacagcgtctcctctgggagctgggcgggcacagcatcctcagttctgtgcccagccaagggtgagcatctctgctgagacagtccttttgctctcggaggccagggaagatggtacttagaggcttttcccctatcgctctgggtgtctaggaatcccaccagcttgtcttaacagtacaacagcttctttgaggacccagtgggtatggagtatagacagaacccagggttgagaacagaaacgtgggcggcacgatcagagtgaaagcagaggcgtgaggagaggaaagc

SEQ ID NO: 186939 - DNA, 1314 bp, Homo Sapiens
  misc_feature (105)..(127): n is a, c, g, or t
  misc_feature (578)..(615): n is a, c, g, or t
gcatcacattttgctgtggagactgttggaacaagcatggggctgaggggaaggggcaggcgggatatccaggactccccagagtcgctccagggaagaaccacnnnnnnnnnnnnnnnnnnnnnnnggctggctggggcccaaagtgcagcctgcggtcaaaaaggaaagggggttcaggtgctctccgcagttgagaactcagaagaaaaacaaaagaaagaacaatacatgcggtctcctcaagccccacagactgtatcagcaaaatgtgctcaggagcctcagaggttttagtgacatcttttatttcattgtttacttcaaagttgtctttaaaactaagcacacagagaaacaaagcctagaaacggactggctgtgtgttcacagaaatacaaacaccacgcggtatgtgctagtagggctgctctgaagacaattacaaagaattggaatcacaaaatcaagtggttatcttatgaagttctagaaaaatagattttttttatattcaaatgcaagtttaaatatttccccttcagcagtcgttctagcaaaaccaatttggcagcacnnnnnnnnnnnnnnnnnnnnnnnnnnnnnnnnnnnnnncgaagaaagaaacaaacataataaaaatacacatcagcatcaaaggtcaacacaaggtcaaaggtgagagttcaagcatcagagaagctgaagagacagggatttggacgatgtacttgacgccacatcgacatgctttaggcacaacgatgaacaaacggcaggaatcagaagaccctctcactccagtctcagaggggagcacgctcagtagggcttgctgtcattcttcgaacgtttgagctgcactttaagccgcttcatgccaatctgaaagccgttcatggactggatggcagcttgggccgaaacaggattgtcgtaacttacaaaaccaaaacacttgctcaggtttgtctgcttgtctatgaaaaccttggcagacacgacattcccaaagggcataaacatctgcagcaggtcctgatcaccaaactcctggggcaggtggtagatgaacaggttggctccctctggaccttccttctggcttccagcagcaccaatactctgctgtgtcagaagattctggttgtacagagtggggagcgcagcagcagcatattgctggatacccgagtaggcctgagtgagggcctccatggtgctcccggtgccattggaaaggccactgctgcccaggccaccatttaaagcagccattcctgccaaagagccaacattgaggccagccgccaa

SEQ ID NO: 186940 - DNA, 1709 bp, Homo Sapiens
ttgggtttgttaccgcgattctgagaggtgggcttttagtccctccagacctcggctttagtgctgtctccgcttttctttcaccttcacagaggttcgtgtcttcctaaaagaaggttttattgggaggtaaaggtcaatgcgtaggggtagagtaagatgtcttatggtgaaattgaaggtaaattcttgggacctagagaagaagtaacgagtgagccacgctgtaaaaaattgaagtcaaccacagagtcgtatgtttttcacaatcatagtaatgctgattttcacagaatccaagagaaaactggaaatgattgggtccctgtgaccatcattgatgtcagaggacatagttatttgcaggagaacaaaatcaaaactacagatttgcatagacctttgcatgatgagatgcctggtaatagaccagatgttattgaatccattgattcacaggttttacaggaagcacgtcctccattagtatccgcagacgatgagatatatagcacaagtaaagcatttataggacccatttacaaaccccctgagaaaaagaaacgtaatgaagggaggaatgaggcacatgttctaaatggtataaatgacagaggaggacaaaaagagaaacagaaatttaactctgaaaaatcagagattgacaatgaattattccagttttacaaagaaattgaagagcttgaaaaggaaaaagatggttttgagaacagttgtaaagaatctgaaccttctcaggaacaatttgttccattttatgagggtcataataatggtctcttaaaacctgatgaagaaaagaaagatcttagtaataaagctatgccatcacattgtgattatcagcagaacttggggaatgagccagacaaatatccctgtaatggacaagtaatacctacattttgtgacacttcatttacttctttcaggcctgaatggcagtcagtatatccttttatagtgccctatggtccccctcttcccagtttgaactatcatttaaacattcagagattcagtggtccaccaaatccaccatcaaatattttccaagcccaagatgactctcagatacaaaatggatattatgtaaataattgtcatgttaactggaattgcatgacttttgatcagaacaatgaatatactgactgtagtgagaataggagtagtgttcatccctctggaaatggctgcagtatgcaagatcgatatgtgagtaatggtttctgtgaagtcagagaaagatgctggaaagatcattgtatggacaagcataatggaacagacaggtttgtgaaccagcagtttcaagaggaaaagttaaataaattgcagaagttacttattcttttaagaggtctgcctggttctgggaaaacaacattgtctcgaattctgcttggtcagaatcgtgatggcattgtgttcagcactgatgactattttcaccatcaagatgggtacaggtataatgttaatcaacttggtgatgcccatgactggaaccagaacagagcaaaacaagctatcgatcagggaagatctccagttataatagataacactaatatacaagcttgggaaatgaagccatatgtggaagtggccataggaaaaggatacagagtagagtttcatgaacctgaaacttggtggaaatttgatcctgaagaattagaaaa

SEQ ID NO: 186941 - DNA, 2348 bp, Homo Sapiens
ttggattagaacatggacttacacgaatatggcaggatgttcagctaaaagtaaaaacctacttgcttggaactgatttgtctatattcaaatatgatgatttcatctttgttttggatataatcagcaggttgatgcaagttggagaagaattttgtggtagcaagtctgaagttttacaggaatctattagaaaacaaagtgtcaattatttcaagaattaccatagaacacggctcgatgaactgagaatgttcttagagaatgagacttgggaactttgtcctgttaagtcaaatttcagcatcttgcaacttcatgaatttaaattcatggaacagtctcgctccccatcagtttcacctagtaaacagccagtctcaacttcttcaaaaacagtgaccttgtttgagcagtactgtagtggtgggaatccatttgaaattcaggccaaccacaaagatgaagaaacagaagatgtcttagcttctaatgggtatgaatctgatgaacaagaaaagagtgcctatcaagagtatgacagtgacagtgatgttcctgaggaactcaaacgagactatgtggatgagcagacaggagatggtcctgtgaaaagtgtttctcgggaaactctaaaaagcaggaagaaatcagattacagtctaaataaagtgaatgcacctatcttaacaaatacaacattgaacgtcataagacttgttggaaaatatatgcagatgatgaacattcttaagccaattgcctttgatgttattcatttcatgtctcaactatttgattattacttgtatgcaatatataccttttttggtcggaatgattcattggaatcaactggactcggccttagtagtagtagactaagaacaactctaaacagaatacaagaaagccttattgatctagaagtttcagctgatcctactgccacactcacagcagcagaagaaagaaaggagaaggtgccaagtccacacctcagtcacctagtggttttgacatctggggatacgctgtatgggttggcagaaagagtggtagccacggaatccttggtattcttggctgaacagtttgagttccttcagccacatctggatgctgtgatgcctgcagtcaaaaagccctttcttcagcagttctattctcagacagtctcaaccgccagtgaactacggaaaccaatttactggattgtagctggtaaagcccttgattatgaacagatgctgcttctcatggctaatgtgaaatgggatgtaaaagaaattatgtcacagcacaacatatatgtagatgcactattaaaggaatttgagcagtttaacaggaggctaaatgaagtttctaagagagttcgcatacccttgcctgtgtctaatatactttgggaacattgtatacgattggctaatcgaactattgtagaagatatgccaatgtcaagaaatgcagtaatgagggtcgtgccctgatgcaactggattttcaacagtttttaatgaaacttgaaaaactaacagatattagacccattcctgataaagaatttgtagaaacttatattaaagcttattacctaactgagaatgacatggaacggtggatcaaagagcacagggaatattcaacgaagcagctgaccaatctggtgaatgtttgcctgggatcccatatcaataagaaagcaagacaaaaacttctagcagctatagatgatatagacagacctaaaagataatgaacacagctctctttcctcaatggcattgatcctcactcaacatatatgacctgaaagccagtttttttatgcacttctgacaactatctgctaaaaaaactttgtgcatgtttttttgactggaaagtggaaaatattgaaatgtgtgtggtgttctcatgacttttatatgctgtggtctcttcaacttttggtctcatttgttgtaatctgaaatgatgttgccgccttgtcataacaatggttatgtgactacagttatacattttacagaagaatgtaccataagtatataattagaagaacagtggcttaatatatgtatgggaagtttatggaaaatgaagttggcacttttctaccctctgagcttggttcttaataagcataatgtgagggtgaatatgtagtatctcctaattatgagcactgcatgagaattaaaaaacacatgtaagtaaaatagttgaaaaatcagtatgttctctgtttttaaaatgtcaaagtttatgtcagggttaatttagttataacaaagtgatcataatggtgaaatttaataaatatactctagtatgatcaa

SEQ ID NO: 186942 - DNA, 1679 bp, Homo Sapiens
  misc_feature (235)..(243): n is a, c, g, or t
  misc_feature (681)..(690): n is a, c, g, or t
  misc_feature (1398)..(1439): n is a, c, g, or t
ttggatttcttatacaatgaggaaattgttttgttattttaccaatttttagtgcagttaattaaaaatatatcagactttttgctttaatgtgtacctttactgatgaggccagatagtctctagtcaggttaattttttacagatctagaaggattattattttactttatttttaacataaaatgatgtactgtgccactaaacatattgttaatttcaaatataggaagannnnnnnnnaataaaaagcttggtaattagttactcttcaaattgtatttgtgtctttgattttctaggtaatcattcctggggtatttatccagaatctatctctaccttaccagtggataatagtctactgtccaattctgtttactctgaattaccatcagctgaagggaaaatgaaggtaactgttacacaaataacagtggcactgagcagcttaaaaaatatttttactcctcttctttttcgaggacttctgtcttttctgacctggtggattgctgcttgcctcttttctacaagcctttttgggcttttctatcaccagtatctgactgtggcatgaatctcagttaacaaaaaagcatatccaaatcaccctttaaattaaaatatctgtgcccttaaagggctgatgaaaaccagaagaaagcaaatacaatgggnnnnnnnnnncatatcagaatgtcttgtattaaatgtttcctctgtattctcacggtgaattaatgtagtaatatttaaaattacaaaatagattgttaactgttacactgtggcattggaattttaactctttgtatttactggtatgagagggctatctacaagggtaatatttctgattaccctggtttacagaaacctccagcagtctttgaaacatctcacatgactctagttattgattgcttttaatggttttatggtactgttgatagtcatagtggctgcctatagaacaatcttcaaactgagccatgctttaggggagggaaaggggctaaagtctcttctgttggtaatttattagttactcttgaaacaataaaatccaacagaaaggaagagatagctactgtatattacagtaaagaaagctgcatagttattttaaatttaatggagatgaatatggttaaaatatataactactgctgcttgagaatagcaagagtattgttttaaaacatattccacccaacttgagagttcttttaaaatgattggccatatgaacatttgtaatcttgccattaggtttggacctgccatattttgttttattctgtgatcctaactagttccttttaataggctaaaatatttatcaatactgatcagactttaaagaaattactttgtaaacctgctgactacctnnnnnnnnnnnnnnnnnnnnnnnnnnnnnnnnnnnnnnnnnntgagattataaaagatgaaaatattgaatccttataatattttaagttgcagaatgtatgttaaaaagtgacttgaatgagatgtatttgtatctagaaattttatttctttttggaatgagattaaaatacattttgaaagttcagcagagtaagcaatttatttgtgttgcctatgtgtgagtgtatttaaagttttatggacgcttaatggtttctcccaaattaaaattctttttc

SEQ ID NO: 186943 - DNA, 2094 bp, Homo Sapiens
ttggataggtttatcatctcttgatgatgtgtaaaatgtatgtaagtacaaaggatttatggttgatgatgacttttttttcttcttacaggaccctgatgctcccataagacagaaaatgccccttgatgatctggatagagaagatgaagttagattactcaaatatctctttactctaatccgtgctggaatgacagaagaggcacaacgactctgtaaacgctgtggtcaagcatggagagctgcaacacttgaaggctggaaactgtaccatgaccctaatgttaatggaggaacagaattagaacctgttgaagggaatccatatagacgcatttggaaaataagttgctggagaatggcagaagatgagctttttaatagatacgagagagcaatttatgcagctttaagtgggaatcttaagcagctgcttcctgtctgtgacacctgggaagacacagtttgggcctacttccgggtgatggtggacagtctggtagaacaagagatccagacatcagtagcaactctggatgaaactgaagaactccctagagaatatctgggagcaaactggacgttagaaaaggtttttgaggaacttcaagctactgacaaaaagagagttctggaagagaatcaagaacattatcatatagttcaaaagtttcttatcctgggagacattgatggtttgatggatgagtttagcaaatggctttccaaaagcagaaacaatctacctggacacctgcttcgctttatgactcaccttattttgtttttccgtactctgggactacagaccaaggaggaagtttctattgaagttttaaagacatacatacagcttttaataagagagaaacatacaaatcttatagcattttatacctgtcatttgcctcaagacctagctgttgcccagtatgcattatttttggaaagtgttacagaatttgaacagcgccaccattgcctggagttggctaaagaagcagatttggatgttgcaacaataacaaaaactgtagttgagaatattcgaaagaaagataatggtgaatttagtcatcatgacctggccccagccctagatactggcactactgaggaggatcgtttaaaaattgatgtaattgactggttggtatttgacccagcgcagagggcagaagcactgaaacaaggcaatgcaattatgagaaaattcttggcatcaaaaaagcacgaagctgcaaaagaagtatttgtgaaaattcctcaggattctatagcagaaatctataatcagtgcgaggaacaaggaatggaaagtccacttcctgctgaagatgataatgctatccgagaacatttgtgcatcagagcttatttggaagcccatgaaacctttaatgagtggtttaagcatatgaattcagttccacaaaaacctgctttgatacctcaaccaacttttactgagaaagtggctcatgaacacaaagaaaagaaatatgaaatggattttggtatttggaaagggcatttggatgccctaactgctgatgtgaaggagaaaatgtataacgtcttgttgtttgttgatggagggtggatggtggatgttagagaggatgccaaagaagaccatgaaagaacacatcaaatggtcttactgagaaagctttgtctgccaatgttgtgttttctgcttcatacgatattgcacagtactggtcagtatcaggaatgcctacagttagcagatatggtatcctctgagcgccacaaactgtacctggtattttctaaggaagagctaaggaagttgctgcagaagctcagagagtcctctctaatgctcctagaccagggacttgacccattagggtatgaaattcagttatagtttaatctttgtaatctcactaattttcatgataaatgaagttttaataaaatatacttgttattagtaattttttcttttgcattaccatgtaaaatttaaacatttgaattttgtacttttcagaatattatcgtgacactttcaacatgtatggatatcagcgtttctctgtgtgcttgttaataaaacta

SEQ ID NO: 186944 - DNA, 1176 bp, Homo Sapiens
ttgggtcgccggaagttcggtgggctccaggcgtcgcgatggaggagagcgggtacgagtcggtgctctgtgtcaagcctgacgtccacgtctaccgcatccctccgcgggctaccaaccgtggctacagggctgcggagtggcagctggaccagccatcatggagtggccggctgaggatcactgcaaagggacagatggcctacatcaagctggaggacaggacgtcaggggagctctttgctcaggccccggtggatcagtttcctggcacagctgtggagagtgtgacggattccagcaggtacttcgtgatccgcatcgaagatggaaatgggcgacgggcgtttattggaattggcttcggggaccgaggtgatgcctttgacttcaatgttgcattgcaggaccatttcaagtgggtgaaacagcagtgtgaatttgcaaaacaagcccagaacccagaccaaggccctaaactggacctgggcttcaaggagggccagaccatcaagctcaacatcgcaaacatgaagaagaaggaaggagcagctgggaatccccgagtccggcctgccagcacaggagggctgagcctgcttccccctcccccaggggggaaaacctccaccctgatccctccccctggggagcagttggctgtggggggatccctcgtccagccagcagttgctcccagttcaggaggtgctcctgtaccctggccacagcccaatcctgccactgctgacatctggggagactttaccaaatctacaggatcaacttccagccagacccagccaggcacaggctgggtccagttctgacctgagcacggtttttcctcatgtgacttctgggaaggcgctccctcatctgggccaaaggaaggaggacgaagccctcctcagctggcctgtgtttggggcatgaatctctcctctcctccttgtctggctctgttgacaaaccgggcatgtttggcagtaaattggcaccgtgtcatactgtttcctgggattcaagtatgccaaccagaacacaggagaagaaaagctccaggatccctgtccccatctgtcctcttgatgtgataaaagactctgagacttcttcccatcgcaatgaacctgtattaaacacaaacccccccaagcaaaagaaagaggttga

SEQ ID NO: 186945 - DNA, 947 bp, Homo Sapiens
ccgattcataacacatttttttcatcatacaaagagtaagacccttgaaatagtggggaccatatggtaccacgacagagctgctttactggctgtagaaaaagactgcttgtgtgggagagaagaatgaggacagaggaggcatctggggcaagtgagcgtacaagtatgtctacaaattcagaatttggtggaaaatccaaatttgacttcaacatgatagagaattgatgagaaatagctgtactgtttccaaaatttactgaatttggaacctgaggttaaaacttttaggataaagcaacctcaggttcagactggccttgggaagaaatggcaatcacagacggtaatgagtgtcagtgcttgagaagaagaattgccaaaggcaatctacatatttgacttgactcaaagagaggggaaaacaagtctcatttaaaaaggatgagtctgcagcaaaaaatcaaagggaagctggaacccctgcccacctctccattccccattctgctgctggtgcctgctcttcctcacagtacctcctgaaaagttcagaattcagttaatacagaattattgggttgattttcaacgtgtagtttaagatgaagagttccgtttggtttaaaccacttcacctaacctcttggtaacggtagtcctgagagttcgcagtgtcagtgaaatcgtcctgtgaccacgcgtcaagctgctgatggggcacagcaacttccgggcctatcatatctccttgacctcgtccctcaaatctggtagtttctgcaccgagggacacagtccactgcgatgaagtatgttcaaaatcgttttctataggcacctccttccaaagtccaatagtgcaaggtggtcaggaagacttggaaggaagctgcaaaagtccagccgggaatcttgactttgttagccaacttttttgtaca

SEQ ID NO: 186946 - DNA, 1503 bp, Homo Sapiens
ttggcaatttccagagcccggatgccagtttctggcctgaatttggagggaagaagtaatggccctagtgtgggacgaagcacagatcccagcacttttcccagctttctctccagcatcagtccctgcagcagctggggcctctggtcaggaaccctcagggacccaggaactcagcttccaaacatctgcaccttgaccggactcgccatcccgccgtgggggtgcaggtgattgtaaacacgggtgtgcatgtggatgcacacgggtgtgcggtgaagatctgtggagatggagctgggagctgaggctcctgttgcaccagccaccttcccccatcttgtggctgctgaggggcaggaagcgggggagtgggctcgtctcctaaatttaagatcacctcctcagctagcttagagtgcgtggcacgggccccccgcccccgagatctggagcccagggactttcttcctggcagatctgtggccttccctgctcagcctcttggtccccccactccctccaccgcctcaccttccctgctgggtctctggggcacagtgtgaaacccgcaccctagccaggccccagggagcctccgctgggcccagacagcagcgtttggttttatccacttttcttggataatcaggaggtgccccagtggtcacagtgtggcattccgagttggggcgggtggtcgggtcaagatagcagcagcaggtgtcagggctcaagacaccaccccctccagcttctggggcccaggagcctctccctgctacagggggtgggggtcctgctcagcagggtaggtggtggttttaggtcttgtcaccctcactcagtggaactgcctctgggagctttggcgtctgtgactaaagggacgctggattgctcaggtcagctgctcggggctcccaggctgggtgtgccttagccacaggcagggctgtcaataacccccttcctcactggccaccacctgacatcagcaccagtgacaggctggtcagagggcggggctggtgagggtttgtcctaagaggaccaccgccatctctgggtctccagggggagagcctggccctgtcctttgctacccagggctgcccccaggcccatgaagccaataggagagcgtgtggcactggcccacaaactgtccctgtcctgtcttcctcccgagccatggcctctgctagctccaccttgaaggagccccccacatcctcccctacatcccagagatgccaccacttgtgtctccacaatgtgctcctgcccacccgggttccgcactgtccgacccctgcacaccactcatgtcaccacggcgtgcatcatgttcatccccatctatttatttaagcctttctttgcttgtagggcattttgtatgtagagcagttgaaaacagaacctcaaaacttaacatctgtcctgatgttaaaagtgcttttcatgaccaccctgttatctatgtatatgtaaagttaa

SEQ ID NO: 186947 - DNA, 970 bp, Homo Sapiens
  misc_feature (58)..(69): n is a, c, g, or t
ttggaatgaaatattctgagaaaaacaagtgaaaaggtcaagatacaaatgtgtattnnnnnnnnnnnngcctattaatagggtttctgcgcggtgcagggttgtaaacctgctttatcttttaggattattcctaaatgcatcttctttataaacttgacttgctatctcagcaagataaattatattaaaaaaataagaatcctgcagtgtttaaggaactctttttttgtaaatcacggacacctcaattagcaagaactgaggggagggctttttccattgtttaatgttttgtgatttttagctaaagagagggaacctcatctaagtaacatttgcacatgatacagcaaaaggagttcattgcaatactgtctttggatattgtttcagtactgggtgtttaaaggacaaatagctgctagaattcaggggtaaatgtaagtgttcagaaaacgtcagaacatttggggttttaaactgatttgttgctccctatccagcctagacaccagtaactcttgtgttcaccaggacccagacccttggcaagggataggctcgttggtgacattgtgaatttcagatttgttttatccactttttttgctatttatttaaatggtcgatcaacttcccacaaactgaggaatgaattccacgagcctgttctgaaaatgtggacgtaagacaaacacgtgctcgtcctttaatggagttcaccagcacacttgttaaccagtcctgtttgctttcgtctttttttgtgcgtaataaagtcaactgaccaagtgaccatgaaaaggggctgtctggggctcctgttttttagctgctgttcttcagctccgaccatgttgctgtgtgattatctcaattggttttaattgaggcagaaactgaagctctaccaatgaactgtttagaaacaagacacacttttgtattaaaatatgcttgcagtaac

SEQ ID NO: 186948 - DNA, 2660 bp, Homo Sapiens
  misc_feature (2517)..(2530): n is a, c, g, or t
ttgggtttcagaagactcttggtggcaagcagcctgtgtatgataccacaattagaactggcagagcactgaaagaaaagactttgcttcccgaagatagtcagaaacttgacaatttcctaggagaagtcagagacaaatgggatactgtttgtggcaagtctgtggagcggcagcacaagttggaggaagccctgctcttttcgggtcagttcatggatgctttgcaggcattggttgactggttatacaaggtggagccacagctggctgaggaccagcccgtgcacggggaccttgacctcgtcatgaacctcatggatgcacacaaggttttccagaaggaactgggaaagcgaacaggaaccgttcaggtcctgaagcggtcaggccgagagctgattgagaatagtcgagatgacaccacttgggtaaaaggacagctccaggaactgagcactcgctgggacactgtctgtaaactctctgtttccaaacaaagccggcttgagcaggccttaaaacaagcggaagtgtttcgagacacagtccacatgctgttggagtggctttctgaagcagagcaaacgcttcgctttcggggagcacttcctgatgacacagaggccctgcagtctctcattgacacccataaggaattcatgaagaaagtagaagaaaagcgagtggacgttaactcagcagtagccatgggagaagtcatcctggctgtctgccaccccgattgcatcacaaccatcaaacactggatcaccatcatccgagctcgcttcgaggaggtcctgacatgggctaagcagcaccagcagcgtcttgaaacggccttgtcagaactggtggctaatgctgagctcctggaagaacttctggcatggatccagtgggctgagaccaccctcattcagcgggatcaggagccaatcccgcagaacattgaccgagttaaagcccttatcgctgagcatcagacatttatggaggagatgactcgcaaacagcctgacgtggaccgggtcaccaagacatacaaaaggaaaaacatagagcctactcacgcgcctttcatagagaaatcccgcagcggaggcaggaaatccctaagtcagccaacccctcctcccatgccaatcctttcacagtctgaagcaaaaaacccacggatcaaccagctttctgcccgctggcagcaggtgtggctgttagcactggagcggcaaaggaaactgaatgatgccttggatcggctggaggagttgaaagaatttgccaactttgactttgatgtctggaggaaaaagtatatgcgttggatgaatcacaaaaagtctcgagtgatggatttcttccggcgcattgataaggaccaggatgggaagataacacgtcaggagtttatcgatggcattttagcatccaagttccccaccaccaagttagagatgactgctgtggctgacattttcgaccgagatggggatggttacattgattattatgaatttgtggctgctcttcatcccaacaaggatgcgtatcgaccaacaaccgatgcagataaaatcgaagatgaggttacaagacaagtggctcagtgcaaatgtgcaaaaaggtttcaggtggagcagatcggagagaataaataccggtttggggattctcagcagttgcggctggtccgtattctgcgcagcaccgtgatggttcgcgttggtggaggatggatggccttggatgaatttttagtgaaaaatgatccctgccgagcacgaggtagaactaacattgaacttagagagaaattcatcctaccagagggagcatcccagggaatgacccccttccgctcacggggtcgaaggtccaaaccatcttcccgggcagcttcccctactcgttccagctccagtgctagtcagagtaaccacagctgtacatccatgccatcttctccagccaccccagccagtggaaccaaggttatcccatcatcaggtagcaagttgaaacgaccaacaccaacttttcattctagtcggacatcccttgctggtgataccagcaatagttcttccccggcctccacaggtgccaaaactaatcgggcagaccctaaaaagtctgccagtcgccctgggagtcgggctgggagtcgagccgggagtcgagccagcagccggcgaggaagtgacgcttctgactttgacctcttagagacgcagtctgcttgttccgacacttcagaaagcagcgctgcagggggccaaggcaactccaggagagggctaaacaaaccttccaaaatcccaaccatgtctaagaagaccaccactgcctcccccaggactccaggtcccaagcgataacactgtctaagcacccccaagccactatccactttgaatcctgctccatacattgggtgtatatttattctgaacgggagaagttatattgttaaaagtgtaaaagaataattgtgttatgaagctgccttannnnnnnnnnnnnngtaagttactattttcatgtgaatatttatgtagataaaatttgcctcctggtaaccctgtaatggatggggcccagaaatgaaatatttgagaaaaacaagtgaaaacgtcaagatacaaatgtgtatt

SEQ ID NO: 186949 - DNA, 1442 bp, Homo Sapiens
  misc_feature (1014)..(1027): n is a, c, g, or t
  misc_feature (1158)..(1169): n is a, c, g, or t
ttggggtggagcagatcggagagaataaataccggttcttcctcggcaatcagtttggggattctcagcagttgcggctggtccgtattctgcgcagcaccgtgatggttcgcgttggtggaggatggatggccttggatgaatttttagtgaaaaatgatccctgccgagcacgaggtagaactaacattgaacttagagagaaattcatcctaccagagggagcatcccagggaatgacccccttccgctcacggggtcgaaggtccaaaccatcttcccgggcagcttcccctactcgttccagctccagtgctagtcagagtaaccacagctgtacatccatgccatcttctccagccaccccagccagtggaaccaagacttcacttcagttctctcgctgttatgacaaaccctggttggtaaacagtaaagctggcacccctatcagggacagccattctcctgacctccagctgcccacccccgaggttatcccatcatcaggtagcaagttgaaacgaccaacaccaacttttcattctagtcggacatcccttgctggtgataccagcaatagttcttccccggcctccacaggtgccaaaactaatcgggcagaccctaaaaagtctgccagtcgccctgggagtcgggctgggagtcgagccgggagtcgagccagcagccggcgaggaagtgacgcttctgactttgacctcttagagacgcagtctgcttgttccgacacttcagaaagcagcgctgcagggggccaaggcaactccaggagagggctaaacaaaccttccaaaatcccaaccatgtctaagaagaccaccactgcctcccccaggactccaggtcccaagcgataacactgtctaagcacccccaagccactatccactttgaatcctgctccatacattgggtgtatatttattctgaacgggagaagttatattgttaaaagtgtaaaagaataattgtgttatgaagctgccttannnnnnnnnnnnnngtaagttactattttcatgtgaatatttatgtagataaaatttgcctcctggtaaccctgtaatggatggggcccagaaatgaaatatttgagaaaaacaagtgaaaaggtcaagatacaaatgtgtattnnnnnnnnnnnngcctattaatagggtttctgcgcggtgcagggttgtaaacctgctttatcttttaggattattcctaaatgcatcttctttataaacttgacttgctatctcagcaagataaattatattaaaaaaataagaatcctgcagtgtttaaggaactctttttttgtaaatcacggacacctcaattagcaagaactgaggggagggctttttccattgtttaatgttttgtgatttttagctaaagagagggaacctcatctaagtaacatttgc

SEQ ID NO: 186950 - DNA, 1473 bp, Homo Sapiens
  misc_feature (89)..(99): n is a, c, g, or t
  misc_feature (226)..(243): n is a, c, g, or t
ttggctccttctgaaagttttctatacctgtctcctttctcagccacaaaataaatgttgggagaaatgatatataccactttcccagnnnnnnnnnnncttacacttgggacttggcaaattcctagtcacaatttttttcagcagtaacaggaaaccacttatcacatggagacctaatgtaataatagaaaaatactcataatagggagaaaccaagagaagnnnnnnnnnnnnnnnnnnccaactgtgttcattagaacagcgtgttctaagtatttgaaactgaatgtttattccttgatactaaaagttcttctccaatcctatcactgatagtgtccaaattctcaccaaattgctcctaagcttcaaatcagaagcagaaactggcaggccatggaccttaattgtccctcaggtagattttgtttggtatgcagaatgtttttaaaatatgagtggttattgaaaatatgatgtttcacataaaacctcattctcggacccatctttgctcatggcaacagttagctggagctgagtagcagctgcctgattagatgactctcagtccccatggcaccctgctccatgttacctagagcaggcacttgattccttgctgggcagtatccaataggcatttgattttgcccactcctacactaagcgaatgtgtacaaagtgtaaatgcattaggaaaaacaaactacccgcatcttctgttaggcaggatctgtacaataataattatgagtttgcttatgtaatctcacctcacctggatgatcactaatactaattcatttattactaaccttctggcttccttctctcaatatgcttacaaagtctccagtcacctacaatgctggctttctcccactgagtttgctgtttgcaatttttccatgaagtttgaacttcataaggtaattcatggcattgaactggttcatgaaaagaacactagagtctgtcatttgctttggcttgaagtatggttggtaacacaaattttcacctgctcttctaccatttgaatttgtgtagagggtgtttgcagagcaatgcccgtaatgcttagagaatgttctcctaaaagacttgcggaatcactctgtccttggaagtttcatatattgtttgatatgaagtgttagatagaatttccaatattggagcatatcaaaaagtattaaaactaaaaaggaccagagaattcttagattggcccggaaaggccaataaagagttagaatgaaaactcattacttttccattcccaatctagtgctagatgtataaatctttcttttgattcttcctaacaaaatattttctgggttaaaaccccagccaactcattgggttgtagccaaaaggttcactctcaagaagctttaatattttaaataaaatcatattgaatgtttccacctggaaatataatatttcagatataaaaca

SEQ ID NO: 186951 - DNA, 844 bp, Homo Sapiens
actttgtacaaaaaagttggctctacagctgacaggccaactcaacctactgccaaccaagacctgactggcacgaggaaaggtgcaataatgaagagttttcttctagttgtcaatgccctggcattaaccctgccttttttggctgtggaggttcaaaaccagaaacaaccagcatgccatgagaatgatgaaagaccattctatcagaaaacagctccatatgtcccaatgtattatgtgccaaatagctatccttattatggaaccaatttgtaccaacgtagaccagctatagcaattaataatccatatgtgcctcgcacatattatgcaaacccagctgtagttaggccacatgcccaaattcctcagcggcaatacctgccaaatagccacccacccactgtggtacgtctcccaaacctgcatccatcatttattgccatccccccaaagaaaattcaggataaaataatcatccctaccatcaataccattgctactgttgaacctacaccagctcctgccactgaaccaacggtggacagtgtagtcactccagaagctttttcagagtccatcatcacgagcacccctgagacaaccacagttgcagttactccacctacggcataaaaacaccaaggaaatatcaaagaacacaacgcaggacttgctgaaaccaaattactacttcacactctccttcagccatttgtctgccttcagtcaacagaaaatgtgattttcacagattcagctcttctctccttacattttacattcatgccacattcaatattttgattcttgcacaataaagcccaactgattgcaactg

SEQ ID NO: 186952 - DNA, 1268 bp, Homo Sapiens
  misc_feature (359)..(380): n is a, c, g, or t
  misc_feature (504)..(531): n is a, c, g, or t
ccaactttgtacaaaaaagttggggggaagaggcctgttccgctgtcgggtctctagttcttgcacgctctttaagagtctgcactggaggaactcctgccattaccagctcccttcttgcagaagggagggggaaacatacatttattcatgccagtctgttgcatgcaggctttttggcttcctaccttgcaacaaaataattgcaccaactccttagtgccgattccgcccacagagagtcctggagccacagtcttttttgctttgcattgtaggagagggactagtgctagagactatgtcgctttcctgagctaccgagagcgctcgtgaactggaatcaactgcttcagggnnnnnnnnnnnnnnnnnnnnnngacttgcctgggaggccgcgagaaacttgcattggaagcttcagcaaccagcattcgagaaactcctctctactttagcacggtctccagactcagccgagagacagcaaactgcagcgcggtnnnnnnnnnnnnnnnnnnnnnnnnnnnnctctccagcctgggaactataactcctctgcgagaggcggagaactccttccccaaatcttttggggacttttctctctttacccacctccgcccctgcgaggagttgaggggccagttcggccgccgcgcgcgtcttcccgttcggcgtgtgcttggcccggggaaccgggagggcccggcgatcgcgcggcggccgccgcgagggtgtgagcgcgcgtgggcgcccgccgagccgaggccatggtgcagcaaaccaacaatgccgagaacacggaagcgctgctggccggcgagagctcggactcgggcgccggcctcgagctgggaatcgcctcctcccccacgcccggctccaccgcctccacgggcggcaaggccgacgacccgagctggtgcaagaccccgagtgggcacatcaagcgacccatgaacgccttcatggtgtggtcgcacatcgagcggcgcaagatcatggagcagtcgcccgacatgcacaacgccgagatctccaagcggctgggccaacgctggaagctgctcaaagacagcgacaagatccctttcattctagaggcggagcggctgcgcctcaagcacatggctgactaccccgactacgagtaccggcccaggaagaaggtgaagtccggcaacgccaactccagctcctcggccgccgcctcctccaagccgggggagaagggagacaaggtcggtggcagtggcgggggcggc

SEQ ID NO: 186953 - DNA, 2472 bp, Homo Sapiens
  misc_feature (1893)..(2023): n is a, c, g, or t
  misc_feature (2026)..(2048): n is a, c, g, or t
ttggcgcccaggcggctgcccgtgacctgcctgggcgcggggagctgaaagccggaaggggcaagacgggttcagttcgtcatggggctgtttggaaagacccaggagaagccgcccaaagaactggtcaatgagtggtcattgaagataagaaaggaaatgagagttgttgacaggcaaataagggatatccaaagagaagaagaaaaagtgaaacgatctgtgaaagatgctgccaagaagggccagaaggatgtctgcatagttctggccaaggagatgatcaggtcaaggaaggctgtgagcaagctgtatgcatccaaagcacacatgaactcagtgctcatggggatgaagaaccagctcgcggtcttgcgagtggctggttccctgcagaagagcacagaagtgatgaaggccatgcaaagtcttgtgaagattccagagattcaggccaccatgagggagttgtccaaagaaatgatgaaggctgggatcatagaggagatgttagaggacacttttgaaagcatggacgatcaggaagaaatggaggaagaagcagaaatggaaattgacagaattctctttgaaattacagcaggggccttgggcaaagcacccagtaaagtgactgatgcccttccagagccagaacctccaggagcgatggctgcctcagaggatgaggaggaggaggaagaggctctggaggccatgcagtcccggctggccacactccgcagctaggggctgcctaccccgctgggtgtgcacacactcctctcaagagctgccattttatgtgtctcttgcactacacctctgttgtgaggactaccattttggagaagttctgtttgtctcttttcattctctgcccaggttttgggatcgcaaagggattgttcttataaaagtggcataaataaatgcatcatttttaggagtatagacagatatatcttattgtggggaggggaaagaaatccatctgctcatgaagcacttctgaaaatataggtgattgcctgaatgtcgaagactctacttttgtctataaaacactatataaatgaattttaataaatttttgcttcagcacttggccccattgtagattgccctgtgcagtaaactttcaaggtgtcagctgccccagattgcttcatttgctgggtgtggaaagagttgctatggccaggcatatgggatttggaagctcagcagaagtgacttctgctctgtggttgctgctccccggctttcacagacatggtatggcagccattcttttatctatttaaccaagaggatgctggggaattgtgctgcttgtcctgttggctggtggctgcattatgtcctggggtgtgcatgtgggtctatttagagcttctgtcccttccttcccattgcaagttgcacccagatgagacagctgtagtactaggtctctttcacctctcattgcctgtccctgcttcgagctggttgtcttgtgcgtgggacatgggccttcctatctgtgttttctcaaagtcaggagctgaccaggagcacactaaggtgtggtcatgcatcataaccaacattcactcatctgggacattcttaagatacatttataaatcatttcagcagtagtactttgtatgtgttgagagtttacagagctctttgacatacgcgatcttagtctttacaaataaggaaaacagctcagtttgggaagtatcagagatgggattcaaacccagatcctctggtccaagttgtatgtgcactgaactaatcaggcaggaaaaaagcccagccactgtctcacagattgttttttgtatattgtagcaaaatcctgaaacaatggggtccttccagtctcatcatacnnnnnnnnnnnnnnnnnnnnnnnnnnnnnnnnnnnnnnnnnnnnnnnnnnnnnnnnnnnnnnnnnnnnnnnnnnnnnnnnnnnnnnnnnnnnnnnnnnnnnnnnnnnnnnnnnnnnnnnnnnnnnnnnnnnccnnnnnnnnnnnnnnnnnnnnnnntttcatttttgagtccagaggaccctcctattactcttgatttcatcttcagagtgtagttaaaaaattattttaaataattatttttttaaatcagttgtaggttcacagcaaaagtggacaaaaagaaatttctcatatatcccgtgccctcacacatgcatagcctcccaccactatcagtatcccacaccagagtggtacatttgttacaatcaataaacctccattgacacatcattatcacccaaagtccatagtttacatgaagattcactctggtgttgtacattgtatgggcttagacaaatgtatgatgatatctacaattatggaatcatacagaatagtttcactgccctaaaacttctctatgcttcacctgttcatccctttcttccctaatcccctgggcaaccacttt

SEQ ID NO: 186954 - DNA, 1635 bp, Homo Sapiens
caaatttgtacaatggtttcattaaatgcctatttagaggataaccatagtggatgacacagaaaaaagccaaacccagaatgcaagaatcgtagccagcagagcacgtggaaacaacgtcccaagttgcaggtagcagcttgcaggataaccacagttggcgacgctttcaggcagctgggagaattctcagttgtccattttatggttaaatggttttactaaggtctaaaaaattcatttctaactcctagacttatgtttccattactatataaagaatgagccaaacaaataaataacaaaatattcactatggaccccaaaatttcaaggcatgaagagagccccaaattctctgtgaactgcaaagagaaaccattagtacaggaatagatgaagaaattgtttttgagtataatataaacataaacaaatctcttaacagcacgagtgtcaacaaatgcttttgttgttgcaaaaacagtctcaaaaagagtggtgacaaggagactgacaaggagaaatgagctattttttcatctccaaaattgcacttcctggtccacggttcttagcactgcagatgttgcagaactgtgcagcagagttcatgctgggcatgggcaggcactccttgtggaacatgtgccggcaatggaagaccaccacgctgaagggcttagctgcatctgatggaagaataggggaaaggcacgactcacagatgttctcctcatcaacaagaacacctttcatttgagttcggtgcattttcttcagtaaggacaaagagtcagctacgagaatcttcttgcagccttcacgaagcagaatttgcaaattgtagtcttgcagaattttaaccaaggaatctctcaaattggggatctccattccttccttaatacggtgaatcagtagaattgggtcaacatgtgtgccaatgttgtttaacaagccagtaataaatggtggtttgtcaatggaatataaaatcaaatcttcccacagctctccatcatcttgctccttggcaaattcgattgctttatcaacatcatgtaattcctccataatcatcttcagggcacttcggctattacccattcggctcagaagataaactgtctcttctacaaagtttctctgttgacagatctcaagagccttcaattaaagcagggtaaaaatgttactataggcgaccaaataagaacaaacagtaataaagtcatttaaacttacacttgaaagaatttttccacagcttctttaaaaataaaacaaagcaaacaaataaagaacacatctccctagaatagctgcactcagttacctctcagaggtactggactctacacaattcaatttaaaacatatttgaagctactcagaacatttcatgagcaagagtagaaaacaagacaccaaatgaaaagaaagggcctttcccactaagctttctctctttacactacttcaggtttccttacagcactgcttccttccaaatctgtagtcatttgtttaagctctgtttccctccattaagatgtaaggaatgttgctcatggttgaacttttcctagtattgtgcataccataagctcgggaaatatgaattcatgccaa

SEQ ID NO: 186955 - DNA, 2245 bp, Homo Sapiens
ttggcagaggagcaggaaactgggtcccttgaagaatctacagatgagtctgaggaagaagagagcgaagaggaacccaagctgaagtatgaaaggctttccaatggggtaactgaaatacttcagaaggatgcagctagctgcatgacagtccatgacaagtttttggcattgggcacacattatggcaaggtttatttacttgatgtccaggggaacatcactcagaagtttgatgtaagtcctgtgaagataaatcagattagcttggatgaaagtggagagcacatgggtgtgtgttcagaggatggcaaggtgcaggtatttggactgtattctggagaagaatttcacgagacttttgactgtcccattaaaattattgctgtgcacccacatttcgtgagatccagttgcaagcagtttgtgaccggagggaagaagctgctactgtttgaacggtcttggatgaacagatggaagtctgctgttctgcatgaaggggaagggaacataaggagtgtgaagtggagaggccatctgattgcttggcaataatatgggtgtgaagatttttgacatcatctcaaagcaaagaatcaccaatgtgccccgggatgatataagtcttcgcccagacatgtatccctgcagcctctgctggaaggacaatgtgacactgattattggctgggggacttctgtcaaggtgtgctcagtgaaggaacggcatgccagtgaaatgagggatttgccaagtcgatatgttgaaatagtgtctcagtttgaaactgaattctacatcagtggacttgcacctctctgtgatcagcttgttgtactttcgtatgtaaaggagatttcagaaaaaacggaaagagaatactgtgccaggcctagactggacatcatccagccactttctgagacttgtgaagagatctcttctgatgctttgacagtcagaggctttcaggagaatgaatgtagagattatcatttagaatactctgaaggggaatcacttttttacatcgtgagtccgagagatgttgtagtggccaaggaacgagaccaagatgatcacattgactggctccttgaaaagaagaaatatgaagaagcattgatggcagctgaaattagccaaaaaaatattaaaagacataagattctggatattggcttggcatatataaatcacctggtggagagaggagactatgacatagcagcacgcaaatgccagaaaattcttgggaaaaatgcagcactctgggaatatgaagtttataaatttaaagaaattggacagcttaaggctattagtccttatttgccaagaggtgatccagttctgaaaccactcatctatgaaatgatcttacatgaatttttggagagtgattatgagggttttgccacattgatccgagaatggcctggagatctgtataataattcagtcatagttcaagcagttcgggatcatttgaagaaagatagtcagaacaagactttacttaaaaccctggcagaattgtacacctatgacaagaactatggcaatgctctggaaatatacttaacattaagacataaagacgtttttcagttgatccacaagcataatcttttcagttctatcaaggataaaattgttttattaatggattttgattcagagaaagctgttgacatgcttttggacaatgaagataaaatttcaattaaaaaggtagtggaagaattggaagacagaccagagctacagcatgtgtatttgcataagcttttcaagagagaccaccataaggggcagcgttaccatgaaaaacagatcagtctttatgctgaatatgatcgaccaaacttacttccctttctccgagacagtacccattgcccacttgaaaaggctcttgagatctgtcaacagagaaactttgtagaagagacagtttatcttctgagccgaatgggtaatagccgaagtgccctgaagatgattatggaggatttacatgatgttgataaagcaatcgaatttgccaaggagcaagatgatggagagctgtgggaagaattgattttatattccattgacaaacaccatttattactggcttgttaaacacattggcacacatgttgacccaattctactgattcacccgtattaaggaaggaatggagatccccattttgagagattctttgtttaaattctgcagactacaatttg

SEQ ID NO: 186956 - DNA, 1205 bp, Homo Sapiens
  misc_feature (1118)..(1126): n is a, c, g, or t
ttggcatagggttgcagcaagccctggattcagagtgttaaacagaggcttgccctcttcaggacaacagttccaattccaaggagcctacctgaggtccctactctcactggggtccccaggatgaaaacgacaatgtgcctttttattattatttatttggtggtcctgtgttatttaagagatcaaatgtataaccacctagctcttttcacctgacttagtaataactcatactaactggtttggatgcctgggttgtgacttctactgaccgctagataaacatgtgcctgtcccccaggtggtgggaataatttacaatctgtccaaccagaaaagaatgtgtgtgtttgagcagcattgacacatatctgctttgataagagacttcctgattctctaggtcggttcgtggttatcccattgtggaaattcatcttgaatcccattgtcctatagtcctagcaataagagaaatttcctcaagtttccatgtgcggttctcctagctgcagcaatactttgacatttaaagagaaatttagagaatattctcatcctctaaaaatgtttaaatatataccaaacagtggccccctgcattagttttctgttgccactgcaacccattacttggtagcttaaaaacaacacattagcttatagtcctggggatcagaattccaaaatggatgtccctgaatgaaaatcaaggtgtcagcagagctgtgctccttctgaaggctctagggagaagccggttccttgccatttcaagcttctagaggctggctgcattcccaggctccagtggctggtcaagcttttctcacatggcatcactgtgacactggccctcccacttccctctttgacttacaaagcccaccaggaagatccaggataatctctccatctaaagatccttcatcatcctggaagagccttttgccatgcaagacaacatagccacaggtggggattaggaccaggacatctttggggtgctgttattctgcctaccacaccttcctgccactgactcccacaggagaggctacagaatgatctggcgcacagggatgttttgtttagcttgcggactctaacacttnnnnnnnnncccagatcagaagatctggccatgctggggctcacattctcacctagcaacaactggctggagctgggcaccagctctg

SEQ ID NO: 186957 - DNA, 1801 bp, Homo Sapiens
aagtattaattacttaaaaaaaggccttaagtctttcaggtatttagagagctctggaaggctttacccagttgacatacggtggtagtagaaatattaaatatgcaacacacaaagcctgcaacttgacattggtcactgaaacaaaaattgaattcctaaatccaagcaatcaaaagatgtttattttttatagaaagatctgtaaaaaaataataatttttcaaacagctttactttcatagagaaaactttctacagaagttgactaagattttaaattgtaccatcattaaataaggtgggacaccatatgaatttcattgcactggaagaaatgcaaagcattttttaatataaagtatacagagcattctagtcaactacagctgtgttacagctatgtgttcttttggatttggtccaaagaaacctgagtctgtttccagagagaatgaaaaatgttatagacacctgatcagttactcctcactgtaggatgcacaaaaatgacattccttgtagatcccactgaatccagtttcccaacacttgatactttcctttttcccttcccccaccccagttcactttgggtttcaggttcaattctcgaatcacaggcatccagattttcttcataacaaacacatcccatggtcagatgaactacccagttttccaggatgacatcacctcttctgctcccaaatttcggccatatttaggtccaaatctttaaggccttttaaggcttgaagatttccagtgtaaaaagctacatctgctgtgaccaacccattttgaggtcctccatcatttatcacatttaagtgagataactgctttttcaagtggagtttataacttgcattaattcttaaaaataacatctgtgtttgttcttctggaaggagatcaaatatagcttcgtgcatttttgtcatttgcttacaaatattcctgaaacaggcagaaggaacaggagccttcacttcatacttagataacagcttgtcaaataagctatccattatcgctacaagcttagctgatatttcagctatgtgatcatggtagtccttagtgatatgatcaaaatgcctaagcatgctatattgcttaggtggtagtcgagcttcaaaatgagcccggatcacaggaatgtagtgcacaattaactgcaaacatcgtgaagaaagagccaaattttttgtagttatcgtttttagtccaacaacttgcagtgcaccagctccaagaactaactggcaacttcttgaattgaagtacttcaataaatctgacagacgagtaagcatgtcagtagtaacagatgggatgttatccacacactggcaatattcaaggataattcttattaacagcaatacggttccaacaactgcatactgttgtccctcgacaataagaacttcagctggtttcctttcttctgtggctcctgattttttttcaggtaaagcaatcttcccatctgacagagaatcaacaagatcctgaaattctgcaggaacatctgcttgcttccagcgctcattgtctaagaggaggctgagcttggtttttctctcttcatgaaacctatttacaaacttaatagcttggctctgaagtgctccaagtaatgacgtgctttttcttccacagatctgttcggtgtctaaaatgaatgtttccattaatctagaaagtgttatgaattccatggaatttagcttctcaagaaaaccatcctttgctcttgacatgagaaatttgacagctcgatcatggccaa

SEQ ID NO: 186958 - DNA, 3899 bp, Homo Sapiens
ttggctacctgggcagcgatgggcgcacctgtgtgtccaactgcacggctagccagtttgtatgcaagaacgacaagtgcatccccttctggtggaagtgtgacaccgaggacgactgcggggaccactcagacgagcccccggactgccctgagttcaagtgccggcccggacagttccagtgctccacaggtatctgcacaaaccctgccttcatctgcgatggcgacaatgactgccaggacaacagtgacgaggccaactgtgacatccacgtctgcttgcccagtcagttcaaatgcaccaacaccaaccgctgtattcccggcatcttccgctgcaatgggcaggacaactgcggagatggggaggatgagagggactgccccgaggtgacctgcgcccccaaccagttccagtgctccattaccaaacggtgcatcccccgggtctgggtctgcgaccgggacaatgactgtgtggatggcagtgatgagcccgccaactgcacccagatgacctgtggtgtggacgagttccgctgcaaggattcgggccgctgcatcccagcgcgttggaagtgtgacggagaggatgactgtggggatggctcggatgagcccaaggaagagtgtgatgaacgcacctgtgagccataccagttccgctgcaagaacaaccgctgcgtgcccggccgctggcagtgcgactacgacaacgattgcggtgacaactccgatgaagagagctgcacccctcggccctgctccgagagtgagttctcctgtgccaacggccgctgcatcgcggggcgctggaaatgcgatggagaccacgactgcgcggacggctcggacgagaaagactgcaccccccgctgtgacatggaccagttccagtgcaagagcggccactgcatccccctgcgctggcgctgtgacgcagacgccgactgcatggacggcagcgacgaggaggcctgcggcactggcgtgcggacctgccccctggacgagttccagtgcaacaacaccttgtgcaagccgctggcctggaagtgcgatggcgaggatgactgtggggacaactcagatgagaaccccgaggagtgtgcccggttcgtgtgccctcccaaccggcccttccgttgcaagaatgaccgcgtctgtctgtggatcgggcgccaatgcgatggcacggacaactgtggggatgggactgatgaagaggactgtgagccccccacagcccacaccacccactgcaaagacaagaaggagtttctgtgccggaaccagcgctgcctctcctcctccctgcgctgcaacatgttcgatgactgcggggacggctctgacgaggaggactgcagcatcgaccccaagctgaccagctgcgccaccaatgccagcatctgtggggacgaggcacgctgcgtgcgcaccgagaaagcggcctactgtgcctgccgctcgggcttccacaccgtgcccggccagcccggatgccaagacatcaacgagtgcctgcgcttcggcacctgctcccagctctgcaacaacaccaagggcggccacctctgcagctgcgctcggaacttcatgaagacgcacaacacctgcaaggccgaaggctctgagtaccaggtcctgtacatcgctgatgacaatgagatccgcagcctgttccccggccacccccattcggcttacgagcaggcattccagggtgacgagagtgtccgcattgatgctatggatgtccatgtcaaggctggccgtgtctattggaccaactggcacacgggcaccatctcctaccgcagcctgccacctgctgcgcctcctaccacttccaaccgccaccggcgacagattgaccggggtgtcacccacctcaacatttcagggctgaagatgcccagaggcatcgccatcgactgggtggccggaaacgtgtactggaccgactcgggccgagatgtgattgaggtggcgcagatgaagggcgagaaccgcaagacgctcatctcgggcatgattgacgagccccacgccattgtggtggacccactgagggggaccatgtactggtcagactggggcaaccaccccaagattgagacggcagcgatggatgggacgcttcgggagacactggtgcaggacaacattcagtggcccacaggcctggccgtggattatcacaatgagcggctgtactgggcagacgccaagctttcagtcatcggcagcatccggctcaatggcacggaccccattgtggctgctgacagcaaacgaggcctaagtcaccccttcagcatcgacgtctttgaggattacatctatggtgtcacctacatcaataatcgtgtcttcaagatccataagtttggccacagccccttggtcaacctgacagggggcctgagccacgcctctgacgtggtcctttaccatcagcacaagcagcccgaagtgaccaacccatgtgaccgcaagaaatgcgagtggctctgcctgctgagccccagtgggcctgtctgcacctgtcccaatgggaagcggctggacaacggcacatgcgtgcctgtgccctctccaacgccccccccagatgctccccggcctggaacctgtaacctgcagtgcttcaacggtggcagctgtttcctcaatgcacggaggcagcccaagtgccgctgccaaccccgctacacgggtgacaagtgtgaactggaccagtgctgggagcactgtcgcaatgggggcacctgtgctgcctccccctctggcatgcccacgtgccggtgccccacgggcttcacgggccccaaatgcacccagcaggtgtgtgcgggctactgtgccaacaacagcacctgcactgtcaaccagggcaaccagccccagtgccgatgcctacccggcttcctgggcgaccgctgccagtaccggcagtgctctggctactgtgagaactttggcacatgccagatggctgctgatggctcccgacaatgccgctgcactgcctactttgagggatcgaggtgtgaggtgaacaagtgcagccgctgtctcgaaggggcctgtgtggtcaacaagcagagtggggatgtcacctgcaactgcacggatggccgggtggcccccagctgtctgacctgcgtcggccactgcagcaatggcggctcctgtaccatgaacagcaaaatgatgcctgagtgccagtgcccaccccacatgacagggccccggtgtgaggagcacgtcttcagccagcagcagccaggacatatagcctccatcctaatccctctgctgttgctgctgctgctggttctggtggccggagtggtattctggtataagcggcgagtccaaggggctaagggcttccagcaccaacggatgaccaacggggccatgaacgtggagattggaaaccccacctacaagatgtacgaaggcggagagcctgatgatgtgggaggcctactggacgctgactttgccctggaccctgacaagcccaccaacttcaccaaccccgtgtatgccacactctacatggggggccatggcagtcgccactccctggccagcacggacgagaagcgagaactcctgggccggggccctgaggacgagataggggaccccttggcatagggccctgccccgtcggactgcccccagaaagcctcctgccccctgccggtgaagtccttcagtgagcccctccccagccagcccttccctggccccgccggatgtataaatgtaaaaatgaaggaattacattttatatgtgagcgagcaagccggcaagcgagcacagtattatttctccatcccctccctgcctgctccttggcacccccatgctgcctt

SEQ ID NO: 186959 - DNA, 2271 bp, Homo Sapiens
ttggcttttgaaagggcccattctttacctcatttagataaatcagataggtctttcttgcttacttcattaacaactcaattaattataaccacatcacatgaagattagatgtaattaggacctgtccaatgtctttacatcccagtccttctgtactcctaaccttaagcaaattggtcgacctctgtaggtctaagtattctgtgtgtaacatgaaagctttgaattaggccacgtttccggctaattttttaaaaagtgtttgtgatcctgtgaattccataacccaccaccttccttttccaacccttcaccttttaaatccactttccatctctccagaggaaagggcattgagagtagaggaagcaagtccctttcactaaagcagcctggtttgaaaaagccggtaatctctgaactgtctcttgcttgaacaagaaaaactccctctgaaatacctttttctccttgtgatagcaacagaaaccaagcagcaacagcccttggaaagaggctaaatttttcttgacttctgcagcaacaaagaccgtgaaaagttggcacttctggcctaacgctgccgtcatcctacccctcaccccagggcaacccaggctggacatttagtgcctccctctttattcctctgtgatcatccagatcagcacttgactgtttattttcaaatctcacgaacctcaccccaagatcttcacattctggatctcagctgctcttgaaggacagtgacttgttaccaccgcaacagcagagcctgccatccccaacagatcaccagttgtccctgacatcgtgccctaccttgtctccctttgtggtctcctaaatgcccatctcgttggccttggttcggctagtggtatggaggggtgctgcctagcactgacctgagagtgtgtgtgacccactgacccaatggacatcaaaggccagttctggaatgatgacgactcggagggagataatgaatcagaggaatttctctatggcgttcaggggagctgtgcagctgacctgtatcgacacccacagcttgatgcagacattgaagccgtgaaggagatctacagtgagaactctgtatccatcagagaatatggaactatcgatgacgtggacattgacctccacatcaacatcagcttcctcgatgaggaagtctctacagcctggaaggtcctccggacagaacctattgtgttgaggctgcgattttctctctcccagtacctagatggaccagaaccatccattgaggttttccagccatcaaataaggaaggatttgggctgggtcttcagttgaaaaagatcctgggtatgtttacatcccaacaatggaaacatctgagcaatgatttcttgaagacccagcaggagaagaggcacagttggttcaaggcaagtggtaccatcaagaagttccgagctggcctcagcatcttttcacccatccccaagtctcccagtttccctatcatacaggactccatgctgaaaggcaaactaggtgtaccagagcttcgggttgggcgcctcatgaaccgttccatctcctgtaccatgaagaaccccaaagtggaagtgtttggctaccctcccagcccccaggtcagtggtcactgcaagaacattcccactctggagtatggattcctcgttcagatcatgaagtatgcagaacagaggattccaacattgaatgagtactgtgtggtgtgtgatgagcagcatgtcttccaaaatggatctatgctgaagccagctgtctgtactcgtgaactatgcgttttctccttctacacactgggcgtcatgtctggagctgcagaggaggtggccactggagcagaggtggtggatctgctggtggccatgtgtagggcagctttagagtcccctagaaagagcatcatctttgagccttatccctctgtggtggaccccactgatcccaagactctggcctttaaccctaagaagaagaattatgagcggcttcagaaagctctggatagtgtgatgtctattcgggagatgacccagggctcatatttggaaatcaagaaacagatggacaagttggatcccctggcccatcctctcctgcagtggatcatctctagcaacaggtcacacattgtcaaactacctctcagcagtgggtcccacattgagaactggcattcgatcctgcgcaatggctggtcaatgcatcctacaccaaactgcaggaatgggaaa

SEQ ID NO: 186960 - DNA, 1644 bp, Homo Sapiens
ttggcgaccttttggccaggttagggagggggcgacgctgagatgggggcggcggcggcggaagcggatcgcactctctttgtgggcaaccttgaaacgaaagtgaccgaggagctccttttcgagcttttccaccaggctgggccagtaataaaggtgaaaattccaaaagataaggatggtaaaccaaagcagtttgcgtttgtgaatttcaaacatgaagtgtctgttccttatgcaatgaatctacttaatggaatcaaactttatggaaggcctatcaaaattcaatttagatcaggaagtagtcatgccccacaagatgtcagtttgtcatatccccaacatcatgttggaaattcaagccctacctccacatctcctagcagcaggtacgaaaggactatggataacatgacttcatcagcacagataattcagagatctttctcttctccagaaaattttcagagacaagcagtgatgaacagtgctttgagacaaatgtcatatggtggaaaatttggttcttcacctctggatcaatcaggattttcaccatcagttcaatcacacagtcatagtttcaatcagtcttcaagctcccagtggcgccaaggtacaccatcatcacagcgtaaagtcagaatgaattcttatccctacctagcagatagacattatagccgggaacagcgttacactgatcatgggtctgaccatcattacagaggaaagagagatgatttcttctatgaagacaggaatcatgatgactggagccatgactatgataacagaagagacagtagtagagatggaaaatggcgctcatctcgacactaacacatgttaaaaggacattgtttttatagggtcattttaggccctttgactaagttgatatggaaatattttgttgaaaaactgtacagagcagctttacaagttgtcacatttctttataaatttttttaaagctacagtttaatacaaaatgaattgcggttttattacattaataacctttcacctcagggttttatgaagaggaaagggttttatgcaaaagaaagtgctacaattcctaatcattttagacactttaggagggggtgaagttgtatgataaagcagatattttaattatttgttatctttttgtattgcaagaaatttcttgctagtgaatcaagaaaacatccagattgacagtctaaaatggctactggtattttagttaattcaaaaatgaaacttttcagtgattcactttactaacattctatttgagaaggcttattggtaaagtttggggataaaggcattgcttaacttcttatataatttaggtataaattctgtgacatgctcttgagctttaccctagttgaacatacatgtgtagatttacacatactgtttcattctaaaatttagaaattgttcattaaatcccatttgaggtataagtcactcacgaagttaaaatatctctacacgtatatttttacattaaaaatacagtgttagcataaatccccttttcagaagaacaaaaatgtcaggtgcatagttagataaatggtaaaatgttttactgaaaagcatacttttttggaaaatagattcatgaagcccttt

SEQ ID NO: 186961 - DNA, 1051 bp, Homo Sapiens
ttgggaggattattctggtcttactgaagacatgctgttgcctagaccttcatcatttcagaataatgtacagtctcaagatcctcaggtatccactaaaactggagagcctttgatgtctgaatctacctccaacattgaccaaggtccacgtgaccattctgtgcagctgccaaaaccagtgcataagccaaatcggtggtgcttttacagttcttgtgaacagctagaccagcttattgaagctcttaattctagaggacatagagaaagtgccttaaaagaaactttgttacaagagaaaagcagaatatgtgcacagctagcccgtttttctgaagagaaatttcatttttcagacaaacctcagcctgatagcaaaccaacatatagtcggggaagatcttccaatgcatatgatccatctcagatgtgtgcagaaaagcaacttgaactaaggctgagagattttcttttagatattgaagatagaatctaccaaggaacattaggagccatcaaggttacagatcgacatatctggagatcagcattagaaagtggacggtatgagctgttaagtgaggaaaacaaggaaaatgggataattaaaactgtgaatgaagatgtagaagagatggaaattgatgaacaaacaaaggtcatagtaaaagacagacttttggggataaaaacagaaactccaagtactgtatcaacaaatgcaagtacaccacaatcagtgagcagtgtggttcattatctggcaatggcactctttcaaatagagcagggcattgagcggcgttttctgaaagctccacttgatgccagtgacagtgggcgttcttataaaacagttctggaccgttggagagagtctctcctttcttctgctagtctatcccaagtttttcttcacctatccaccttggatcgtagcgtgatatggtctaaatctatactgaatgcgcgttgcaagatatgtcgaaagaaaggcgatgctgaaaacatggttctttgtgatggctgtgataggggtcatcatacc

SEQ ID NO: 186962 - DNA, 2471 bp, Homo Sapiens
  misc_feature (2134)..(2142): n is a, c, g, or t
ttggctattttcttaaaagataatttaagttggagaacagtccatcttttatatgagatgaggaagtaacatacttcatgcaaatgaatagtatagacttggaatcatatgtaaccagtttttaaaattagctcaagatttgatacaaagactagattgagaacacattgtctgaattatttttctctttagctattaaaatcccttagcatttgatttatgaatttaagtaattccttatgtcataaacgagatgcggctcagcaaatattttccatgagatttttgtttttaatatcagcatggtctttttgttaagtatcagaagaaaagaaatgtaaaatctaacctatatttaaactaccaacaaactatttctaggaagattactaggtttgcctaaaaaattgtaatcactttcccttttcatttaagatgccagtgacagtgggcgttcttataaaacagttctggaccgttggagagagtctctcctttcttctgctagtctatcccaagtttttcttcacctatccaccttggatcgtagcgtgatatggtctaaatctatactgaatgcgcgttgcaagatatgtcgaaagaaaggcgatgctgaaaacatggttctttgtgatggctgtgataggggtcatcatacctactgtgttcgaccaaagctcaagactgtgcctgaaggagactggttttgtccagaatgtcgaccaaagcaacgttctagaagactctcctctagacagagaccatccttggaaagtgatgaagatgtggaagacagtatgggaggtgaggatgatgaagttgatggcgatgaagaagaaggtcaaagtgaggaggaagagtatgaggtagaacaagatgaagatgactctcaagaagaggaagaagtcagcctacccaaacgaggaagaccacaagttagattgccagttaaaacaagagggaaacttagctcttctttctcaagtcgtggccaacaacaagaacctggaagatacccttcaaggagtcagcagagcacacccaaaacaactgtttcttctaaaactggtagaagcctaagaaagataaactctgctcctcctacagaaacaaaatctttaagaattgccagtcgttctactcgccacagtcatggcccactgcaagcagatgtatttgtggaattgcttagtcctcgtagaaaacgcagaggcaggaaaagtgctaataatacaccagaaaatagtcccaacttccctaacttcagagtcattgccacaaagtcaagtgaacagtcaagatctgtaaatattgcttcaaaactttctctccaagagagtgaatccaaaagaagatgcagaaaaagacaatctccagagccatcgcctgtgacactgggtcgaaggagttctggccgacagggaggagttcatgaattgtctgcttttgaacaacttgttgtagaattggtacgacatgatgacagctggccttttttgaaacttgtttctaaaatccaggtcccagactactatgacatcatcaaaaagcccattgccttaaatataattcgtgaaaaagtgaataagtgtgaatataaattagcatctgagtttattgatgacattgagttaatgttttcgaactgctttgaatacaaccctcgtaacacaagtgaagcaaaagctggaactaggcttcaagcattttttcatattcaggctcaaaagcttggactccacgtcacacccagtaatgtggaccaagttagcacaccaccggctgcaaaaaagtcacgaatctgactttgtccttctaaaggatatatttgaagaaaaacaaattgttcatgaaaatggaacattaaatcatgctgtataaagcaataacaaacaattgattgaccacatgaaagtgtggcctgcactatattctcaattttaatattaagcactcaggagaatgtaggaaagatatcctttgctacagttttgttcagtatctaataagtttgatagatgtattggatacagtactggtttacagaggtttttgtacatttttgagatcattcatgtgtccagagatcttggaaaatattttttcacccacgatttattttgttattgatgannnnnnnnnaaagtggtggtattaagggagagttatctacatggatgagtcttccgctatagcacagtttagaaaaggtgtttatgtcttaattaattgtttgagtacattctttcaacactacacatgaatgaatccaatcttataaccttgaagtgctgtaccagtgctggctgcaggtattaagtccaagtttattaactagatatttatttagtattgacagtaatcttgtgactttgttttgtatttataacatttatacctgaaaaatgttccttaaatgttttaaaccttttactgtgttttttattcctctaacttcccttaatgatcaa

SEQ ID NO: 186963 - DNA, 1147 bp, Homo Sapiens
ttggcctaaaaacacttagcgctatttacagccagttgggcaatgcttatttctatttgcatgattatgccaaagcattagaatatcaccatcatgatttaacccttgcaaggactattggagaccagctgggggaagcgaaagctagtggtaatctgggaaacaccttaaaagttcttgggaattttgacgaagccatagtttgttgtcagcgacacctagatatttccagagagcttaatgacaaggtgggagaagcaagagcactttacaatcttgggaatgtgtatcatgccaaagggaaaagttttggttgccctggtccccaggatgtaggagaatttccagaagaagtgagagatgctctgcaggcagccgtggatttttatgaggaaaacctatcattagtgactgctttgggtgaccgagcggcacaaggacgtgcctttggaaatcttggaaacacacattacctccttggcaacttcagggatgcagttatagctcatgagcagcgtctccttattgcaaaagaatttggagataaagcagctgaaagaagagcatatagcaaccttggaaatgcatatatatttcttggtgaatttgaaactgcctcggaatactacaagaagacactactgttggcccgacagcttaaagaccgagctgtagaagcacagtcttgttacagtcttggaaatacatatactttacttcaagactatgaaaaggccattgattatcatctgaagcacttagcaattgctcaagagctgaatgatagaattggtgaaggaagagcatgttggagcttaggaaatgcatacacagcactaggaaatcatgatcaagcaatgcattttgctgaaaagcacttggaaatttcaagagaggttggggataaaagtggtgaactaacagcacgacttaatctctcagaccttcaaatggttcttggtctgagctacagcacaaataactccataatgtctgaaaatactgaaattgatagcagtttgaatggtgtacgccccaagttgggacgccggcatagtatggaaaatatggaacttatgaagttaacaccagaaaaggtacagaactggaacagtgaaattcttgctaagcaaaaacctcttattgc

SEQ ID NO: 186964 - DNA, 1056 bp, Homo Sapiens
ttggatccacgtagtgcatttgagaggttctatctgttcaagagaggaaatttaatatccgtgactactgtatgtcaaatgatttagtgccttatttaatttgttcctctaggagtcctgtgcacttatcttgggggaaacattgttccattcttagtaacatgcctgtttggcctgtggtctgaggtacttacaacttgctgcagtgtggtaaatgtgtcccttttgaaacactgttctggggacttcagagatgacggactgcaacctaccacctcataaatgagggatctgaggtacaaactggaacccgggtcttctgggctcagagaactctcctcactacagcagactgcctgtttccatttaggggaatgagatgctctttcataaatgataccaagtgcaagagaacttaaggcagctccaatcgaagactgtcttggctgcttctggaaactacagatcactactcccgaagtcaaaaacgactagaacacagcttaaaaatcaagccatttaattgtatctttgaaggtaaacaatatatggagctggatcacaacccctgaggatgccagagctatgggtccagaacatggtgtggtattatcaacagagttcagaagggtctgaactctacgtgttaccagagaacataatgcaattcatgcattccacttagcaattttgtaaaataccagaaacagaccccaagagtctttcaagatgaggaaaattcaactcctggttttagagataaatgaatgaagagtaccaaaatatttgttgacttctcttcatttttctcatacaatctgaagcctgagctgactatcatatccccaactcacagcagcgaaagctgcagttcagatttgagatcagtctccattcacttccacgtagcaccacagcaagagtgaccggaggcagagagctcttgttgggtcagctttctaataagcatgtcaagtgaaaaagaaccctctagcagcacactgatttagtttgtaagattttaatttacaaattaaaaaagctatttaatacatg

SEQ ID NO: 186965 - DNA, 940 bp, Homo Sapiens
ttggcaaagacttcacggacaaagtcccttggacagagagaagccgggatggaaactccaaacaccacagaggactatgacacgaccacagagtttgactatggggatgcaactccgtgccagaaggtgaacgagagggcctttggggcccaactgctgccccctctgtactccttggtatttgtcattggcctggttggaaacatcctggtggtcctggtccttgtgcaatacaagaggctaaaaaacatgaccagcatctacctcctgaacctggccatttctgacctgctcttcctgttcacgcttcccttctggatcgactacaagttgaaggatgactgggtttttggtgatgccatgtgtaagatcctctctgggttttattacacaggcttgtacagcgagatctttttcatcatcctgctgacgattgacaggtacctggccatcgtccacgccgtgtttgccttgcgggcacggaccgtcacttttggtgtcatcaccagcatcatcatttgggccctggccatcttggcttccatgccaggcttatacttttccaagacccaatgggaattcactcaccacacctgcagccttcactttcctcacgaaagcctacgagagtggaagctgtttcaggctctgaaactgaacctctttgggctggtattgcctttgttggtcatgatcatctgctacacagggattataaagattctgctaagacgaccaaatgagaagaaatccaaagctgtccgtttgatttttgtcatcatgatcatcttttttctcttttggaccccctacaatttgactatacttatttctgttttccaagacttcctgttcacccatgagtgtgagcagagcagacatttggacctggctgtgcaagtgacggagtgatcgcctacacgcactgctgtgtcaaccc

SEQ ID NO: 186966 - DNA, 1214 bp, Homo Sapiens
ctttgtacaaaaaagttggctttcagccgtgccgtgctgccactggggccaggccgggaggccctggaaaaggccctggtcatccaggagtcagagaggcggaagaagctccgtttccaccctcggcagttgtacctgtccgtgaagcagggcgagctgcagaaggtgatcctgatgctgttggacaacctggaccccaacttccagagcgaccagcagagcaagcgcacgcccctgcatgcagccgcccagaagggctccgtggagatctgccatgtgctgctgcaggctggagccaacataaatgcagtggacaaacagcagcggacgccactgatggaggccgtggtgaacaaccacctggaggtagcccgttacatggtgcagcgtggtggctgtgtctatagcaaggaggaggacggttccacctgcctccaccacgcagccaaaatcgggaacttggagatggtcagcctgctgctgagcacaggacaggtggacgtcaacgcccaggacagtggggggtggacgcccatcatctgggctgcagagcacaagcacatcgaggtgatccgcatgctactgacgcggggcgccgacgtcaccctcactgacaacgaggagaacatctgcctgcactgggcctccttcacgggcagcgccgccatcgccgaagtccttctgaatgcgcgctgtgacctccatgctgtcaactaccatggggacacccccctgcacatcgcagctcgggagagctaccatgactgcgtgctgttattcctgtcacgtggggccaaccctgagctgcggaacaaagagggggacacagcatgggacctgactcccgagcgctccgacgtgtggtttgcgcttcaactcaaccgcaagctccgacttggggtgggaaatcgggccatccgcacagagaagatcatctgccgggacgtggctcggggctatgagaacgtgcccattccctgtgtcaacggtgtggatggggagccctgccctgaggattacaagtacatctcagagaactgcgagacgtccaccatgaacatcgatcgcaacatcacccacctgcagcactgcacgtgtgtggacgactgctctagctcccactgcctgtgcggccagctcagcatccggtgctggtatgacaaggatgggcgatttgctccaggaatttaacaagattgagcctccgctgattt

SEQ ID NO: 186967 - DNA, 1214 bp, Homo Sapiens
ttgggtgatcgctgaggggcgagcagttgcgaccctgggctcctggggacctgagcgttatgtctttccgcgacctccgcaatttcacagagatgatgagagccctgggataccctcgacatatttctatggaaaatttccgtacacccaattttggacttgtatctgaagtgcttctctggcttgtgaaaagatatgagccccagactgacatcccgcctgacgtggatactgaacaggaccgagttttcttcattaaggcaattgcccagttcatggccaccaaggcacatataaaactcaacactaagaagctttatcaagcagatgggtatgcggtaaaagagctgctgaagatcacatctgtcctttataatgctatgaagaccaaggggatggagggctctgaaatagtagaggaagatgtcaacaagttcaagtttgatcttggctcaaagattgcagatttgaaggcagccaggcagcttgcgtctgaaatcacctccaaaggagcatctctgtatgacttgctcggcatggaagtagagttgagggaaatgagaacagaagccattgccagacctctggaaataaacgagactgaaaaagtgatgagaattgcaataaaagagattttgacacaggttcagaagactaaagacctgctcaataatgtggcctctgatgaagctaatttagaagccaaaatcgaaaagagaaaattagaactggaaagaaatcggaagcgactagagactctgcagagtgtcaggccatgttttatggatgagtatgagaagactgaggaagaattacaaaagcagtatgacacttatctggagaaatttcaaaatctgacttatctggaacaacagcttgaagaccatcataggatggagcaagaaaggtttgaggaagctaaaaacactctctgcctgatacagaacaagctcaaggaggaagagaagcgcctgctcaagagtggaagtaacgatgactcggacatagacatccaggaggacgatgaatccgacagtgagttggaagaaaggcggctgcccaagccacagacagccatggagatgctcatgcaacgaagacctggcaaacgcattgtgggcacgatgcaaggtggagactccgatgacaatgagactcgggaggagagtgaaattgacatggaagatgatgatgacgaggatgacgatttggaa

SEQ ID NO: 186968 - DNA, 1633 bp, Homo Sapiens
  misc_feature (642)..(678): n is a, c, g, or t
  misc_feature (705)..(942): n is a, c, g, or t
tgcaacaaattgatgagcaatgcttttctttataaagtgggcaactttgtacaaaaaagttggagaagaaataactttataacaattttttttaataatgaaaaatattttcctgacaagtgagctctaaattctctttattgtaaaagagatgtaaaggttttatattctaaatcctagtaaaattgacagtgatttttaaatataatgcatcttcctttgtctgcttagtaaaaaatttcatttcataattttggcaagctctgtagtggatccaaagtatctttgagttcttgcaaactacaagttgtttcctttccagaaggcttgatttcattaggagacccctctattgagttctaaatagtttatcttataaagccttgggtcattcacaggtatccaaccagccattgtttagtttgtttttgaaggggtttgataatgctttttaagttgtacagaatgcttaatccatcttattactgtcctgagccatgtaatatgcctgcatcgtgttggggaaatgtttgggaaatataagccagcataacgtgtaaagctcactctttcaccctggaacagacaagaggtgggcttaatagaggcagagactggggatatacctttgtttccctagcnnnnnnnnnnnnnnnnnnnnnnnnnnnnnnnnnnnnngagatggagtttcactcttgttgcccnnnnnnnnnnnnnnnnnnnnnnnnnnnnnnnnnnnnnnnnnnnnnnnnnnnnnnnnnnnnnnnnnnnnnnnnnnnnnnnnnnnnnnnnnnnnnnnnnnnnnnnnnnnnnnnnnnnnnnnnnnnnnnnnnnnnnnnnnnnnnnnnnnnnnnnnnnnnnnnnnnnnnnnnnnnnnnnnnnnnnnnnnnnnnnnnnnnnnnnnnnnnnnnnnnnnnnnnnnnnnnnnnnnnnnnnnnnnnngagccactgcacatggcagcattttttaaaaattcagttttaagatctctggtttaggggagagattttattttactgaaccagttctatagaaatttattttattaggaaatttgtctttggaacaaagtggcagctataaaattatttttgttaagcctcagaaatatgaggaagcctgtaaaactctagtggggagatattaacttggagacctaatgctctgtaaatagtcatttaaactgttggttttagtggttttgtttctaaaatgttttcttttaccgtgatgcaccagtatgagatggtgctgacactttctatgaagtggttatgagcaggtttaataaatcctctatacaagtgtttgaatcaattttaaaacataaaaagtggaaatttccttttttgtagacagtaggaacaaggaattatatgcatttttactaagtagtaattttacactgaattgtaaatgtttttacagtgagttttattaatagaatgcttcaccttaaattggaaaacaataatagtcttggactaagtctttgtactaaagcatttgctataattatttttaaaaaaacaaacagatgaaaacctcagagaaggcatgtggattataagatttgtctagtaaaaattgtaattgaatatgtttaaatatttaatttctcattttgggggg

SEQ ID NO: 186969 - DNA, 1073 bp, Homo Sapiens
ttggcttggacgggggagagcgtgtgtgtgatgggaaaatccggacccacgcgtgtgctgaaggcgtacggtgcttgccagattttcaacttgagcataaattggttgccattgagaatttaagaatctggaatattgcagcttttggttaaacttaatgcatggttggagatgttatggcgacactaaacaaagtattcctgaactttccttagctccttggtagtaactgggaagacagaaatgaagaaaatcacatgagaatgaagaattctttagcagctcaacagagtttctcggcctgctcccagatcggcgaagtttctacttgttactctctctgccgacgcccttcattcctccccgcttcccttccctagtctttcctccggcagggagctgggcaggggtccccgggtgtctccctgagtcccgactgcactgactgggtccatcagagggctgcttcgttctccagctcatcttcttttaaagtggtgactagcttggtggtatctggctgctggtgtttggcttattgacatactccagggtaatcaatgatgactttgtttggaaacccttttggaggcaccatgggaacagaaggaaacatgagtgacgctgacccttgagtgtgtgggtggggagctctgagacgcctcctgtcccacgctctccggtgtccgtgtctacacaggggtccccatgatacccaccggccccagcagggcagaccggaccggggacgggcacggtgaagggctgcagcctggggtctgacgtggcccctagtgctgtctcaggagaaggctctggaggacttgaggcatgctgggcctggtgcagtgatggcgctaagagacccggggaaagacagtatcgtggtcacgtatgcttaggaagcagcacagctgtgtccttagggatgttcgcgtccagtaaagacactggtaactgcggtttcagccaacactcttcatggcagtgtcgacctcgggttagcttctgttgtctttgtggatggttttcctggagcggcctgacgttgacgtgttctctggtcccatgtc

SEQ ID NO: 186970 - DNA, 2933 bp, Homo Sapiens
ttggatccctgaagcatgctttggatgtcctttctgtggtaacaaaggggagcgaaaaccagattaaggcctttctctccagtcattgttacaatgctgcaactatcaaggatgtttttggcaggaatgccctccaccttgtttcctcctgtggaaagaaaggagtgttagattggcttattcagaaaggagtggatctgttggtgaaagacaaagagtctggatggacagcattgcacagaagcattttttatggacatattgattgtgtttggtctctattgaagcatggtgttagtctgtatattcaagataaagaaggcttgtcagcttggggatcttgtaatgaaggatagaccaactcatgtagtattcaagaatactgatcctacagatgtttatacttggggcgataatacaaattttaccctgggtcatggaagccagaatagcaaacatcatccagagttggtggatctgttctccaggagtgggatttatatcaagcaggtggtgctttgtaaatttcactccgtgtttctgtctcagaaagggcaggtttatacctgtggtcatggtcctggagggcgattaggacatggagatgaacagacatgcttggtccctcggcttgtggaaggactgaatggtcataattgttcccaagtggcagctgctaaggatcatactgttgtattaactgaagatggatgtgtttatacatttggtctaaacatttttcatcaattaggaattattccaccgccttccagttgtaatgtacccagacagatacaggcaaaatatctgaaaggaaggacaatcattggcgttgcagcaggcaggtttcatacagtcctatggactagagaagctgtttacactatgggactaaatggtggacaactgggttgtttgctagatcccaatggagaaaagtgtgtaactgctcctcgtcaggtctctgcccttcaccataaagacattgctctgtctttggttgctgcaagtgatggagctacagtctgtgttaccacaaggggagatatttacttacttgcagactatcagtgcaagaagatggcttctaaacagttgaacttgaaaaaagttcttgtgtctgggggtcatatggaatacaaggttgatcctgaacatttgaaagaaaatgggggtcaaaaaaatttgcattcttgcaatggatggagctggaagggtgttttgctggagatcagtcaacagttctctgaagcagtgtcgatgggcctatccacgtcaggtcttcatttctgatattgctttaaatagaaatgaaattctatttgttacgcaagatggagaaggatttagagggagatggtttgaagagaaaagaaagagttctgaaaagaaagagattttatcaaaccttcacaattcctcatcagatgtgtcttatgtctctgatataaatagtgtgtatgaaagaattcgacttgagaaacttacctttgcacatagagctgttagtgtcagcacagatccaagtggatgcaactttgcaatcctgcagtcagatcctaaaacaagcctttatgaaattccagctgtgtcctcatcatccttttttgaagagtttggcaaactgttgagggaagcagatgaaatggacagcattcatgatgtgacatttcaagttggcaatagactcttccctgcacataaatatattttggcagtgcattctgatttttttcagaaattgtttctttcagatggtaatacttcagaatttacagatatttaccagaaagatgaagattctgcagggtgccatctctttgtggtagagaaggttcatcctgacatgtttgaataccttttacaatttatatacacagatacttgtgactttttaactcatggcttcaaaccaagaatacacttaaacaaaaacccagaagaatatcagggaactctgaattctcatttgaataaagtgaatttccatgaagatgataaccagaagtctgcatttgaagtttacaaaagtaatcaagctcaaacagttagtgagaggcagaagagcaaacctaaatcttgtaaaaaaggaaaaaatattagggaagatgatcctgtaagaatgttgcaaactgttgcaaagaaattcgacttcagtaatttgagtagtaggttagatggagtcagatttgaaaatgaaaaaattaatgttattgccaagaacactggtaataaactgaagctaagtcagaaaaaatgttcatttctgtgtgacgtgaccatgaaatcagtggatggaaaggaatttccttgtcataaatgtgttctttgtgctagacttgaatattttcatagtatgctgagtagctcatggattgaggcttccagttgtgcagctctggaaatgccaatacattctgatatattaaaagttattttggactacctctatactgatgaagctgtggtgataaaagaatctcaaaatgtagattttatttgtagtgttcttgtggtggctgatcaacttctcataacccggttgaaagagatttgtgaagtagcattaactgaaaaacttaccctgaagaatgctgctatgctactggaatttgcagcaatgtatagtgcaaaacagttgaaactgtcttgtttacagtttataggattgaatatggcagctttacttgaagcaaggtctcttgatgttttaagcgatggtgttttgaaggatctttctgagttttaccggaaaatgattccagcaatggatagaagagtcattacaccatatcaagatggaccagatattagctatttggaaagtagaagatggagatatcttcttgaagaagaataaatatggaacaaaatcattcggaactatgttcaagaagcaaaacaaaagctaaaaagaagccacgtaaacgttc

SEQ ID NO: 186971 - DNA, 1196 bp, Homo Sapiens
ttggcacgcgccgagccgggaagcttcgtccagcggtcgtgttgccatgggccggaggagagccccggccggtgggtcgctgggacgggcccttatgcgccatcagactcagcggagccgaagccatcgtcacactgactcctggttgcacacaagtgaactcaatgatggctatgattggggtcgtcttaatcttcagtcagtgactgaacagagctcccttgatgacttccttgctactgcagaacttgcaggaacagagtttgtagctgaaaaacttaatattaagtttgtgcctgctgaggctagaactggactactgtctttcgaggagagccagagaattaagaagctccatgaagaaaacaaacagttcttgtgtataccgaggagaccaaactggaaccaaaatactaccccagaagaactcaaacaagcagagaaagataactttctagaatggagacgtcagcttgtccggctagaagaggaacagaagctgatattgactccatttgaacgaaatttggacttttggcgccagctctggagagtcattgagagaagtgatattgtggtccagatagtagatgctcgaaacccactcctgtttagatgtgaggatttggaatgttatgtgaaagaaatggatgccaataaggagaacgtcattctgatcaacaaggcagacttgctgactgctgagcagcggagtgcctgggccatgtacttcgaaaaagaagatgtgaaggttattttctggtcagctttggccggagccattcccctgaatggtgactctgaggaagaggcaaacagagatgatagacaaagcaacacaaccgagtttggacattccagtttcgaccaggctgaaatttcccacagtgaatccgaacatctcccagctagggattctccttcacttagtgaaaatcccacaacggatgaagatgacagtgagtatgaggactgtccagaggaggaggaagacgactggcagacgtgctcagaagaagacggtcccaaagaagaggactgcagccaggactggaagaaagctctactgcagattctgagctcggagcagaaaaccccacagaagaggcagatacacaattttagccatctggtatccagcagagttactggagctctttaagagctacacactgggagaaagtgaaagatgggca

SEQ ID NO: 186972 - DNA, 695 bp, Homo Sapiens
gtgtgtgtcactgtgcctgacagctgacagttttaactgacaactttgataacagaggctgctatttttgttttagataattggccagtgacagagtttacccttgcctcctttcttggtctgccagctttgtcctttctgagtgattctctttctgtattgagaggaagtgtgggtctacatagggatgtttggatgctatggcaagaatctttttgtgtttggagtgtagtccatttgcaatagaaataaaaaaatccgtcaccaaattgtaacctggatgttatagcccagcatctagaaatcctatgaaatgtattagcacaatatcttgccattgtcccatctaggaaattttttcttgttgtgaggtagggaagtgaggaggaaagccatgccgaagcaaatgttagaatcttaggcatcctatttgttcatgccatgggtatttgctttggacttggagtctgtactttgaaagaggcctttgaaaaacaaataattctgtgtgaattttcttgtagcgtgcttcatgaaaatatctacttatccatgtttgcaaatgtacatgttcatttgaatgtaaatcaccatttcctggaaccccaccttttttcttaaaaattattctgaattagatgtatatttccttatcccttccctacacagtactaataaaaacttttccttctgtt

SEQ ID NO: 186973 - DNA, 1178 bp, Homo Sapiens
  misc_feature (75)..(107): n is a, c, g, or t
ttggaaaagacaagctttccagagaatgtttcagagaaagttacgtggagcgtgggcgtttcgcagactcctaannnnnnnnnnnnnnnnnnnnnnnnnnnnnnnnncttctggcaagtatgaggcaaggatttcacagaagaacttggagcaaaaattcccactgtcatagctataggctgtccagtcttgagggagctgcaggaacaggaaaaagagaccttcagagaagacatggcttccagaaaagagaatgcgaagagtgcaaacagagtgctaagaataagccagttggatgcacttgaactaaacaaggccctggagcagctagtttggtcccagtttactcagtgctttcatggatttaaacctgggctgttagctcgctttgagccagaggtgaaagcgtgcttatgggttttcttgtggagattcaccatctactccaaaaatgccacagtgggacagtcagttttgaatattaagtacaaaaatgatttttcccctaacctgagatatcagccacccagtaaaaatcaaaaaatctggtatgctgtttgtacaattggtggcaggtggttagaagaacgatgctatgatttgtttcgaaaccatcatttagcatcatttgggaaagtcaagcagtgtgtgaattttgtgattggacttttgaaattaggtgggctgattaattttttgattttccttcagaggggaaagtttgcaactttgacagaacgtctcctaggtattcattctgtattttgcaagcctcaaaacatacgtgaagttggctttgaatacatgaatagggaacttctctggcatggttttgctgaatttctgatttttctcttaccacttatcaatgtccagaagttgaaagccaagctgtcttcatggtgtattcctcttactggtgcacctaatagtgacaatacattagccaccagtggcaaagaatgcgctctatgtggagagtggcccaccatgcctcacaccataggatgtgagcatattttctgttatttctgtgctaagagtagtttcttatttgacgtgtactttacttgtcctaagtgtggcacagaagtacacagtctgcagccactgaaatcagaatcgagatgtcagaagtaaatgctctttagaactaaaattgcttcctttgagaaaaa

SEQ ID NO: 186974 - DNA, 1433 bp, Homo Sapiens
ttggtgcgaatgaggttaacaccagattgttccaaaatgttgatttcaacgtcctctggatatctcttaattttgcatgaccttgacttaactaagtctttagaagtaggcagctatcccattttaagagcaagaagaactacttcaagttcagatttgaccacttcatcaagttcatctggtcctagagtttctggctcaccttgtcatcatagtgattctaattcttctgagaaacacatgtcacgagcctctcaaagagaaggagtttcaccacgaaatagtcttgaagtcgtaacccctgaagttcttggtgagagtgaccacggaaactgcatcacgtccttacagctgcacccaaaaggctgggccactcttcttcggtgctcaagcaacagtgatgatgaggagtgtacttgtgtctatgaattccaagaaggagctccagtgcgacctgtctcacctcgctgttctctacgactgactcattacattgaagaagccaatgtaggcaggggttacatcaaagaactttgcttcagccccgatggacgaatgatttcttccccacatggctatgggattcgcttgttgggatttgacaaacagtgcagtgaacttgttgactgcttgcccaaagaagccagtcccctgcgggtgatccgttctctgtactctcataatgatgtggtactgacaacaaagttctctccaacacattgtcagattgcctcagggtgccttagtggacgggtttctttgtatcagccaaagttttaggcacaacttacatcaaataaggaactcttctggtgtttgacttaggaattgcttcaatttagatgaagtattttctttttagaagatcttataagtttgggtcaagatcctggttcttatgggtccatgaacacacttgtgaccttagtacttggtcatccagcatcatacaggcatctccaagttagactctatgcagcatcatcttttgcagcattcctctgctcctgctgatctgtgccactgaactccagttcttctggtcattttgcatggtagctcttgtcacgttccttccttcctcactctctatttctctttccctctccctgtccctctctttctttgtgtttgttgattttggtgtcaattttgtggacatttggcaggagttttgactggggtaggagaaacccatgacattagaattgaataaaacctagaagttggatattggcatattggttgttgaaaaataaatttcatcctcacttatgagtatacttggccttttaaagttactgttatgtttatctatattgagcacagataatggcattattcttataattgttaagatagtcttgcaacaaaatgtcttttaagtttcctgttaaattataaaaagattttcatggtgagagggattttat

SEQ ID NO: 186975 - DNA, 514 bp, Homo Sapiens
  misc_feature (240)..(291): n is a, c, g, or t
aaatcaagacttttaaaactggatttcctcccatcactgttttttgaaggtcctccaagtccgtgttaaggtaaatatctgttttcttcctgatgtcacagcctgagcatactctgtgcattaggaagacctgagtgcatttcccaccattgtcctttccacattatgttgtagctggctggctgtcaggcgactacaagactgagggtcttgtgccttatagatctttgtatcccccannnnnnnnnnnnnnnnnnnnnnnnnnnnnnnnnnnnnnnnnnnnnnnnnnnncattttgcttctatagaagtgtaccttctttgtttctatattatgaaacctctttattagaatttgtgattgattctgacagtgtatagatttaccttatattgtctttattttccatgagctactaagtcattagagatactctgaagcatagttagtttaggaaatcacttcatattgattgtattagaattatcttggaattgaagatatatccctagag

SEQ ID NO: 186976 - DNA, 803 bp, Homo Sapiens
ttggcactcactcacagtcactctctctgagcgcgtctcgctcgctctcatacacgcccggagcccaggagcgctcaggatcccgagcgccgcgaaaaagttcccccggcttttgctggagactcatcgttttgggaagtgcatttgcttcgtggctccgccgagcctgctgaatcctgtcctcgcggctcgggaccccgggatcgctgaccgctgccgccgccgcctctgcctcccggactatcggcagcctcggcaacaatagtggcggccgcccccagcgaggctccgggagcccttgcctgcgggggtccggggactcgagccggcctccgccccccggacgcacagccagcgtggtccccgcgtgcaacgcgagcgccggggagtggctcctgctttgcccctcgtgggggccgagccaagaccagtctgcaaactccatcccgccggctggaagaagtcgcggagccggcaccaaacccgcagcgtcttcccgcgcggatcccgggacttaaaaagccggggccaccccggcccaggacgggatgcgggtcggtccggtgcgctctgccatgagcggcgcctcgcagccccgcggcccggccctgctcttcccagccacccgaggcgtcccggccaaacgcctgctggacgccgacgacgcggcggctgtggcggccaagtgcccgcgcctctccgagtgctccagccccccggactacctcagcccccccggctcgccctgcagtccgcagcccccgcctgccgctccgggggccggcggaagctccgggagcgcg

SEQ ID NO: 186977 - DNA, 1516 bp, Homo Sapiens
  misc_feature (420)..(443): n is a, c, g, or t
ttggggaaacccttacgaatcctgaaaattatgctagcatgatttttttatatatagaagtttaaaaataaaccaggtcaggtttgtatatgtaaaattgttgacatcaatgatgtctttccatattcttatctgggcttaagaaatacattctgtatttttccagattctttgtagcctttgaaagatttttacagtacatatgtcttgactgagctgtcctttcttaatacaaaagcgtgtataattttcttaacttgtacagttggtaaacttttatgagaggaattgttattctgagtctgtcagctttcattttattttgctaaggtttttctaatgaatttttaagtgtttgtgtagtaattaagtcatatttcttatccaggtggttaaagcattcataaaggattataaaannnnnnnnnnnnnnnnnnnnnnnnaaatttctacttaagggcaagtaatttgaaaattctgaaattaagcatgatgcttaaattgcagtttgttttgcatttgctataattttcaaaattatttttgaagcaagacaaaagtttaatgtcagcttaagtgcttaaatatatcatgctgaccagaatcctgttatttttatatgcatcataaaatttcccatttctgcattaaataaacagaggaggggggtcaagtgatacttagatattggcacacacaaggaacaactgttggcaggcagtatcgattttatgaagagaaagtgaagtttgaaaacttttcaaacttttctagttacaatccaatttttcagatttgataatgcttttccaaagtgaaaataagatacacaataatcattgctttttgtgattacagataggattatccatctgcatagccttgtaaaagtgccattttatttttagtgctaaattcttgttaaataatgtagttttatatagctgatagaccaacctatatccaaacttttataaaatattaattattcttgtttttctcacacaggcatactccaaatgcttcttccagttcatttttcagccatcagttcaagagccaatgcctttttaaaataaagcttctgtggtcttgtttttaatggctcaactgtctgatgtaattgagtgaaggtttgcactgagaaattagcattcaagccttacccccatgaagtattactgttaacatatgttcggactgcttcccttcaccaatgtgaacaactttttttcccaaacagtattaaaagccactttgcaacacttgacttcatcttaatgtacattcactgttgttacatacatatctaagtaaatcaaagttttgggtggaagtgttgagaagtatgagttttttgttgtttttggtttacttaaaacttttaaatttattccaaaatggcagtagctttaaccaagcagatggtcacaatctggtttctaaatcaatttttattaaatgaatcccaagtatcttaggtctttgtcaaagatggtctgtaaaatgttttaaa

SEQ ID NO: 186978 - DNA, 1171 bp, Homo Sapiens
ttctgagccggtgggggcacggggtgctgcttctcatgcactcaggggcttctccctctgctgggcataggtgaagctgggaggttgaggggagcctgtgccagcagaaagagcttcggggtgccccaatttttgatttggttgtgacccagatccacctggggctccaggactgaacttggaagccacaggagtaaacttaggagtcactggagaaaacttaggggctggagccggagatgaggctgggggccctcggggctgggtgttagccaaagacacaggctgggtctgggactggacatggagttggacctgaggcttgggctggggctggggctgaacatggaactgtgtctggctctgagccggagccggaacctggggcagaggctgggagctggaaggggacttccaaggaggcaggggtgctgtgcccccggctgcaggcttggtactggacttggaactgaatggagtggccactggtgggggcacatatccagatgacacccgggctttgaaaggatcattcttggtcatgtcatccagcagtgaggacagagagtcgatctccaaatcaatactgctcaccttctccctgggctgtggtgggggcggtatgggggcctcaggccctccctcctcctccggaggaggcggcggggaagggaagatctcctcctccagaggcgcagggggaaatgattcctcgatcgggggagggggcggcgggaaggcacctcccagagcaccctctgcatcgtcgccatccccagcaaggggaggtggaggcaggggaaagtcttccgggggcggcgggggaatctcgcccacccggcccatctgtgcgcgctgggccccgggtgccgggggaggctcgctgtccccgggccggaagggattcactttgggctttggggccaccacagggccgaacttcttctgcggggcgtaaaaagccggagccgagaccgaaacggagatcgcgggagacgggcggggggccgccatggccgggccgggctgcgcaggccggagcgtgcgcgccgcgtctcgggtggccgcctcggcgccgggtccgcagactctgcgtcccggtccggagcagcctccagccgggcggggagggacacacggaaggaggagggagggagaagagaagagccaa

SEQ ID NO: 186979 - DNA, 1454 bp, Homo Sapiens
ttggggccgctgtagcagcggctgtccagtcgtagcccggccgcccgcgcctgtccggtccggtccggccacggaggcagcgcagcggcgggactccgagcctaccccgccgagtgagctgcgccgcaccgtgccgtcccacccggcacccaccagtccgatggggccgcagcggcggctgtcccctgccggggccgccctactctggggcttcctgctccagctgacagccgctcaggaagcaatcttgcatgcgtctggaaatggcacaaccaaggactactgcatgctttataacccttattggacagctcttccaagtaccctagaaaatgcaacttccattagtttgatgaatctgacttccacaccactatgcaacctttctgatattcctcctgttggataaagagcaaagcagttgtggttccatggggaagctgccattttcttgaaaaagccagaattgcacagaaaggaggtgctgaagcaatgttagttgtcaataacagtgtcctatttcctccctcaggtaacagatctgaatttcctgatgtgaaaatactgattgcatttataagctacaaagactttagagatatgaaccagactctaggagataacattactgtgaaaatgtattctccatcgtggcctaactttgattatactatggtggttatttttgtaattgcggtgttcactgtggcattaggtggatactggagtggactagttgaattggaaaacttgaaagcagtgacaactgaagatagagaaatgaggaaaaagaaggaagaatatttaacttttagtcctcttacagttgtaatatttgtggtcatctgctgtgttatgatggtcttactttatttcttctacaaatggttggtttatgttatgatagcaattttctgcatagcatcagcaatgagtctgtacaactgtcttgctgcactaattcataagataccatatggacaatgcacgattgcatgtcgtggcaaaaacatggaagtgagacttatttttctctctggactgtgcatagcagtagctgttgtttgggctgtgtttcgaaatgaagacaggtgggcttggattttacaggatatcttggggattgctttctgtctgaatttaattaaaacactgaagttgcccaacttcaagtcatgtgtgatacttctaggccttctcctcctctatgatgtattttttgttttcataacaccattcatcacaaagaatggtgagagtatcatggttgaactcgcagctggaccttttggaaataatgaaaagttgccagtagtcatcagagtaccaaaactgatctatttctcagtaatgagtgtgtgcctcatgcctgtttcaatattgggttttggagacattattgtaccaggcctgttgattgcatactgtagaagatttgatgttcacactggttc

SEQ ID NO: 186980 - DNA, 1467 bp, Homo Sapiens
  misc_feature (1051)..(1059): n is a, c, g, or t
ttggcgattgcatgtcgtggcaaaaacatggaagtgagacttatttttctctctggactgtgcatagcagtagctgttgtttgggctgtgtttcgaaatgaagacaggtgggcttggattttacaggatatcttggggattgctttctgtctgaatttaattaaaacactgaagttgcccaacttcaagtcatgtgtgatacttctaggccttctcctcctctatgatgtattttttgttttcataacaccattcatcacaaagaatggtgagagtatcatggttgaactcgcagctggaccttttggaaataatgaaaagaatgatggaaacttggtggaagccactggtcaaccctcagctccccatgagaaattgccagtagtcatcagagtaccaaaactgatctatttctcagtaatgagtgtgtgcctcatgcctgtttcaatattgggttttggagacattattgtaccaggcctgttgattgcatactgtagaagatttgatgttcagactggttcttcttacatatactatgtttcgtctacagttgcctatgctattggcatgatacttacatttgttgttctggtgctgatgaaaaaggggcaacctgctctcctctatttagtaccttgcacacttattactgcctcagttgttgcctggagacgtaaggaaatgaaaaagttctggaaaggtaacagctatcagatgatggaccatttggattgtgcaacaaatgaagaaaaccctgtgatatctggtgaacagattgtccagcaataatattatgtggaactgctataatgtgtcattgattttctacaaatagacttcgactttttaaattgacttttgaattgacaatctgaaagagtcttcaatgatatgcttgcaaaaatatatttttatgagctggtactgacagttacatcataaataactaaaacgctttgcttttaatgttaaagttgtgccttcacattaaataaaacatatggtctgtgtagtttccgagatgtactatatacagtatatttttctnnnnnnnnntgccttgacccaccgcgcccggccatatctcagttttctaatctgtaaaatgagtaggttagaccagctaatcactctggtaccttccaacttgaaaaaagttttttccccattctttggtaaattttagatgtggcctgaacattctcctggaagtcagaggtcaaattatctttccattttcttttattttagtaagaatttcgcaaatgacaagtgataacaaaggcagcaggatttttcatttctctgtaaataatgtataaaatatgtgaacagaactatatctttcatctaacgccagttcaatttattaaaaataaaaactaatgccttttaaaattgatcagacctttgatacttgaactaaattttgcattagagactttttaaaattgttcgcttttg

SEQ ID NO: 186981 - DNA, 668 bp, Homo Sapiens
caaggccacggagacagctccggctcacccctagtgaatctccagtccctcccagaactccctggagtcgccgcactgtgccagaaaccgcaaaggaggacaccacgggcgggggtgggggccgactgctgtccccagactctggacacagtctggcccgcccgcggagctcagtcacagccagccgagtccctgggcccagcagcccttgcaacgccggccgcgtctccagcacccgcggtccgggcactgggagggtctctccgcgcctcaccagcagcggcccgactcgcggtccgagcccaggccccagcgaggtgccaagcagtgcccaacctagcgccgggggccgccgcaccgcccgcgcccgcacccaggccccggagcccagtgccaggagccgcagcagcgcgcggctaaccagtagctgcggcggcccgggaccctgctcttcggtgcccgcgtccggcccctccagggctgccaccagcagcgccggccctgccgggctctcccctgcaggcctcagggccagcaccaggcccagctccgccgccggccacgggcccccgggtggcagcagcactgccaacgggggtgtctcggtcggaaagggctccaggacccgcaagacagccagcgccatggtgacaggacaccaacgccaa

SEQ ID NO: 186982 - DNA, 945 bp, Homo Sapiens
acagtaatcttcaggtatctttttatccagatcgagatctgtattctttattacttcaaatgtaccatgatgaggaaagagagatcctgcacttctgtagctcagatctccgagaattttatctccaacttttcgaagtttccagtgttgccgtaatcgcaaaagctcagaattgaagtctctttgtagcttgttttcttggttttcggtaactgatttagtcagtctttctgcccccttcaataagatttgtgctgctccagcaagtgacttctttttagatatcaattgcaacgtctgaggattctgttttggaggaagtgcatcctgagagacaggatcaagagtcataaattttttatccctaacaatactgagaacatcatagagaacacacatctctgtcagggcacttctcaaattgttcctcactgagtcccaaggccaaagggaaggctgaaattttaccactccttcctcgtcgtcctggtctgcgctggacccggcgcccggccagtcctgcgcgtccccctcggtccccgccgcctcctcctcctcggagcccgaaccctggctgaagtctatccgctgggccagacgcgccagattctgcgacatggacagcgggggcaggtacgtctcggtgccatccaggcccacctcatggacctgcttctcgcaggccgattcgatgctgatccgcactgcgcgcaccccggacatgctggctgcgtcggccagcggtgggaggaccccccacgagccaaaaaacgaggtacgaagaggaggcttccctgcggagagccgggaactcagaagcccgcagccgcggtgcctcagaagaccctcgggaaaccgaacgcaacgctcagactggaaacaaaggagctggcccagcaactttcccagaacgcaccgcaagctccctcctcggtaagtctccaa

SEQ ID NO: 186983 - DNA, 2275 bp, Homo Sapiens
ttggatttgcggaaacttcggaacctgtcgtatattctttgataacccttttagaggaagagtcggaaatagtcaagttactaacgaatacccaccacaagtatagtgaccctcctgtgaactttctgccagtaccctctaggaccagaataaataatcctgcctgtcataaaacagtgattccaaataattcttttgtttctaatcaaattccagaagttgaaaaagcatcagaatctgaggagtcagatgaggatgacggtcctgcacctgttatagtagagaatgaaagctatgtgaaccttaagaaaaagatttccaaaagatatgactggcaggcaaagtcagtacatgctgaaaatggtaaaatctgcaagcagttccgaatgaaacaggcttccagacagttccagtccattctgcaagagaggcaatcactccctgcttgggaagaaagagaaaccattcttaacttattgcgtaagcaccaggtggttgtcataagtggtatgactggatgtgggaaaaccacacaaattccgcagtttattctggatgattctctgagtggaccacctgagaaggtagccaacatcatctgtacccaaccccgacgaatctctgcaatctctgttgctgaacgcgttgctaaagaaagagcagagagggtgggtctgaccgtgggataccagattcggttagaaagtgtcaagtcctcagccaccagactgttatactgcaccacgggagtgctgctgagaaggctagaaggagatacagctctacaaggagtttcccatatcattgttgatgaagttcatgagaggacagaagaaagtgacttcttgctgctagttttgaaggacattgtatcgcagaggccaggtcttcaagttattttaatgagtgcaactctaaacgctgagcttttttcagactattttaattcctgccccgttattactataccaggtcgtacatttcctgttgatcaattttttttggaagatgcaattgctgtgacaaggtatgtattacaggatgggagcccatatatgcggtccatgaaacagatttcaaaggaaaagcttaaagcaaggcggaacagaactgcatttgaagaagtggaagaagacctaaggctctcccttcacctccaggatcaggattctgtcaaagatgcagtgccagatcaacagttagattttaagcagctcctggcccgctataaaggggttagcaagtcagtcatcaaaacaatgtccatcatggattttgaaaagtgaatcttgaattaatagaggccttattagagtggattgtggatggaaagcactcctaccctccaggtgctatacttgtatttttaccaggactagcagaaatcaaaatgctttatgaacagctacagtctaattctcttttcaacaacagacgtagtaatcgatgtgttattcacccacttcattcatctttatccagtgaagagcagcaggctgtgtttgtaaaacctcctgcaggagtaactaagattataatttccaccaacattgctgagacatccataaccatcgatgatgttgtctatgttatcgattctgggaaaatgaaagaaaagagatatgatgccagcaaagggatggaaagtctagaggacacctttgtatctcaagctaatgctctacaaaggaaaggccgagcaggccgtgttgcatctggggtctgcttccatttattcactagccatcactacaatcaccagcttttaaaacaacagctaccagaaatacaaagagtgccattggaacagctgtgtctaagaattaaaattttagagatgtttagtgctcataatctccagtctgtgttctctcggctcattgaacctccacacaccgattctcttcgtgcctcaaaaatacgattacgagacttaggagcattaactccagatgaaagattgacccctcttgggtatcatttggcctctctgcccgtggatgtgagaattggcaaactaatgttgtttgggtctatcttccgctgtttggatcctgctctcaccattgctgccagtttggcttttaagtctccgtttgtatctccctgggataaaaaagaagaagctaaccagaaaaagctggaatttgcattcgcaaacagtgattatctggctcttctacaagcgtataagggatggcagctaagtacaaaagaaggcgtgcgtgcaagttataattactgcagacaaaacttcttgtctggaagagttctg

SEQ ID NO: 186984 - DNA, 1115 bp, Homo Sapiens
ttggatctttttttgcagcttaagatctgccttagtatttgaagagatataaactagatcaatttctttcacaggatcaactaaacagtgtaccacaatgaattctgaacttgactattatgaaaagtttgaagaagtccatgggattctaatgtataaagattttgtcaaatattgggataatgtggaagcgttccaggggagaccagatgatcttgtcattgccacctaccctaaatctggtacaacctgggttagtgaaattgtgtatatgatctataaagagggtgatgtggaaaagtgcaaagaagatgtaatttttaatcgaatacctttcctggaatgcagaaaagaaaacctcatgaatggagtaaaacaattagatgagatgaattctcctagaattgtgaagactcatttgccacctgaacttcttcctgcctcattttgggaaaaggattgtaagataatctatctttgccggaatgcaaaggatgtggctgtttccttttattatttctttctaatggtggctggtcatccaaatcctggatcctttccagagtttgtggagaaattcatgcaaggacaggttccttatggttcctggtataaacatgtaaaatcttggtgggaaaagggaaagagtccacgtgtactatttcttttctacgaagacctgaaagaggatatcagaaaagaggtgataaaattgatacatttcctggaaaggaagccatcagaggagcttgtggacaggattatacatcatacttcgttccaagagatgaagaacaatccatccacaaattacacaacactgccagacgaaattatgaaccagaaattgtcgcccttcatgagaaagggaattacaggagactggaaaaatcactttacagtagccctgatgaaaaatttgataaacattatgagcagcaaatgaaggaatctacactgaagtttcgaactgagatctaagaaggtctttctttacttaacatatctgatattaaagatttcttttcattattctccactttttcttatttagattgctagaaaagacataatcatggattatgttgacattttcttttaaatttttgtttaac

SEQ ID NO: 186985 - DNA, 1641 bp, Homo Sapiens
ttggctcttcctgggacaccgccatggccgggctatcccgcgggtccgcgcgcgcactgctcgccgccctgctggcgtcgacgctgttggcgctgctcgtgtcgcccgcgcggggtcgcggcggccgggaccacggggactgggacgaggcctcccggctgccgccgctaccaccccgcgaggacgcggcgcgcgtggcccgcttcgtgacgcacgtctccgactggggcgctctggccaccatctccacgctggaggcggtgcgcggccggcccttcgccgacgtcctctcgctcagcgacgggcccccgggcgcgggcagcggcgtgccctatttctacctgagcccgctgcagctctccgtgagcaacctgcaggagaatccatatgctacactgaccatgactttggcacagaccaacttctgcaagaaacatggatttgatccacaaagtcccctttgtgttcacataatgctgtcaggaactgtgaccaaggtgaatgaaacagaaatggatattgcaaagcattcgttattcattcgacaccctgagatgaaaacctggccttccagccataattggttctttgctaagttgaatataaccaatatctgggtcctggactactttggtggaccaaaaatcgtgacaccagaagaatattataatgtcacagttcagtgaagcagactgtggtgaatttagcaacacttatgaagtttcttaaagtggctcatacacacttaaaaggcttaatgtttctctggaaagcgtcccagaatattagccagttttctgtcacatgctggtttgtttgcttgcttgtttacttgcttgtttaccaatagagttgacctgttattggatttcctggaagatgtggtagctacttttttcctattttgaagccattttcgtagagaaatatccttcactataatcaaataagttttgtcccatcaattccaaagatgtttccagtggtgctcttgaagaggaatgagtaccagttttaaattgcccattggcatttgaaggtagttgagtatgtgttctttattcctagaagccactgtgcttggtagagtgcatcactcaccacagctgcctcctgagctgcctgagcctggtgcaaaaggattggcccccattatggtgcttctgaataaatcttgccaagatacacaaacaatgatgaaactcagatggagcttcctactcatgttgatttatgtctcacaatcctgggtattgttaattcaacatagggtgaaactatttctgataaagaacttttgaaaaactttttatactctaaagtgatactcagaacaaaagaaagtcataaaactcctgaatttaatttccccacctaagtcgagacagtattatcaaaacacatgtgcacacagattattttttggctccaaaactggattgcaaaagaaagaggagaagaatattttgtgtgttcctggtattcttttataagtaaagtttacccagggcatggaccagcttcagccagggacaaaatcccctcccaaaccactctccacagctttttaaaaatacttctactcttaacaattacctaaggcttcctcaactgccccaaatctcttaatagcttctagtg

SEQ ID NO: 186986 - DNA, 1729 bp, Homo Sapiens
ttggctgtccatgtggatgaactgtgtcctctcattgtccccaatctgggagttgctgtcattcatgactatgcagattgggttaaagaagcatcaggagacttaccagaagcacaaattgtgaagcactggagcctgacatggacactatgtgaagccctatggggccacctgaaggagcttgacagccagctaaatgaaccccgtgaatacattcaaattctggagcgaagaagagctttctcccgctggctatcctgtactgccacacctcagattgaagaggaagtctccttaacccaaaaaaacagccctgtggaggctgtattcagctacctcacaggcaaaaggatcagtgaggcctgctctctggcccagcagtcaggggatcatcgtcttgctcttcttttatctcagtttgtgggtagccagtcagtccgggagctgctcaccatgcagttggtggactggcatcagctccaagcagactccttcatccaggatgagagactgcgcatctttgctctgttggctggaaaaccggtgtggcagctctcagaaaagaagcaaataaacgtgtgctcccagttggattggaaacgctccctggctatccatctttggtatttgcttccaccaacagcctccatttctagggcgctcagcatgtatgaagaagcatttcagaatacctctgacagtgacagatatgcctgctccccacttccttcgtatctggagggttctggctgtgtgatagcggaggagcaaaactcacagacaccacttcgagatgtctgctttcaccttctataatctctacagtgacagacattatgatctcaaccagctgctggagcctcgaagcataacagcagatcctttggactaccgcctaagctggcacttgtgggaagtgctgagggctcttaactacacccatctctcagcgcagtgtgaaggtgtgctacaggccagttacgctggccagcttgaaagtgaggggctctgggagtgggccatctttgtcctcctgcacattgacaactcaggcatacgtgagaaggctgttcgagagctgcttacccggcactgccagctgttggagacccctgaatcttgggctaaagagactttccttacccagaagctccgtgtacctgccaaatggatccacgaggccaaagctgtgcgagcacacatggaatctgacaagcacttagaggccctttgcttatttaaggctgagcactggaaccgctgccacaagctcatcatccgacacttagcttctgatgccatcattaatgagaactatgactacctgaaggggttcttggaagacctggcacctccagagcgcagcagcctaattcaggattgggaaacatctgggcttgtttacctggactatattagagtcattgaaatgctccgccatatacagcaggtggattgctcaggtaatgacctggagcagttacacatcaaagtgacttcactgtgcagtcggatagagcagattcagtgttacagtgctaaagatcgcctggctcagtcagacatggccaaacgtgtagccaacctgctgcgcgtggtgctgagtctgcatcatcctcctgatagaactccgactcaacaccagaccctcagcgagtccctttgcgcctcttggctccccacattggccggcttcccatgcctgaggactatgcccttggacgaactg

SEQ ID NO: 186987 - DNA, 1414 bp, Homo Sapiens
acaaaaaagttggcttctctgcatcgaaggatcaggaagtttgtgctctctgcgtggctaagtttttcacctactaggacgggggtggggtggggagaacaggtgtccttctaaaatacagcacaagctacagcctgcgtccagccataacccaggagtaacatcagaaacaggtgagaatgaccactttaactcaccgggcccgtcgcactgaaataagcaagaactctgaaaagaagatggaaagtgaggaagacagtaattgggagaaaagtccagacaatgaagattctggagactctaaggatatccgccttactcttatggaagaagtattgcttctgggactaaaagataaagaggggtacacatctttctggaatgactgcatatcatcaggcctgcgagggggcatcctgatagagctggccatgcggggtcgaatctatctggaacccccgaccatgcgtaagaagcgactactagacagaaaggtactgctaaagtcagacagcccaacaggtgatgttttactggatgaaactctgaaacacatcaaagcaactgaacccacagaaactgtccaaacatggatagagctactcactggtgagacctggaaccccttcaaattacagtaccagctgagaaatgtacgagagcgcatcgcaaagaacctagtagagaaaggtattctaaccactgagaagcagaatttcctgctatttgacatgactactcatccagtgaccaatacaacagagaaacagcgactagtgaaaaaacttcaagatagtgtactagagcggtgggtaaatgaccctcagcgtatggacaagcgaacactagcactcctggtgctagcccactcctctgatgtgctagagaatgtcttctcctctctgacagatgacaagtatgatgtggcaatgaatcgagccaaggacttagtagaactggaccctgaagtggaagggacaaagcctagtgccacagaaatgatctgggctgtgctggcagccttcaataaatcttaaagccggcaggtggatttctccttttcccctgctggctggtgactgtcagagaccccatcactgagttttgtgtgatgagatgttttcatcatttttgtttccttttcttgaatcagacttgtgatttggggagagcaacttcagggcttctccatagaccttgaccattataagcagaccttatttctccctacacttccactccataggtaaataaactgggtgaagccacacacacccaatgaacattttctcccatttggtggtttagtttcacccagtgtgcttttggataagcagaaatatctaaatgggattttgagttctccagctatagaatgtgaatgagataaaagtgaactatctattatattttt

SEQ ID NO: 186988 - DNA, 1646 bp, Homo Sapiens
ggggaggttgcggcggaattcccgcttgttcctcagctcccttagggtgaactgcttcaggatttcactgttgctccttccacccacccgcacaatgctggtcttctgacaattgtagatgctttccagaaactggtccaaagcatgattagtataacacacaaccaagatggggaacttctggaggctaatttgccaaacagactcgttggttaggagggcctgaacaatttttagacccacataggttttgcctgttccaggaggtccttgaataatagccagttcccttgtgagagcaaactgcaaggcttccatctgggagtcatccagcttcagggcttcttttgagggccactggccaggatctaagacattaattctgggatgtctcaaaccctcgacatttcttagaaattccccagtggctgaaggattctctattaagggggtaaagtcatatctgccccccattagcaagtaccttggctccttcacatgagagttacactccacgatattcctctggaagggaacatcttcctcctggacctcctggagtccttccaggacgtgcctgtaggcctcaaagtatgcagttgtctctaccatgaggaaagagtcagagggctggacctctgctagcagctgttggctttgctcattgaagcagagctggacaattcctcggcagagatcttcctgctccctgttagatacggtggcaaaaagaaatgtctcgaagttgtccttggacatgcataccaaagacccatagagcaatcgtttggaattctgccagcgaacaaacttcagtggttttgtgtcaaactgcaccttgtagactatgcctgatgatgaacacatgggggtgataatcctggtgtcaaagtagattcggatgtcatcaaactttctcttcctcaggccctggtcttcaaagctttggagaagttccaaaataccttcccgtaaaggtctgacgaaatcttctcgcaggagccggaagtgggtatccagatagatagcagtgctgtcgtattttccagaaatgatattggggcgaaggaagggcctctcatccaagtgcacttcattgtaggtagggtaaatgggcatggttcggtagctctcaacatggtcttctgcctcaggctgcactagagtgtaggtatccactctcaaagtgccctctcgcctcttttcctgcagatgttcaatgatagtctgtaccttttccaggttcttctccgtttcctcttctatgtcaacaccagaggctctcagagcattaagagaggttggcaggagggaaaccagcatggaagtttcctgcacagagctggcagggaagacacttacaaggtcctggaggagggagatgatgttgcttatgtgctctggatactggtttcggatgtcagggatgggttcagtgatcatccctaccacataagcaggcaggcagactttgagaaatttggagtttttcaatatgcccagtacatggagaacactctggcgatccattttggagctacaagccttccgaagaacctgacagatgagctcaaggaagttagatttcatggaagaatgagaaaggagctctttcagccctaaacttgtggcaagtgtgatgccaa

SEQ ID NO: 186989 - DNA, 1728 bp, Homo Sapiens
  misc_feature (289)..(317): n is a, c, g, or t
ttggggtaaactaagtttttctctgctgtttttttgcttgagagagctataactgtaatagacttatatttctgaacattttagtgcttgccaatatttggtaatatttatgtttcctatatttgtaatgaacattcttcttcaggtacatttcttgttaaattattgtttcatgcataaaagttcaccttttattgtataaaattgactcagattaatttatacacattgacaatgggtaaatagagtttttcagattattaaaagctgaaggatgcccatgtaagcnnnnnnnnnnnnnnnnnnnnnnnnnnnnntaaacccaaacccctcaaacaatttcgaacacaaaacattcttctcacgccggcatccctgcttgcaggtgtgaagggggcaggaatcagcgaggtgtcctgggctgagtccccggagtgggaagaggtggccggaaggggatctgaggaggagaacaggggtcctggtggtctgtgcttcttcccagacacgggagctgtagaggagacctctgcagcagatgctaggggggccagtaggcccaggcagtcttgggacttgggtctgtcctgctgtgcatccatagtgggtgctttagaaacgggaggcccacccgaagcccctgttgcaagtgaggacaaagtgtgggaaggccgtgagggtctgcagtccgagatggccttgtcctcaacgtgcagtgcactgttgatgcggggcctagaggcctgggatctgggggagccacccctgggggcgagtgtctgccctggtgctgtacctgccttgttttcacagcggtgacccgaagagacagcctgaggtccgtcctcactcactgtgtttgaggaactgagggccagctggcagtgggatgaggctggccccctcctccgctttacttcctggaggccttccgtagagctgtgggagctggagctggcatttcgtttgaggcacgatctggtccgggaggtctgggatctctggttatatctcacttctgacctctgggcacgtgctgcagctgtggctgaggccaagaaatgtgaggggcctccatccactgcattgagtagtgaccccgacgtggggttcaatgtggaggggggaggggctgctgcggcagctgcaggagccgaccttgttcttctcatgccggcatccctgcttgcagctgtgaagggggcaggaatcatcgaggtgacctgggctgagtcccgggagtgggaagagttggcaggaaggggatctgaggaggagaacaggggtcctggtggtctgtgcttcttcccagacacgggagctgtagcggggacctctgcagcagatgctaggggggccactaggcccaggcagtcttgggacttgggtctgtcctgctgtgcatccatagtgggtgctttagaaacgggaggcccacccgaagcccctgttgcaagtgaggacaaagtgtgggaaggccgtgagggtctgcagtccgggatggccttgtcctcaacgtgcagtgcactgttgatgcgctggaatgccgtctctttttccaggtgcaggtcttcagccgtgacccggtaccccagctctaagggaggtggcagcatcaaagctctcctcgcctgcgtggcagcaggggaatcttgcgtctacgggcctagagtcctgggatctgggggagccacccgttggggcgattgtctgccctggtgctgtatc

SEQ ID NO: 186990 - DNA, 1345 bp, Homo Sapiens
ttggccaacccctaccatgagctttccatgtaaatttgtagccagcttccttctgattttcaatgtttcttccaaaggtgcagtctccaaagagattacgaatgccttggaaacctggggtgccttgggtcaggacatcaacttggacattcctagttttcaaatgagtgatgatattgacgatataaaatgggaaaaaacttcagacaagaaaaagattgcacaattcagaaaagagaaagagactttcaaggaaaaagatacatataagctatttaaaaatggaactctgaaaattaagcatctgaagaccgatgatcaggatatctacaaggtatcaatatatgatacaaaaggaaaaaatgtgttggaaaaaatatttgatttgaagattcaagagagggtctcaaaaccaaagatctcctggacttgtatcaacacaaccctgacctgtgagagaaaggtctggacatctatctcatcattggcatatgtggaggaggcagcctcttgatggtctttgtggcactgctcgttttctatatcaccaaaaggaaaaaacagaggagtcggagaaatgatgaggagctggagacaagagcccacagagtagctactgaagaaaggggccggaagccccaccaaattccagcttcaacccctcagaatccagcaacttcccaacatcctcctccaccacctggtcatcgttcccaggcacctagtcatcgtcccccgcctcctggacaccgtgttcagcaccagcctcagaagaggcctcctgctccgtcgggcacacaagttcaccagcagaaaggcccgcccctccccagacctcgagttcagccaaaacctccccatggggcagcagaaaactcattgtccccttcctctaattaaaaaagatagaaactgtctttttcaataaaaagcactgtggatttctgccctcctgatgtgcatatccgtacttccatgaggtgttttctgtgtgcagaacattgtcacctcctgaggctgtgggccacagccacctctgcatcttcgaactcagccatgtggtcaacatctggagtttttggtctcctcagagagctccatcacaccagtaaggagaagcaatataagtgtgattgcaagaatggtagaggaccgagcacagaaatcttaaagatttcttgtcccctctcaggtcatgtgtagatgcgataaatcaagtgattggtgtgcctgggtctcactacgatcagcctatctgcttaatagactctggagtttcttatgtgccctggtggacacttgcccaccatcctgtgagtaaaagtgaaatcaaaagctttgacta

SEQ ID NO: 186991 - DNA, 1695 bp, Homo Sapiens
ttggatcctttcaggtctgaaagctaataacattgactacacagttcattcagtcagaagagctctagaaaacactgcagtgaaggctgacaatatagaagtatttgctcaaggacatggtattattcaggttgataaagcctatgactacctcgttcagaatacatcatttgctaataaattaggttttactgttactgttggaaataaccgtggcatctacctccgagatcctgttcaggtggctgcaccttcagatcatggcgttggcattgaacctgtatttccggagaacacagaaaactctgaaaaaatatcccttcagcttcatttagctctgacttcaaattcatcttgggttcagtgtcccagccatttggaactcatgaatcaatgtagacacataaacatacgtgtggatcccaggggcttaagagaaggattgcattatacagaggtatgtggctatgatatagcatcccctaacgcaggtccgctcttcagagttccgatcactgcagttatagcagcaaaagtaaatgaatcatcacattatgatctagcctttacagatgtacactttaaacctggtcaaattcgaaggcattttattgaggttcctgagggtgcaacatgggctgaagtgacagtgtgttcgtgttcttctgaggtgtcagcaaagtttgttctacatgcagtccagcttgtgaagcaaagagcatatcgaagccatgaattctataagttttgttctcttccagagaaaggaacactgactgaagcttttcctgtcctaggtggaaaagcaattgaattttgcattgctcgttggtgggcaagtctcagtgatgtcaacattgattataccatttctttccatgggatagtgtgtactgctcctcagttaaacattcatgcatcggaaggaatcaaccgctttgatgttcagtcctccttgaaatacgaagatctggctccctgcataactttgaagaactgggtccaaacactgcgcccagtgagtgcaaaaacaaaacctttaggatcaagagatgttttgccaaataaccgtcaactttatgagatggtcctgacatataactttcatcaacccaagagtggggaagtaactccaagctgcccactactttgtgaactattatatgaatctgaatttgacagccaactgtggattatttttgaccagaacaaaagacagatgggttcaggcgatgcctatccacatcagtattctttgaaactggagaaaggagattatacaattcgactacagattcgccatgagcaaatcagtgatttggaacgccttaaagaccttccatttattgtttctcatagattgtctaataccttgagcttagatattcatgaaaatcatagttttgcacttctagggaagaagaaatcaagcaatttgacattaccacccaaatataaccagccattctttgttacttccttacctgatgataaaatacctaaaggggcaggacctggatgctatcttgcaagatccttaacattgtcaaagactgaactaggaaagaaagctgatgtaatccctgttcattactacttaatacctccaccaacaaagactaagaatggcagcaaagataggaaaaagattcagaaaagagaaagatttaaaagaagagtttactgaagcattac

SEQ ID NO: 186992 - DNA, 1722 bp, Homo Sapiens
  misc_feature (846)..(952): n is a, c, g, or t
ttggcctttttagcaaaatggagcaactgtttttgcagctgattttacgtattccctcaaacatcttgcttcctgaagataaatgtaaggagacaccttatagtgaggaagattttcagcatctccagaaagaaattgaacagttacaggagaagtacaagactgaattatgtactaagcaggcccttcttgcagaattagaagagcaaaaaattgttcaggccaaactcaaacagacgttgactttctttgatgagcttcataatgttggcagagatcatgggactagtgattttagggagagtttagtatccctggttcagaactccagaaaactacagaacattagagacaatgtggaaaaggaatcgaaacgactgaaaatatcttaattgctcagtagtcaaaaggaggagcctgtcaaaaagtagaatcataaggactgttcaaaccataaggactgttcaaatcataccagtgactgttcaaaccaaccatactttttattagatttgctttgtcaactctttcttgtattctgtgttttcctcttttttggtccactttgctgaggtatgaagtgtactactttgaactaggctgaagcatctgagtcttctaataagtgggaagggatccaacaaagaagccatgaccagttaaagatatttgcagagttacaccttggtcataagtcctttgtgaccttgattattttggcttactctttggatgagaccagacaagaaaaggattaaacgggtggctcctttaatattattattattgtttttgagacaaggtccctttctgtcacccaggttagagtagatttcagtggcacannnnnnnnnnnnnnnnnnnnnnnnnnnnnnnnnnnnnnnnnnnnnnnnnnnnnnnnnnnnnnnnnnnnnnnnnnnnnnnnnnnnnnnnnnnnnnnnnnnnnnnnnnntttgcagaaacgaggcctcactatattgtccaggctgagtggctcttttattaaccagtcattacactgcggaacagccaacatagagtacttgctctcgtcctgtgaattttctttcatgagggagtcaatatgtagtggaaagaagcatgtagcaaaaaagacaaccttgatctttaataaaaaagaagttggtttatttccaaaataaatcccctgacaaaaaacctggtgatgttaagcaattgactgtcttagagtccagcagaagaccttagacaaaaaaagcagaacccactggagtagaaaaggaagcatgtagcatatactcagtagtgaaatttaattttactgactgttaggtatctatgccaatttgttttcatacttcagttggttttggaatctgccttatacctaatatttatttattcacactcataagcatcaaatatttaatgccctcagtgggaaatttgtgtttaaactcaatggaatctaatatttctttatgtcgttagtccctgtaaaatgttaggtcacccaaggaaaggggagaaatagcaatggttgttcctaaaggtattgcttgccctccatgtcttcctaaagagcagaacttggagtttctcctttatgtagagaaaaaataaccttagggtgtatttgcaatgaaatattcatagatattgaaagcttgtgtttacatgaaaatatgtttattatcaagaagtcctttttccaattctgtacattaaatatatgtgttt

SEQ ID NO: 186993 - DNA, 1682 bp, Homo Sapiens
ttggctgttttgagctttgaatacttaaggctttagagggagaacccaattttcaattatgttggctttttataaagcttgagttatgtaagatttaaataaaagtttgctaccaagatgattgccttattgaataggtcactattaaattcctttaaatgttgatatctgccatttgtggaaacaacgtaaattctacttaagtgtaaacaaggcaagcctcagaccagcaataaattactcagtttggataacattattttgtgcagttaatcaaatttgccaaagtctttatctgcccctttaacaagttgagtaaaaataaaaggtattttttagtcaatgtgttccatgattttgcttaaattaatacttttaagtaatggaacttttttcaaaggcaaatttaaactatttaagaaatagctcctaatacttgggatcttgtttagagaatccactttctggaagttctcagcataattagtgttgagagtggttcagttgtctttaatgtttgtcatgtggaaatggaagtagcctctttttgttctgaaattgagtttattcaaagtgtaaaagcacatactgcattttctgctgaaagatcattatgtttaacaggcacttaatctcagtaaagtcagttgccagttaagttccacccagtagtcagtcccctttgtagttagtgggattatttgataattggttagatcatacttgtaaattttaatgctttgtgtaattggtttgaaaaacagtgaaatgggtaaacgcaaaacttttgtactttattacgagtaaagtgtaatgagtactgtggaaaccaaatttgaatactgcaaatttgtaggagttactaggttagcaattagtccatacatccataagcctgatgagttgaaattgcagtttgagaagtgaattaaccttacatccctttgttcagataccttaaaagttactttatttaaaagcatttattaatcttagtctgaaatcaaaatatagattaattggctcagctttaatacctttctaggaggtgtcacaatgtagggtaccaagggttggattgtgatggggcatggtcgtacactgctcattgtgccacaggtgtgactggaaagcatgatattctagggttggtttgtagattcaaataatccagaaatatacctaataagattgagtgaaaaatttgagtcaaatatctagggcattcacagagtagctgtgagttcttggtaatgtgaaaaaggccttgtttttcagaaattcctgggtttcctgttaaaaaatcttaaagcccaaccttaggaatatagtgccccaaaaggcggatgcttcttccattatcttattttctttgatactttatttaattagatgtttataaagaaatgggtttatttttccagcataaacctcagaatttaaggaaagaaaatgatgtctgttgttatagttcattgttttgcctactcagcagaagtgatgactcttaaaaattggctttgaccaaagttctcttgttttcagggaaagaacataaaagctttttgaactacagcctttttaaagagggatgggaggatattacagtaagaaattacgctttctaaaagtatgaaacatctttcaactggctctcttgttaataggacatcatatggtaa

SEQ ID NO: 186994 - DNA, 1025 bp, Homo Sapiens
ctttgtacaaaaaagttggccataagcctgatgagttgaaattgcagtttgagaagtgaattaaccttacatccctttgttcagataccttaaaagttactttatttaaaagcatttattaatcttagtctgaaatcaaaatatagattaattggctcagctttaatacctttctaggaggtgtcacaatgtagggtaccaagggttggattgtgatggggcatggtcgtacactgctcattgtgccacaggtgtgactggaaagcatgatattctagggttggtttgtagattcaaataatccagaaatatacctaataagattgagtgaaaaatttgagtcaaatatctagggcattcacagagtagctgtgagttcttggtaatgtgaaaaaggccttgtttttcagaaattcctgggtttcctgttaaaaaatcttaaagcccaaccttaggaatatagtgccccaaaaggcggatgcttcttccattatcttattttctttgatactttatttaattagatgtttataaagaaatgggtttatttttccagcataaacctcagaatttaaggaaagaaaatgatgtctgttgttatagttcattgttttgcctactcagcagaagtgatgactcttaaaaattggctttgaccaaagttctcttgttttcagggaaagaacataaaagctttttgaactacagcctttttaaaagagggatgggaggatattacagtaagaaattaggctttctaaaagtatgaaacatccttcaactgggctctcttgttaataggacatcatatggtaatagactggtttgactatattgttagctgccacagtaagcaggtcattgtataggtaaatgcctgcacccataattttctagtaatagccacgaccaatttattaacagtcagggcctatccttgcctgtagttctcagtcactggatgcacaaaatcactgtgtaacattggctcacttggtgagcatagggttgactgataaaatgtt

SEQ ID NO: 186995 - DNA, 917 bp, Homo Sapiens
ttggctctcaggccttttccgcttctcttttacctccccaggtccgcccgtctgcgcccctcacaggaagccggagggtcgctctgatcccgaatctcccacaggcgtgaacctgctctgctgtgtatctttgcggggtggcctgcgctgaggcctgccgcgcgcggtgagtccgcgcagacctgaccctgcgtctcgcagctcggttgaggccgccgccgccttctcgggatgccgcggccggggtccgcgcagcgctgggcggccgtcgcgggccgttgggggtgcaggctgctcgcactgctgctactggtgcctggacccggcggcgcctctgagatcaccttcgagcttcctgacaacgccaagcagtgcttctacgaggacatcgctcagggcaccaagtgcaccctggagttccaggtgattactggtggtcactatgatgtagattgtcgattagaagatcctgatggtaaagtgttatacaaagagatgaagaaacagtatgatagttttaccttcacagcctccaaaaatgggacatacaaattttgcttcagcaatgaattttctactttcacacataaaactgtatattttgattttcaagttggagaagacccacctttgtttcctagtgagaaccgagtcagtgctcttacccagatggaatctgcctgtgtttcaattcacgaagctctgaagtctgtcatcgattatcagactcatttccgtttaagagaagctcaaggccgaagccgagcagaggatctaaatacaagagtggcctattggtcagtaggagaagccctcattcttctggtggttagcatagggcaggtatttcttttgaaaagctttttctcagataaaagaaccaccacaactcgtgttggatcataactacgttttga

SEQ ID NO: 186996 - DNA, 1459 bp, Homo Sapiens
  misc_feature (45)..(58): n is a, c, g, or t
ccaactttgtacaaattatatagatatttaaagcttttctgctgnnnnnnnnnnnnnnaattgcaactgcttttctgccgtgcctctcttccctacccaaaagtgatgagttctgaacaagacaagactgtcatattgtagagactttggtatgtgataccatagaatactgattggatagccatcctagtcacttaccaatactgactagaagttaactcttaattctaagctatcttaaaatgcatatatatacttcttgcatggaagagcaaaacaaattcaagttgtcatgcctgataatttcagatgccaccgtatagcaaagggtgaacatgttttcaaccctttaactttttacggtgtttgaagaccagctactccttaatatttatcaatggattaagaagtttaagattttgcagatttatcaatttgggtttttgtactgaagttgtcttgcggctttgcaagtgtccctttatatttaaatttgaaagttgtaagcactgatgttaatgtgattgatcagcatgggcatatgtaaaatgtccttttctggttgcctctctatgctattgtgttcagatacttacaccataattaaacagtaagttatagacttgctgagtttggcatagatagtgcactcatttaatctgtgcctctcaaaacttcagaatattagcatattaccacaaataatttttggtgaaactattgagatattaaaatttttgaaatcactactgttacctgttatagaaaatagtgttggcttagtctagtctctgtgtaactggttacattttgatggttgtctatactcaactggatatgtgtatgtaaattagaaaatacatacctatccagacataaatgctaagtaacatttttttcttcctccaactacataatttgtagctcatcatttttccttaatcctttcctaacttgttgcagcagtttgaatttcccagatatttatgtttgaacataatggctcagaatacatatttgaacatcatagttgtatatatttttaaagtagaataaataatggaaagcaacttgatatacaagtttatactaaaatttcaactgtgtgaagatacattttaaggcattactttgctaataatctacacattcttttttctattaaataaacaaatggtttgtggttcacagctttcatccaagcttggtgataatcaattttgaaaatacagtggactgaaaagcaaatttattctttcgaagatttcatttaaatctctgtactatgcatttttgtttcagtttgtaaatgtgtaacatttatagttaaataggacaaagcaggccctatgactattgttttcaaaaaataatatataaataattcaaaggggtttttcatttacttttgaaaagaaatttctttaacaggattgcacctatcaatttcttgtagaat

SEQ ID NO: 186997 - DNA, 1576 bp, Homo Sapiens
aactttgtacaaaaaagttgggtcgcgggccgttgggggtgcaggctgctcgcactgctgctactggtgcctggacccggcggcgcctctgagatcaccttcgagcttcctgacaacgccaagcagtgcttctacgaggacatcgctcagggcaccaagtgcaccctggagttccaggtgattactggtggtcactatgatgtagattgtcgattagaagatcctgatggtaaagtgttatacaaagagatgaagaaacagtatgatagttttaccttcacagcctccaaaaatgggacatacaaattttgcttcagcaatgaattttctactttcacacataaaactgtatattttgattttcaagttggagaagacccacctttgtttcctagtgagaaccgagtcagtgctcttacccagatggaatctgcctgtgtttcaattcacgaagctctgaagtctgtcatcgattatcagactcatttccgtttaagagaagctcaaggccgaagccgagcagaggatctaaatacaagagtggcctattggtcagtaggagaagccctcattcttctggtggttagcatagggcaggtatttcttttgaaaagctttttctcagataaaagaaccaccacaactcgtgttggatcataactacgttttgagaattgatgcaccattgccactgtaatattgctgtcctctaattaattttaggtactgaagaacttaatattggcaacatttttaaatccttactcatacacttgttgggagggatgtacaatgcatattcccaaactgtggaaaggacacctttttttatttgtaaaggtggaaaaactttggaactcattttgggctattcatgttaaatattcaacaccaatgatctactctgttcgcagttgtttatatctactcttcgcacactaaactttggtattttgattccttttaaccatttaagactacttttcttataggtagttgatattttaaaaactttagatttaatgtctacatgtgttagggaggaagaaaattgccttttaattgttaataagaaaaccaaatgtgatgaactgtagcccaagccctattctgcactgttcagttttatggaggaaaaataaatctaccataggaatgttagttaatattgatatatcatggtaaaattgatttctcactagcttagaaaatgtcagacttttgtttttggggtttataatttaaaccagctatgctattttttcataaaggcatttgtagtacacagaaaacagtagtttcagtagtgtaaaagagtttatacaggccttaaatatcagactttgtaacaggtagaaatattagcatattaccacaaataatttttggtgaaactattgagatattaaaatttttgaaatcactactgttacctgttatagaaaatagtgttggcttagtctagtctctgtgtaactggttacattttgatggttgtctatactcaactggatatgtgtatgtaaattagaaaatacatacctatccgacataaatgctaagtaacatttttttc

SEQ ID NO: 186998 - DNA, 1098 bp, Homo Sapiens
ctttgtacaaaaaagttgggaccatcctggcatccccggtgtttggctgggttctagcgtagccgtctgtgtggccggtgggggacctgcggtcggagtgggagggccagtctgcacccaagaggtggaagaggacgggctttaggctggaagcgccttagaggagccatttttccaggtggggccccaggcagaggctccgacagggagcctggccatagtcgcgcagccggggaggtggagcgcgtcccagacccgagcccccgacctcagccaaacccattccttctgtccttggaggccagaggggactctgagcatcggaaaggatgcctggtttgcttttatgtgaaccgacagagctttacaacatcctgaatcaggccacaaaactctccagattaacagaccccaactatctctgtttattggatgtccgttccaaatgggagtatgacgaaagccatgtgatcactgcccttcgagtgaagaagaaaaataatgaatatcttctcccggagtctgtggacctggagtgtgtgaagtactgcgtggtgtatgataacaacagcagcaccctggagatactcttaaaagatgatgatgatgattcagactctgatggtgatggcaaagatcttgtgcctcaagcagccattgagtatggcaggatcctgacccgcctcacccaccaccccgtctacatcctgaaagggggctatgagcgcttctcaggcacgtaccactttctccggacccagaagatcatctggatgcctcaggaactggatgcatttcagccataccccattgaaattgtgccagggaaggtcttcgttggcaatttcagtcaagcctgtgaccccaagattcagaaggacttgaaaatcaaagcccatgtcaatgtctccatggatacagggcccttttttgcaggcgatgctgacaagcttctgcacatccggatagaagattccccggaagcccagattcttcccttcttacgccacatgtgtcacttcattgaggtcctgggcctatgtcaagaagtgcaaaaacaacatgtgtccaaatcggggattggtgagccagctgctg

SEQ ID NO: 186999 - DNA, 2153 bp, Homo Sapiens
  misc_feature (361)..(415): n is a, c, g, or t
ttgggactcctaaaaccaggagaagaaccatcagaatatacagatgaagaagataccaaggatcacaataaacaggattgaactttgtaaacaaccaaagtcaggggccttcagaactgcaattcttactccctttcacagactgtccggagtctttgggtttgattcacctgctgcgaaaaacattcaacaaattgtgtacaagataaattaatctcactatgaagatttgaataactagacattatttatgctgccaaactcatttgttgcagttgtttgtaatgtctagtggggcttcatcatcctgaaaagaaggagacagggatttttttaaagagcaagaaagtcacaatattannnnnnnnnnnnnnnnnnnnnnnnnnnnnnnnnnnnnnnnnnnnnnnnnnnnnnnaaaatatattgaagacaaccagatatgtatttgctactcaagtgtacagatctcctcaagaaacatcaagggactcctgtgtcacatactgtgtttttattttaacatgggtgagggaggcgacctgatcaggggaggtgggggtacacatcaatttgagttgttcaggctactgaaacattaaaatgtgaattcccaaacttttctttttggctttgtcagggaaaagaaaaatatctttataaagaaatctttggaaattaggagaaggaatttcaggtgggtttaagtcagagctagttccccaacagaaagatcatttgaaaccagtttttatcccttctctttccttccctttccctaaatcaaatcaatattaattgtgccttatttcacttaacatagacttgaattatttttagggaaagcccctataatgaattcagaaatcactacaagcagcattaagactgaagttggaatattctgttgaccataaaaccttgatatcattctgtgtatatagaatgtaaaaggaatattacagtgttaactgccatatatgtaatatacacaaactcaattagcattgtaatggccaaatgcattcccccatgcttttctgttttcaaaaaaattgaaaaacaaatcaactcttatccccaacagctgcctaattttaggagtctgaccctccacatctcactggtgtgggtgcatggggctgtggagtgggtgtcagtatggatgtgtctgaatgtgtgaggccttggaagggactctttctgcagatactgtaaatacaagtaccattttaataaagcatgtacaataaaccaaaataagcttgagttggactttatatacagaactgtaagccagtgcattatgatacagttgtaagattgtgcatttgattcaagataaggaaaaatcttggaaatgaaaagcaggcactggttaaccaagttgtacacattgtaccacattcagcataactttaggaagaaattccactttgtggaacattctccagaaatccaagattattcaggtaagaattggtatattaaatgtacatctttttactttctattttgatgccaactgattatactagacaattagcactccaggtggttattgaacacaaaacagtaaaagaatattgcactgatagatactaaattattattttattaggttgaaaaagcccttactaaaagcccctcatatatcaattactttatttcattatgactacttaggttccgggctggggacaagttcacttaaaaaggcaatgttatttaacaggtcaccagttaagacttctgctttgtagatacatgcagaagccatcaaacaagggggagcttttaactgcaacaataagctaaagtatgtaaaatactacattctattcagtcttggagtgttttgtagaaagttatcttcagccaaatctttgctgaagactggttgtggagtgttggtaaatgctttgtgtttttatgtaaaatattttctaaacaaaaaatgttaaaagtacatgtcctctgtagtaaactgatatctatatatatgaatcattcaagcctaaagtctagtaataaactgtacttgtgaatagagaaaccctaaatattcatgcagtaaaaattatgcggtctgttaagaaaaatgagtaatttgtgttttggacttgaaatagacagtgttctgtagataattcctc

SEQ ID NO: 187000 - DNA, 944 bp, Homo Sapiens
  misc_feature (462)..(516): n is a, c, g, or t
actttgtacaaatatgatgatctctcagatcctttaatgcagtacaaatggagagtgttcgagaatgggaaatgcagtttaaagaaaaatatgattatgtaggcagactcctaaaaccaggagaagaaccatcagaatatacagatgaagaagataccaaggatcacaataaacaggattgaactttgtaaacaaccaaagtcaggggccttcagaactgcaattcttactccctttcacagactgtccggagtctttgggtttgattcacctgctgcgaaaaacattcaacaaattgtgtacaagataaattaatctcactatgaagatttgaataactagacattatttatgctgccaaactcatttgttgcagttgtttgtaatgtctagtggggcttcatcatcctgaaaagaaggagacagggatttttttaaagagcaagaaagtcacaatattannnnnnnnnnnnnnnnnnnnnnnnnnnnnnnnnnnnnnnnnnnnnnnnnnnnnnnaaaatatattgaagacaaccagatatgtatttgctactcaagtgtacagatctcctcaagaaacatcaagggactcctgtgtcacatactgtgtttttattttaacatgggtgagggaggcgacctgatcaggggaggtgggggtacacatcaatttgagttgttcaggctactgaaacattaaaatgtgaattcccaaacttttctttttggctttgtcagggaaaagaaaaatatctttataaagaaatcttttggaaattaggagaaggaatttcacgtgggtttaagtcagagctagttccccaacagaaagatcattttgaaaccaggttttatcccttctctttcccttcccttccctaaatcaaatccatattatttgtgccttattccacttaactagacttgaattatttttagggaaa

SEQ ID NO: 187001 - DNA, 1606 bp, Homo Sapiens
  misc_feature (187)..(246): n is a, c, g, or t
ttggcttttgttctctgtctcttttccttaaaattgggggtaaggagggaaggaagagggaaagagatgactaactaaaatcatttttacagcaaaaactgctcaaagccatttaaattatatcctcattttaaaagttacatttgcaaatatttctccctatgataatgtagtcgatagtgtgcannnnnnnnnnnnnnnnnnnnnnnnnnnnnnnnnnnnnnnnnnnnnnnnnnnnnnnnnnnngacacggcaccattctgcctggggcactggaacacattcctgggggtcaccgatggtcagagtcactagaagttacctgagtatctctgggaggcctcatgtctcctgtgggctttttaccaccactgtgcaggagaacagacagaggaaatgtgtctccctccaaggccccaaagcctcagagaaagggtgtttctggttttgccttagcaatgcatcggtctctgaggtgacactctggagcggttgaagggccacaaggtgcagggttaatactcttgccagttttgaaatatagatgctatggttcagattgtttttaatagaaaactaaaggggcaggggaagtgaaaggaaagatggaggttttgtgcggctcgatggggcatttggaacttctttttaaagtcatctcatggtctccagttttcagttggaactctggtgtttaacacttaagggagacaaaggctgtgtccatttggcaaaacttccttggccacgagactctaggtgatgtgtgaagctgggcagtctgtggtgtggagagcagccatctgtctggccattcagaggattctaaagacatggctggatgcgctgctgaccaacatcagcacttaaataaatgcaaatgcaacatttctccctctgggccttgaaaatccttgcccttatcatttggggtgaaggagacatttctgtccttggcttcccacagccccaacgcagtctgtgtatgattcctgggatccaacgagccctcctattttcacagtgttctgattgctctcacagcccaggcccatcgtctgttctctgaatgcagccctgttctcaacaacagggaggtcatggaacccctctgtggaacccacaaggggagaaatgggtgataaagaatccagttcctcaaaaccttccctggcaggctgggtccctctcctgctgggtggtgctttctcttgcacaccactcccaccacggggggagagccagcaacccaaccagacagctcaggttgtgcatctgatggaaaccactgggctcaaacacgtgctttattctcctgtttatttttgctgttactttgaagcatggaaattcttgtttgggggatcttggggctacagtagtgggtaaacaaatgcccaccggccaagaggccattaacaaatcgtccttgtcctgaggggccccagcttgctcgggcgtggcacagtggggaatccaaagggtcacagtatggggagaggtgcaccctgccacctgctaacttctcgctagacacagtgtttctgcccaggtgacctgttcagcagcagaacaagccagggccatggggacgggggaagttttc

SEQ ID NO: 187002 - DNA, 1441 bp, Homo Sapiens
ttgggaatgtgggagatgctttattccctccacagaccttgctgtgcgtatacaaactcacaggtcagaaaaaccctactcatgtaaggaatgtggaaaaggatttacatattctgcataccttattattcacatgggaacccacactggagacaatccctatgagtgtaaagagtgtgggaaagccttcaccaggtcttgtcaacttactcagcacagaaaaactcacactggagagaaaccttataaatgtaaggattgtgggagagccttcactgtttcctcttgcttaactcaacatatgaaaatccatgtgggtgagaagccttatgaatgcaaggaatgtgggatagccttcactagatcttctcaacttactgaacatttaaaaactcacactgcaaaggatccctttgaatgtaagatatgtggaaaatcctttagaaattcctcatgcctcagtgatcactttcgaattcacactggaataaaaccctataaatgtaaggattgtgggaaagccttcactcagaactcagaccttactaagcatgcacgaactcacagtggagagaggccctatgaatgtaaggaatgtggaaaggcctttgccagatcctctcgccttagtgaacatacaagaactcacactggagagaagccttttgaatgtgtcaaatgtgggaaagcctttgctatttcttcaaatcttagtggacatttgagaattcacactggagagaagccctttgagtgcctggaatgtggtaaagcatttacgcattcctccagtcttaataatcacatgcggacccacagcgccaaaaaaccattcacgtgtatggaatgtggcaaagcttttaagtttcccacgtgtgttaaccttcacatgcggatccacactggagaaaaaccctacaaatgtaaacagtgtgggaaatccttcagttactccaattcgtttcagttacatgaacgaactcacactggagagaaaccctatgaatgtaaggagtgcgggaaagccttcagttcttccagttcctttcgaaatcatgaaagaaggcatgcggatgagagactgtcagcataaggaatgtgggaaaacctaaaggtgtccctgttctctctgaagacatgaaaactcactggggagaaaccctatgaatgtaaaaatgtggaagcaactttgtatctcaggtcttaatgaacacatatgaattcacagtggagaagaccctgcatcagggaatgtggaaatgactttgctgaattctcaagccttaccaaacacatcagaaatctcactggagagaaactgtatgaatgtagagaatctgggaatacctttctgaatcccacaaaccttaatgtgtgtatgtgaactcacattggagagaaaccctgcaatttaaatggtatggtctggatgatgccccac

SEQ ID NO: 187003 - DNA, 1228 bp, Homo Sapiens
  misc_feature (129)..(143): n is a, c, g, or t
  misc_feature (863)..(871): n is a, c, g, or t
ttggcaagcatctaccagaagccatttagagaaaaagaatatttgcccatttgattttaggctaatgcaaatgagtgggaattctgacacatgcaaacgtgttcagaagaggcaaagaagtactttaannnnnnnnnnnnnnnaattattattgtctcttaggtttggatattgatgggatatacagagtaagtggcaacctcgcagtgatccagaaactaaggtttgcagtcaatcatggtaagattatatttactgttgttattcagatgcatcactcataactttttgaactggcttaaagtaattttttaaaatgtccaattcctgctgtttttcagatgagaaattggacttgaatgacagtaaatgggaagatattcatgtcattactggagccctcaaaatgttttttcgagaattaccagaacctctttttacatttaatcattttaatgattttgttaatgcaattaagcaagaaccaagacagcgagtcgctgctgttaaggacctaatcagacagttgccaaagccaaaccaagacacaatgcagattcttttccgacatctcagaagagttatagaaaatggagagaaaaatcgaatgacctatcagagtatagcaattgtttttggtcccactctaaaaccagaaaaagagactggtaatatagcagttcatactgtgtaccagaatcagattgtagaattaattcttctggaactgagttccatcttcggacgttgattcttactgaagacaacctgtggaatagaagctggattccatcagatttcaaatgtttatacacaatgtattttattttttggaccaagcagtgactctttgattttgcacnnnnnnnnngagggatcagaagggaaggggagagtcgagatgtgtgttaggccctcatatttgctgctttgttgcaagttgatataactgcgtgtaattatgaattcattttatcctgaatgtttgcatttcatactctgaatttcagtaaaaatcaaaacttaaaattctaaccagtcatatacactggataatttggtaagaaaactgtattttttttccctgaaattggataatgtactttcttctcaagattcatgacttgatagaacaatactttcagttatgttgcaaagggctcttgggcattttaaacaaaatgaagtatatccattttgaaacctgtgtatttcttttttcggggtt

SEQ ID NO: 187004 - DNA, 1315 bp, Homo Sapiens
  misc_feature (234)..(248): n is a, c, g, or t
  misc_feature (828)..(878): n is a, c, g, or t
ttgggaaaccatttccttgagctgattcacagtctatatgatgagcagagtagaattactgctgtttattaaacagaattcagagcgaatctccatctctctcccctgccaagcatctaccagaagccatttagagaaaaagaatatttgcccatttgattttaggctaatgcaaatgagtgggaattctgacacatgcaaacgtgttcagaagaggcaaagaagtactttaannnnnnnnnnnnnnnaattattattgtctcttaggtttggatattgatgggatatacagagtaagtggcaacctcgcagtgatccagaaactaaggtttgcagtcaatcatgatgagaaattggacttgaatgacagtaaatgggaagatattcatgtcattactggagccctcaaaatgttttttcgagaattaccagaacctctttttacatttaatcattttaatgattttgttaatgcaattaagcaagaaccaagacagcgagtcgctgctgttaaggacctaatcagacagttgccaaagccaaaccaagacacaatgcagattcttttccgacatctcagaagagttatagaaaatggagagaaaaatcgaatgacctatcagagtatagcaattgtttttggtcccactctattaaaaccagaaaaagagactggtaatatagcagttcatactgtgtaccagaatcagattgtagaattaattcttctggaactgagttccatcttcggacgttgattcttactgaagacaacctgtggaatagaagctggattccatcagatttcaaatgtttatacacaatgtnnnnnnnnnnnnnnnnnnnnnnnnnnnnnnnnnnnnnnnnnnnnnnnnnnngagggatcagaagggaaggggagagtcgagatgtgtgttaggccctcatatttgctgctttgttgcaagttgatataactgcgtgtaattatgaattcattttatcctgaatgtttgcatttcatactctgaatttcagtaaaaatcaaaacttaaaattctaaccagtcatatacactggataatttggtaagaaaactgtattttttttccctgaaattggataatgtactttcttctcaagattcatgacttgatagaacaatactttcagttatgttgcaaaggctcttggggcattttaaacaaaatgaagtatatccattttgaaacctgtgtatttctttttcggggtttctgcatgcagtggcagtcttaagtgccaaaatttcattaaaccccaaaataaaccccttgatgaaggcttgctgtctttt

SEQ ID NO: 187005 - DNA, 1469 bp, Homo Sapiens
  misc_feature (1268)..(1279): n is a, c, g, or t
ttggcggtttgggcggcgacgtgagcggctccgcggaccccgagcggggccccggccgcgacctgagccgccgccgagcgcccggggccatgcgaccgacgctgctgtggtcgctgctgctgctgctcggagtcttcgccgccgccgccgcggccccgccagaccctctttcccagctgcccgctcctcagcacccgaagattcgcctgtacaacgcagagcaggtcctgagttgggagccagtggccctgagcaatagcacgaggcctgttgtctaccaagtgcagtttaaatacaccgacagtaaatggttcacggccgacatcatgtccataggggtgaattgtacacagatcacagcaacagagtgtgacttcactgccgccagtccctcagcaggcttcccaatggatttcaatgtcactctacgccttcgagctgagctgggagcactccattctgcctgggtgacaatgccttggtttcaacactatcggaatgtgactgtcgggcctccagaaaacattgaggtgaccccaggagaaggctccctcatcatcaggttctcctctccctttgacatcgctgatacctccacggcctttttttgttattatgtccattactgggaaaaaggaggaatccaacaggtcaaaggccctttcagaagcaactccatttcattggataacttaaaaccctccagagtgtactgtttacaagtccaggcacaactgctttggaacaaaagtaacatctttagagtcgggcatttaagcaacatatcttgctacgaaacaatggcagatgcctccactgagcttcagcaagtcatcctgatctccgtgggaacattttcgttgctgtcggtgctggcaggagcctgtttcttcctggtcctgaaatatagaggcctgattaaatactggtttcacactccaccaagcatcccattacagatagaagagtatttaaaagacccaactcagcccatcttagaggccttggacaaggacagctcaccaaaggatgacgtctgggactctgtgtccattatctcgtttccggaaaaggagcaagaagatgttctccaaacgctttgaaccaaagcatgggcctagcccactggctccctggaagagatcaagccatcggagctgctagagttctgtctggactttccagagaccagtattcccttttgctgcctctaaaaggcctgtccctgcagacatgagagacagcaggtctcatgggggtgacaagcnnnnnnnnnnnncttaaagaattttcaaatcaaaattccagaatgattttacggagatatcccaggaaaataaggcttctcttaaacactaaaaaggcatgtaattgcttgttagcaaaatggatatgacacatctctgatacttttttcattattggttgggctgagcagtcagaagacctggtcgtcgtcttgactttgg

SEQ ID NO: 187006 - DNA, 1119 bp, Homo Sapiens
  misc_feature (155)..(163): n is a, c, g, or t
  misc_feature (871)..(879): n is a, c, g, or t
acaaaaaagttcggggaatttggagagagcatcatgtcagagaacaggtcacgggaagagctggggaaagtgggcagtcagtctagcttttcgggcagcatggaaatcattgaggtctcctgagaagaaagacacttgtgacttctatagacaannnnnnnnncttgttcacaaaaaaattccctgtaaatctgaaatatatatatgtacatacatatatatttttggaaaatggagctatggtgtaaaagcaacaggtggatcaacccagttgttactctcttaacatctgcatttgagagatcagctaatacttctctcaacaaaaatggaagggcagatgctagaatcccccctagacggaggaaaaccattttattcagtgaattacacatcctcttgttcttaaaaaagcaagtgtctttggtgttggaggacaaaatcccctaccattttcacgttgtgctactaagagatctcaaatattagtctttgtccggacccttccatagtacaccttagcgctgagactgagccagcttgggggtcaggtaggtagaccctgttagggacagagcctagtggtaaatccaagagaaatgatcctatccaaagctgattcacaaacccacgctcacctgacagccgagggacacgagcatcactctgctggacggaccattaggggccttgccaaggtctaccttagagcaaacccagtacctcagacaggaaagtcggggctttgaccactaccatatctggtagcccattttctaggcattgtgaataggtaggtagctagtcacacttttcagaccaattcaaactgtctatgcacaaaattcccgtgggcctagatggagataannnnnnnnncttctcagctttatgaagagaagggaaactgtctaggattcagctgaaccaccaggaacctggcaacatcacgatttaagctaagggttgggaggctaacgagtctacctccctctttgtaaatcaaaggattgtttaaaatgggattgtcaatcctttaaataagatgaacttggtttcaagccaaatgtgaatttatttgggttggtagcagagcagcagcaccttcaaattctcagc

SEQ ID NO: 187007 - DNA, 2205 bp, Homo Sapiens
  misc_feature (1628)..(1673): n is a, c, g, or t
actttgtacaaaaaagttgggttttgtgagccttctccatttattcagaatcataatgcagaaagagcaccaaaaggttaattcaagcctgattttgttaaatcatagcattatttgttaaggttatactggattattttcatgagctctgcctctttttaaagcagaaattaagaagaaatgtgaacttgttagagaagcttgttatgcaagagactttgtcatgtttagtggtcaatctatacccaggaaatgagggatattctctgatgctcaggggaaaaaacggatcagattccgagaccattcgactgccctatgaagaaggagagttgcttgaatatttggatgcagaagaattacctcctattttggttgatctcctagaaaaatctcaggttaatatttttcattgcggatgtgtcatagcagaaatacgtgactacaggcagtccagtaacatgaaatctcctggttaccaaagtcggcacattctcttacgtccaacaatgcagactttaatttgtgatgtacattcaataacaagtgataaccacaaatggacccaggaagacaaacttttgcttgagagccagctcatcctagctacagctgaaccactctgtcttgatccttctatagcagtcacctgcactgcaaacagactgctctataacaagcaaaagatgaacactcgcccaatgaaacggtgtttcaagaggtattccagatcctctctgaatcggcagcaagatctatctcattgtccacctcctcctcagctgaggttacttgatttcttacaaaaaagaaaggaaagaaaagcaggtcagcattatgacctcaaaatttctaaggcaggaaattgtgtagatatgtggaaacggagtccctgtaatttggccataccttctgaagtagatgtggagaaatatgctaaagtggaaaagtctatcaaatctgatgactcacagccaacagtctggccagcccatgatgtaaaagatgattatgtatttgaatgtgaagctggtactcagtatcagaaaacaaagctgaccatcttgcagtcgcttggagatccactttactatggtaaaatacagccatgtaaagcagatgaagaaagtgacagccagatgtctccatcacactcgtccacagatgatcattcaaattggttcattattggatcaaagaccgatgctgagagggtagtcaatcagtaccaagaattagtccagaatgaagccaaatgtccggtcaagatgtcacacagctccagtggctcagccagtctgagtcaggtttctccagggaaagaaacagatcaaactgaaaccgtgtcagttcagtcttcggtattggggaagggtgtaaaacatcgacccccaccaatcaaacttccctcaagctcaggaaatagttcctcaggtaactattttacaccacaacagacaagcagctttctcaaatctccaactcctcctccttcttctaagccatcaagtattcctcggaaatcatctgtggatctcaatcaagttagcatgctttctccagctgccctatcacctgccagctcatcacaaagacatgaaagctaaaaaagaaaacacctcaagagnnnnnnnnnnnnnnnnnnnnnnnnnnnnnnnnnnnnnnnnnnnnnnaaaaaattgataaactgtgcatacttcattcacaacagattttctatacattctacatttaaacagaagtacacagttactgttaaagatgcagtattatctctcagatatttgctttattactgatttttgtaaatttgtttgtcaggataaacttgatgtgttaggaattaaacatgtatatttaggtgccaaatatgattgttaaccatatgtaacttattaaatatgtttacagtttatctcagacttttacactaaataagcaatatttttaaatgaagtcttgaattagtgaaatcgtaaataacaaattaatttgaattcgttttgaactttttaggccaaaggcagcatgtatgaaactaacttttaaatgggtattgtggtagaatataactgtatatttttactgttactgcaatagcatctttaatgggatttttaggtgatatactgcatccttaattgtaattgagtgtagcaacactcatgtatcatgtgtagaaattaacacttgcagttaactgct

SEQ ID NO: 187008 - DNA, 3040 bp, Homo Sapiens
ttggcattatttgatctctctcaacttttggcttatagaaatggacattttttccctgaacaagtgctaaataaaattgaagatcacagtatcagagaattggtaactcagatgattcaccgtgagccagataaacgtttagaggcagaagattacttaaaacagcagcgtggcaatgcctttcctgaaatattttacacttttcttcagccctacatggcccagtttgccaaggaaacgtttctttctgcagatgagcgtattctggttatacggaaggatttgggcaacattattcacaatctctgtggacatgatctgccagaaaaagccgaaggagagcctaaggaaaatgggctggttatcttggtatctgttataacatcctgcctacagacccttaaatactgtgattccaaactagctgctttggaactgattcttcatttggctccaagattaagtgttgaaatccttttggatcgtattactccatatcttttgcatttcagcaatgactctgttcctagggtgagggctgaagccttgaggacgttgaccaaagttcttgctctcgtcaaagaggttcctcgtaatgatatcaatatttatccggaatacattctgccaggcatagcccacttagcccaagatgatgctactatcgttagactagcctatgctgaaaacatagctctgctggcagaaacagctctgagattcctggaattagtacagttaaaaaatctcaatatggaaaatgaccccaataatgaagaaatagatgaggttacacatccaaatggaaattatgacacagagctccaagccttacatgaaatggtccagcagaaagttgttactttgctaagtgaccctgaaaatattgtaaaacaaaccttgatggaaaatggaataacacggctgtgtgtaggctttggacgtcagaaagccaacgatgttttgttgtcccacatgattactttcctaaatgataagaatgattggcatctacgtggagcatttttttgatagtatagttggtgttgctgcctatgttggctggcaaagctcctcaattctcaagcctctgctgcaacaaggtcttagtgatgctgaggaatttgtcattgtgaaagctctttatgcccttacttgtatgtgccagttaggactgctacaaaaaccccatgtttacgaatttgccagtgatattgcccccttcctgtgtcatcccaatttatggatacgttatggtgccgtgggatttatcacagtggtagctcgtcaaataagtacagctgatgtctactgtaaactgatgccttatcttgacccatatattacccaaccaataatacagattgaaagaaaacttgttctgctcagtgttttaaaggaaccagtaagtcgttctatatttgattatgctttgaggtctaaagatattactagcttgttcagacatcttcacatgcgtcagaagaaacgaaatggttctcttcccgactgccctccgccagaggatcctgccatagcacagcttctgaagaagttgctctcacagggaatgacagaggaagaggaagacaaacttctggcactgaaagacttcatgatgaaatctaataaagcaaaggccaatatagtggaccagagccatcttcatgatagtagtcagaaaggtgtaattgacttggcagctttaggcataactgggggacaagttgatcttgttaaaaccaaacaagaaccagatgacaaacgggccagaaaacatgtaaaacaagactcaaatgtaaatgaagaatggaaaagcatgtttgggtcactggacccaccaaacatgccacaggccctacctaaagggagtgatcaggaggtgattcagactgggaaacctcctcgttccgagtcctctgctggcatttgtgtccctttgtcaacttcttcacaggttccagaagtgacaactgtccaaaataaaaaaccagtaataccggttttaagtagtacaatcttaccatccacctatcagattcgaattacaacttgtaaaactgaacttcagcaactcatccagcaaaagcgggagcagtgcaatgctgagagaatagctaagcagatgatggaaaatgctgaatgggagagtaaaccaccaccacctggatggcgtcctaaagggctgttagttgcccatcttcatgagcataaatctgctgtgaatcgaattagagtctctgatgaacactcactttttgcaacatgttcaaatgatggcacagtgaaaatctggaacagtcaaaagatggaggggaagaccaccactaccagatctattcttacatacagccgaattggaggacgagtcaagacgctcacattctgccaaggctcccactatttagccatagcatctgataatggtgctgtccagcttcttggaattgaggcttctaagctgcccaagtctcctaaaatccatcctctacaaagcagaattctagatcagaaggaggacggttgtgttgtggatatgcatcacttcaactctggagcacagtctgttcttgcctatgccactgtgaatggctctctggttggctgggaccttaggtcttcaagcaatgcgtggactttaaagcatgatttaaagtcgggcctcatcacttcctttgctgtggacatccaccaatgctggctctgcattggtacaagcagtggtaccatggcttgttgggacatgaggttccagttgccaatttcaagtcactgtcatccttccagggctcgaatcagacgcctctcaatgcaccctctgtatcagtcctgggtgattgcagctgttcagggcaacaacgaagtgtccatgtgggacatggagactggtgacagaagatttactctctgggccagcagtgcaccaccactttctgaattacagccttctcctcatagcgtccatggtatctactgtagtcctgcagatggaaatcctatcctactaacacctggctcacatatgaaaataaggttttgg

SEQ ID NO: 187009 - DNA, 1616 bp, Homo Sapiens
ttgtacaaaaaagttgggagccctcctgctcctgcttctgtcttttctggcgccctgggccaccatagccctccggccggccttaagggccctcggcagcctacacttgccaaccaaccccacatccctcccggctgtagccaagaactattcggttctctacttccaacagaaggttgatcattttggatttaatactgtgaaaacttttaatcagcggtacctagtagctgataaatactggaagaaaaatggtggatcaatacttttctacactggtaatgaaggggacattatctggttttgtaataacacggggttcatgtgggatgtggctgaggaactgaaagctatgttggtgtttgctgaacatcgatactatggagagtctctcccctttggtgacaactcattcaaggattccagacacttgaatttcctgacatcagaacaagctctggctgattttgcagagttaatcaaacacttgaaaagaacaatcccaggagctgaaaatcaacctgtcattgccataggaggctcctatggtggcatgcttgccgcctggtttaggatgaaatatcctcatatggtagttggagctcttgcagcttctgcccctatctggcagtttgaggatttagtaccttgtggtgtatttatgaagatcgtaactacagattttaggaaaagcggtccacattgttcagagagcatccacaggtcctgggatgccattaatcgactctcaaatactggcagtggtttgcagtggcttactggagcccttcacttatgcagcccattaacttctcaggacatccaacatttgaaagactggatctctgaaacctgggtgaatctggcaatggtggactatccttatgcctctaactttttacagcctttgcctgcttggcctatcaaggtagtgtgccagtatttgaaaaatcccaatgtatctgattcactgctgctgcagaatattttccaagctctgaatgtatattacaattattcgggccaggtgaaatgcctgaatatttcagagacagcaactagcagtctgggaacactgggttggagctatcaggcctgcacagaagtagtcatgcccttttgtactaatggtgtcgatgacatgtttgaacctcactcatggaacttaaaggaactttctgatgactgttttcaacagtggggtgtgagaccaaggccctcctggatcactactatgtatggaggcaaaaacattagttcacacacaaacattgttttcagcaatggtgaactagacccctggtcaggaggtggagtaactaaggatatcacagacactctggttgcagtcaccatctcagagggggcccaccacttagatctccgcaccaagaatgccttggatcctatgtctgtgctgttagcccgctccttggaagttagacatatgaagaattggatcagagatttctatgacagtgcgggaaagcagcactgagaaacttttgattgttttcatttcttcttttatgttcacaccaaccacattcccattcactttgattttctacatgtaattaccttcttttgtttatcattagatttgatggggccaa

SEQ ID NO: 187010 - DNA, 1888 bp, Homo Sapiens
ttggagcttattagatttccttaaggaaggagatggaaagtatttgaagcttccacagctggttgatatggctgctcagattgctgatggtatggcatatattgaaagaatgaactatattcaccgagatcttcgggctgctaatattcttgtaggagaaaatcttgtgtgcaaaatagcagactttggtttagcaaggttaattgaagacaatgaatacacagcaagacaaggtgcaaaatttccaatcaaatggacagctcctgaagctgcactgtatggtcggtttacaataaagtctgatgtctggtcatttggaattctgcaaacagaactagtaacaaagggccgagtgccatatccaggtatggtgaaccgtgaagtactagaacaagtggagcgaggatacaggatgccgtgccctcagggctgtccagaatccctccatgaattgatgaatctgtgttggaagaaggaccctgatgaaagaccaacatttgaatatattcagtccttcttggaagactacttcactgctacagagccacagtaccagccaggagaaaatttataattcaagtagcctattttatatgcacaaatctgccaaaatataaagaacttgtgtagattttctacaggaatcaaaagaagaaaatcttctttactctgcatgtttttaatggtaaactggaatcccagatatggttgcacaaaaccacttttttttccccaagtattaaactctaatgtaccaatgatgaatttatcagcgtatttcagggtccaaacaaaatagagctaagatactgatgacagtgtgggtgacagcatggtaatgaaggacagtgaggctcctgcttatttataaatcatttcctttctttttttccccaaagtcagaattgctcaaagaaaattatttattgttacagataaaacttgagagataaaaagctataccataataaaatctaaaattaaggaatatcatgggaccaaataattccattccagttttttaaagtttcttgcatttattattctcaaaagttttttctaagttaaacagtcagtatgcaatcttaatatatgctttcttttgcatggacatgggccaggtttttcaaaaggaatataaacaggatctcaaacttgattaaatgttagaccacagaagtggaatttgaaagtataatgcagtacattaatattcatgttcatggaactgaaagaataagaactttttcacttcagtccttttctgaagagtttgacttagaataatgaaggtaactagaaagtgagttaatcttgtatgaggttgcattgattttttaaggcaatatataattgaaactactgtccaatcaaaggggaaatgttttgatctttagatagcatgcaaagtaagacccagcattttaaaagccctttttaaaaactagacttcgtactgtgagtattgcttatatgtccttatggggatgggtgccacaaatagaaaatatgaccagatcagggacttgaatgcacttttgctcatggtgaatatagatgaacagagaggaaaatgtatttaaaagaaatacgagaaaagaaaatgtgaaagttttacaagttagagggatggaaggtaatgtttaatgttgatgtcatggagtgacagaatggctttgctggcactcagagctcctcacttagctatattctgagactttgaagagttataaagtataactataaaactaatttttcttacacactaaatgggtatttgttcaaaataatgaagttatggcttcacattcattgcagtgggatatggtttttatgtaaaacatttttagaactccagttttcaaatcatgtttgaatctacattcac

SEQ ID NO: 187011 - DNA, 1316 bp, Homo Sapiens
ttggctctcatcctcgtctccccaacaccataacgtcctcatcccgcctccaacccacaccaggccgaagccctcagagagtgttttcatcaggaaccactctcgaacctgaaggttgactttagcgtttagcaacccagggcggtgtgtgtgtttcccgttttgttttctgagtggtagcagtgatcaccgtaattccatgtagccatgtgctagcagaacccctgtgtcctcaccgtggcccgtgtgaccccagccgacgagtgcccggcggagcccccgctgccttcccatggtccagtgagctgccagggcatcacatgactctcagctgtgctcttgtcgcttctgtgttgtggtgacaccatgcgctccccagggccagacctgcacgcggcaggtctgtgcccgagtcacccacgggccatactttgtagtttcagcctttcgagccactgcagccgtcagtgctgtgctcctaagccatgggacccgaggactgccccccggcgcctgcccaggcggaggccctttcagaaagggcgaagctcacgcctgactctgcgggccgcggggccgcgttcccagtggacagcgtggtgagccgtggccggacggcaggaggagaggggagccccctctggctgtgtgtcaccttggctggctggctggccagggttttgccgatttccctcctcacatccctcccaccctcggtcatatcattgagatcaccgtaccagcaaatctgcaaaccaagcactttgttaatctccagagagagcaaatacagcaatctagagtttagcctttttaaaaatgtgactttaacccgcccacctgtgtcctcccattggcgtggcatttctttggtgtctgctcagaaagaaacagcatgggaccgtgtgattgggtccaggctgggctgtcagggaagcgccctggtgtctccgactcatcaattctcgggtcttttttaaaagccaggctccccaaagcactctttgtctcgcaattttgaggaggttgttccgacctggaagcgttaaactgctgcatgtcatctggcgtcagctgtgaggctgcgctctgcgtgttgtgcgtttgcaaaatgtattggcgtgactgtaaacacatcgttgaagtaaagcgattacatattgagtatgtcagcttttctcaccctcttctgtgctgggaggagagtctaactgtaacctttggttgttccagaaagattcacgccgtttggcacagaattgctctttctgaaggtagcagtaatgaataggaacagacagaaaaccccaggaggg

SEQ ID NO: 187012 - DNA, 974 bp, Homo Sapiens
tcacacaaaagaggtggcagtgttagctcaagcagtgagggggactgggctgcttttgcctgcgttcacacagggacggcccagggcaccaccatgctttccctcacccccaattacgtgaggagctgaccaggtgagcataacctcgaaaagggggcggggtcagtaaatggggccgtttcctcatctgctggggtccagggctgggggagtttgggaacgtttctgccaacctcagctaaaacgaaacacagatgtcaccttccagccaaccctgggcctacagggccaggcacagctccaccagaagagacaaaaattcatcatccaacattcacagaaaacacgcctgaaccctgggtttgttctccgatttgtgttcctcaaaaggcggtaaaacttgcaaggttaggtgtttccaagcaccttcgttggccattgagaactggagacagtgagccagccgtccccagagggagctcgggagccgaagggccactcccgtctccaaccactgcaggcgggcacgggcagggcagctgcagacgcccgggaaaggtgtccatcaggccccctggaatacaccacagatcctatttcttaaagtgcaacgagccccaagggctgtctggcatggggccctctgcaccccactagctctcgcctggggggtgcctagtgtcaggcttcctggccgcagaggccacagcccagccatgcaagtttgaggtgctggggggcagaggtggccaggagaagagcttttcctggggcagtgggaaggctgggctagggtggtggtggatgatatgcaggcacagcgcctctgggtcagcgaagaccaggaaggatgccccttcgagggcaccagcagaccgccattccttcaaagtgccccacctcgcccacatccccatgaacactcctgctggtggcctccatggctgggatgaaacgattccaacttttttgta

SEQ ID NO: 187013 - DNA, 1489 bp, Homo Sapiens
ggcggggagagtcggggcgaggggagggcctgccaggtgaggcgcggtcaccctgggcctctcacttccgcccaggtgaggcagggccgacaccgagcccgcccgacccgggctcccacctgctcctccagcgcaccaggtgtctttaagagtgattgaagagaataattcaaaatgcctgaaaatcctgctacagataaactgcaggtgctgcaggtacttgatcgcctgaaaatgaaattgcaggagaagggtgacacgtcgcagaatgagaagttatctatgttttatgagacactaaagagtcctctcttcaaccagatactcacacttcagcagtccatcaagcaactgaagggtcaactcaaccatataccctcagattgttcagccaactttgatttttctaggaaaggtttgttagtgttcacagatggttccattactaatggaaatgtccacaggccctctaataactcgactgtatctgggttatttccgtggaccccgaagttgggaaatgaagactttaactcagtcatccaacagatggctcagggccggcaaattgaatatatagatatagaacggccttcaactggaggccttggattcagtgtggtggccctcagaagtcaaaatctcggaaaagttgatatcttcgtgaaggatgtccagccagggagtgtagcagacagggatcaaagattaaaggaaaatgatcaaatattggccattaatcacacgccattggatcagaacatttcccatcagcaagcaattgcattattacaacaaaccactggatctttgagactgattgtggccagggaaccagtccacacaaaaagcagtacttctagcagcctaaatgatacaactctgcctgaaacagtttgttggggccatgttgaagaggttgagctcattaatgatggctctggactaggttttggaatagttggaggaaaaacaagtggcgtggttgtgaggactatagttcctggaggattagcagatcgagatggaagactccagacaggggaccacatcttgaagattggtggcacaaacgtgcagggaatgaccagtgagcaagttgcacaagttctaaggaactgtgggaattcagtcaggatgctcgttgctagagatccagctggtgacatttcagtcaccccccctgcccctgcagccttacctgttgccctgcctactgtagccagcaagggccctggttctgacagttctctttttgaaacttataatgttgagcttgtgagaaaagatgggcagagtcttggaattagaattgttggctatgttggaacatctcatacaggggaagcttcagggatttatgtgaaaagtgtaatacctggcagtgctgcgtaccacaatggccacattcaagtgaatgacaaaatagttgctgtcgatggcgtgaacattcagggttttgccaaccatgatgttgttgaagtattac

SEQ ID NO: 187014 - DNA, 1025 bp, Homo Sapiens
gagcaatgctttttcatatatagagaactttgtacaaaaaagttggccactctcggccgacacccctcatggccaaccgttacaccatggatctgactgccatctacgagagcctcctgtcgctgagccctgacgtgcccgtgccatccgaccatggagggactgagtccagcccaggctggggctcctcgggaccctggagcctgagcccctccgactccagcccgtctggggtcacctcccgcctgcctggccgctccaccagcctagtggagggccgcagctgtggctgggtgcccccaccccctggcttcgcaccgctggctccccgcctgggccctgagctgtcaccctcacccacttcgcccactgcaacctccaccaccccctcgcgctacaagactgagctatgtcggaccttctcagagagtgggcgctgccgctacggggccaagtgccagtttgcccatggcctgggcgagctgcgccaggccaatcgccaccccaaatacaagacggaactctgtcacaagttctacctccagggccgctgcccctacggctctcgctgccacttcatccacaaccctagcgaagacctggcggccccgggccaccctcctgtgcttcgccagagcatcagcttctccggcctgccctctggccgccggacctcaccaccaccaccaggcctggccggcccttccctgtcctccagctccttctcgccctccagctccccaccaccacctggggaccttccactgtcaccctctgccttctctgctgcccctggcacccccctggctcgaagagaccccaccccagtctgttgcccctcctgccgaaagggccactcctatcagcgtctgggggcccttgggtggcctggttcggaccccctctgtacagtccctgggatccgaccctgatgaatatgccagcagcggcagcagcctggggggctctgactctcccgtcttcgaggcgggagttttgcaccaccccagcccgtggcacccccc

SEQ ID NO: 187015 - DNA, 1420 bp, Homo Sapiens
ttggctcacttcgtagcacgagccactctgaccatcaagatcagaaaaacttctcagctgcaagttagaagtggactggccattgaggaggctctcagcggagtcgctcttcacaggagtcttgaacgcggtgtggaatcggcagcgaggaatcctggagcacagagaagctcccagctttgaaggtcttgcggtggtgaaaaattagacgatttcaagaattggagctgaatctgatgttaagtaatggcaacaggtgacttaaaaagaagcttacggaacctagaacaggtgctccgcttgctaaattatcctgaagaggtggactgtgtaggtttgataaagggagacccagcagcatctttgcccatcatcagctattcttttacctcatactcaccttatgtaacagaacttataatggaatccaatgtagagctcatagcaaaaaatgacttgcgctttatagatgctgtctataagcttcttcgtgatcaatttaattataaaccaattttgacaaaaaagcagtttatccaatgtgggtttgcagaatggaaaatccaaattgtttgtgatattttgaattgtgtgatgaaaaagcacaaggaattaagcagtcttcagaagattccatcacaacaaagaaagaaaatcagttctggtaagtcagaacctcctttgggcaatgagaaaatatctgcagaggctgttggcgttgatatcagtggcaggtttatgacctcaggaaagaagaaagctgtggtgattcgtcacttgtataatgaagataatgttgacatttctgaggatacattaagtccaataacagatgttaatgaagcagttgatgtgtctgacttaaatgctactgaaataaagatgcctgaagtaaaggttcctgaaatcaaggctgagcaacaggatgtaaatgttaatcctgagattactgcactacaaactatgcttgctgaatgccaagaaaatcttaagaaactgacttcgatagagaaaaggttagactgtttggaacaaaaaatgaaaggaaaagtgatggtagatgaaaacacctggactaatcttcttagtcgtgtcactcttcttgaaacagaaatgcttttgtctaaaaagaatgatgaatttatagagtttaatgaagttagtgaagactacgcttcttgtagtgacatggaccttctgaatcctcacagaaaaagcgaagtagagaggccagcaagtattcctctgtcctctggctatagtacagcatcatcagattcaactcccagagcctctaccgttaattactgtggtttgaatgagatttcagaggtaagaaaatgcttagattatttccttttctaaatgaggaaaacaagcaagcattagcttttgttgtaaatattgctagcaagaaaaa

SEQ ID NO: 187016 - DNA, 1008 bp, Homo Sapiens
tcaaagtccaagatctgctgcatctggggccggatggcctcctcgtccccgccgcccagcagcttccccagctggaccatgtagttcagatatccggtcagcatttctcgttttcagttttgttcaggtaatagtctctcgagggcaagcccaggccagactggtccacctggatcacgttgctgttggagttcttggaatcggcactgacatagacagagaagaagggtgaggtgcggtagtgggcggtgaccacctgcagggtgtcctggaagttgtccttggcccagggacctgtgatgttccagcccccgagcctctcaatcaactccattagaggtttggccctgagctcctcgatcctggtctcgttcatgcacgcacggtagtatacttgcgcctttctctctgcctcgctcacgctggccgtggagttttcgaggaggtgcttgatgattgcttggttgtgttcccagaggttgctgaaggtcccccagcgtgagtggccatcagggactgggttggccttgatccagcccccacaggcgtagctgaagaagtcatggcaggggtccactgtggggtccatggagctcaagatggagctggtcactgagacacaagcttcgctcaggcacacagagggggatcttgtctggtactggatgcccagtgctgccaagcaggccaccagtcctgccgccagaagtaccaccaacaccaccagccgcttctccacctgggtccgtgcagcccagcacctctggccactccgggggctgtggaagttcacctgcaggccgttggggtatgcgtcgccctcggagagcgagtccaccaggtcctcctcgtccagcgtggcccgcttgtacgtcgacatcatagctcgcgtgctccgccccggcttcgcgcagctccccgcgcccggctcccgattcccagctccgggttccctgctcccagcccagctgctcggacggctcggctgcctggcccaggcggcgccaa

SEQ ID NO: 187017 - DNA, 1665 bp, Homo Sapiens
ttaaaagcccaaccaaacaagaaagtattctttttataatgtgttcttaaaagaagaaagaaaaattaaatgtgaacattttgtacaacagttgctgaagaacagcaacaccaattctgaaatatcatgtggactatacaaaaaggcacggcttatggaaccaagtatataacgctacagcatttgaacatcagtctctaaaagttggtgatattacatcctgtacacagctctgtgtctctctacccggctagcgcatgcccaggatctgtccgctttttagttgataatttttctcaatatctgacagggcttgagcccgcagctgggcagcatgaagcatgaagcaaggaccttcaggtccttgcacttggacttagatgtgagctgactctcagaattctcactcctcatgacattctctttactttctccactgaaatgaactttcttcttaattactgaggatggaagattaagaagttctggactacttgccagagacgggaacttctgttcctttagcaagctgtaattcttcaacagatttcctggtatagccagtctgtcctctgctagtctctcacaaacacaaagctcctgttctttctgctccaacctttcttctcctgctttgagagctcgctcttgctcctctaactgaatttcctttagtttcagctcactcaatacagggctggaatccggcaatttttctggctctcctaattgtcgccctcttctctcaagatttcttctttgctcttctgcaaccaaatctgctattaaagggttctcgagaatttcttcaacagaaggtcgatggtaatcctttaacatcctcataataatttcattcaattcatcagagtaacggtatggaattcgcctgaatttgctttctctgattttcccagcgagttctttctggctaaaagctgtaaatggaggcattacagcaagcagcccaatgaccagatatctgatttctcattgtaggacatgcgattcatttgttcaggagacatgtaataaggtgtgccaacaaatgtttttgcaaaactcgtgtcatggtttaatattctagctagcccaaagtctccaagcttgacgttttgcttgccatccaggaaaacattggctggtttcagatcccgatgcaatacggtatgaccaccatcacttcgtctgtggcattccttcagggccagagtcaactgagtcatcactcgaagaacaaactcttcatctaagtattgcctttccttggttccctttgtaattacactagccagatcccctccttcacaatattccattacaatgtacagtgttgtattggtccggtcaataatccgatcatagtaacgaacgatgtttggatgtttcagttcacgaagcaaattcacttcagaaacaagcatctgtttctcagcttctgtcatggagccatagtcaagttctttccaaactaatatcttgccatcactcttcctccggatcttctggcagcggccgtaggagcctgtgccaatggtgtacaacacttcatagtcctcagcccgggaaggcatggccggccagtcgccagagtcgcgctgcctcacgcaggttgcgccgccaagtgcggagctccagggaccagccaacttttttgtacaaagt

SEQ ID NO: 187018 - DNA, 2891 bp, Homo Sapiens
ttggattgccatgtttcagtggcaacatgaagatctacttatcaatagaccacaagccatgtcagtcacacctcccccacggtctgctatcctaaccagcatgaaaaagaagctgcataccctgagccagattgaaacttctattgcgacagttcaggagaagctagctgcacttgaatcaagtattgaacagcgactcaagtgggcaggtggtgccaaccctgcattggcccctgtactacaagattttgaagcaacgatagctgaaagaagaaatcttgtccttaaagagagccaaagagcaagtcaggtcacatttctctgcagcaatatcattcattttgaaagtttacgaacaagaactgcagaagccttaaacctggatgcggcgttatttgaactaatcaagcgatgtcagcagatgtgttcgtttgcatcacagtttaacagttcagtgtctgagttagagcttcgtttattacagagagtggacactggtcttgaacatcctattggcagctctgaatggcttttgtcagcacacaaacagttgacccaggatatgtctactcagagggcaattcagacagagaaagagcagcagatagaaacggtctgtgaaacaattcagaatctggttgataatataaagactgtgctcactggtcataaccgacagcttggagatgtcaaacatctcttgaaagctatggctaaggatgaagaagctgctctggcagatggtgaagatgttccctatgagaacagtgttaggcagtttttgggtgaatataaatcatggcaagacaacattcaaacagttctatttacattagtccaggctatgggtcaggttcgaagtcaagaacacgttgaaatgctccaggaaatcactcccaccttgaaagaactgaaaacacaaagtcagagtatctataataatttagtgagttttgcatcacccttagtcaccgatgcaacaaatgaatgttcgagtccaacgtcatctgctacttatcagccatccttcgctgcagcagtccggagtaacactggccagaagactcagcctgatgtcatgtcacagaatgctagaaagctgatccagaaaaatcttgctacatcagctgatactccaccaagcaccgttccaggaactggcaagagtgttgcttgtagtcctaaaaaggcagtcagagaccctaaaactgggaaagcggtgcaagagagaaactcctatgcagtgagtgtgtggaagagagtgaaagccaagttagagggccgagatgttgatccgaataggaggatgtcagttgctgaacaggttgactatgtcattaaggaagcaactaatctagataacttggctcagctgtatgaaggttggacagcctgggtgtgaatggcaagacagtagatgagtctggttaagcgaggtcagacatccaccagaatcaactcagcctcaggcatccaaagccacaccacagtcggtggtgatgcaactgggggcttactctgaggaaacctaggaaatctcggtgcactaggaagtgaatcccgcaggacagctgcactcagggatacgcccaacaccatggcctgcaaccccagggtcaagggtgaaggaaagcaagctcaccgcctgaacacggagattgtctttctgccacagaacagcagcagacgtgtcgggaggttagctgcggaaagaaatcgggatgccgcggagcacagagtgatttggaactccattccacctgaccctgtgtgtacaatccaggaaaaaaacaaaccccactcagaaacagagaaaactggggtcgcgaagaaatcacagccaaggaagatttgatgcattcagattctcgtgtaacacttgttgcttggcaacagtactggttgggttgaccagtaagtagaaaaaggctaaaggctatgcgatatgaatttcagaaatggactgaaaatggagagctatgtaacagatacactacagtagaagaacttacttctgaaatgaagggaaaaaaaccaccccatcgttccctactcctccccaccacttacccgttccccctttacctaatctagtagattagccatctttcaaattcacttttatttcagtccttatatttcatatacttccgtctcgatgctgttaacaacttctgataacatggaaaattcaaggattgtttaaaggtctgatgatcacacacaaaatgtaattccggttatttaagtcatttctgtgattctatcatgtacagtttccagaattgtcactgtgcattcaaaagtaatgaatctaacagacatttgatttaatgtacactcccttttgcttatagtgtgcattttttttggaggtcattcaaattttccctcttctgtgatagctgtagtttctttcatagaaagtagctaatccagtgtaatcttttacctttttaaaaaccaagatagagtatctattagagttttacattgttgatgatagattaacaataaagtgatgttctggtggaggtagactgaaatttttttaattcatgtttttcatttgatacttttaatttacacttagtaaattaaaagttgtttaatttacttggcattttaggacatgtacatgaaacagtgaaaatgagatccaccaacatcttttattaagttcagttattagtctgtgaagtgctttactttttgcacaattttaatagcttgctattcagtaatacattatagtgaattcatgatcaaggtttccttaaatttagcattgcatttcagtactgactgtgtaagctaaattgctgatccaaaataaaaacccagactagaatagggttcttaaaatcaagtatcaatacaaatagaacaca

SEQ ID NO: 187019 - DNA, 1463 bp, Homo Sapiens
ttggatacaagtgcccagaggagctgtgcagcaaggccttcaagacctcaggagacctgcagaagcatgtccgtacccacactggtgaacgcccgttccagtgcccttttgagggctgtggccgctccttcaccacatctaacatccgcaaggtacatgtgcgcacccacacaggcgagaggccctacacctgcccggagccccactgtggccgcggcttcaccagcgccaccaactataagaatcacgtgcgcatccacacaggggagaagccatacgtttgcacggtgccaggctgcgggaaacgcttcaccgagtactcgagcttgtataagcaccacgtggtgcacacacactgcaagccctacacctgcagcacctgcggcaagacctaccggcagacctccaccttggccatgcacaagcgcagtgcccacggcgagctggaggccacggaggagagcgagcaggccctctatgagcagcagcaacttgaggccgcctctgcagccgaggagagtccgccacccaaacgaccccggatagcttacctttcggaggtgaaggaagagagagatgacatcccagctcaggtggcgatggtgactgaagaagatggggccccccaggtggctctgatcactcaggatggtgcccagcaggtcagcctgtccccggaagacctgcaggccctggggagtgccatcagtatggtcacccagcacggcagcaccaccctcaccatccccagtcctgatgccgacctggccacatctggcacacatacagtcaccatggtcagcgccgatggcacccagacgcagcccgtcacaatcattacctctggggctgtggtggctgaggactcaagtgtagcatctcttcgtcatcaacaggtggcactgttggccacagccaacggaacgcacattgcagtgcagctggaggaacagcagaccttagaggaggccatcaatgtggccactgcggccatgcagcaaggggctgtgaccctggagacaacagtgtcggagagtggctgctgagtccaagagggctgggtcccacaccatgctggaggaagtgccatctgcatggccactcttgcccccaagggcccaggctgtggctgacacatagaaggtggccacataggtctctggggtgagaagacagcaagaaaactgcctaactgaagggaatgggggccctgctcaagaagggggccaggcagctggaatcaggggagtgcatcatcctcgggagctgacaacagccaggctacaccagggcacccgcctctcaaaatcagctgggcgcccactctcctcctaaagaacacccttctggccctcagtctgttccccttctcaggtagagattggggctgctatggggactggccctgtagggttgagccacagacagctcttcagcccagtagcagtggagcaggccctgtc

SEQ ID NO: 187020 - DNA, 1575 bp, Homo Sapiens
ttggtgatggtttaaatcaattaagtggcattggaaacctagggtttccttttgattaagagccttttttgtttctgctctttgtcagctttcaggggagaaggaggccactggaaaattatttccctaagtgcaggctgttgactgcgtatgccaaaaagggacaggaggcatgggatagcaggtctggtgacacagctagggtcttcctagcagctcctcctcctccctcccaaggcccccaggaatcccttcctcccatgtcctggcagcaggaccccaggctacatatggaaggtagagatgtgggggtcctgtatcctggagtattatgtctccccaccttctgcagttttctctgaacatgtatgttgcccatggtgggagcgtggtcactgtgcagttgtgcacagatgtctttcctttaccgttggcctttctgtctgcctctccttcctctctgcagcccaaatggaaaacaattatttactccattggagggaaaggaagagtcttagaattcctaagggaaccttagcataaaggttttggggaaggaggccgtaggccggcccggaggaagcaattccacttggtttgacaacttctgccactcccatgtcagatgacttgcacttcttaaagagattgctttataacactaagacatcctttctaaagattcaagtggacttgactaagctgagggtccacgaaatagaatatgacatgtgagctgtttttggaaaacgaagatggagagagcacttccccgtaacgaaagcaaagtggtaagcacagggtgagacccttttacacagaatggtggagagaaaagagaatgctgaaaagtggctcagatgcagagtgttctgtggagaaactgcagccccacttctgtttccctggagtctcccaatggatcattcaggagtgtcctatgtgagaattgagccaaggaaaatactcatgcaaccagcctgagtcgcggtgaggggacgagaggttgtacacacattggtagttattttgcaccagcagtgcctttctcactgggggtacttggaccctcagatcttcttttctaatagccatttgccaccccaagtggtatgtcggccatttctccttaaaacaccttccctacctttcccatgtactcagtttagctctcaaagaaggggtgaatcataaagccagtgaaaatttcaccctctgagggagttccccaatctgaaggggaagagggtgacctcagcggcttttctcccaaaaatcggctgaaggctggttgtggatccttgttcctctcctgaccccatctggctgctgccccgtctcccacccctgtccccggggctcgctggccctgcactccgccttagtcctggggccggcgacacagtgggggctcctcacttgctgcagtgtcatagcaataaatgtgattcttggggtccccccagggagctgcccatggctttatttatgaacctggttttcgggagtcaggggaggagatgactttgcttctgtgcacagccccgtcttccaggagccacgactcagaagaaa

SEQ ID NO: 187021 - DNA, 1217 bp, Homo Sapiens
gatttgataacttggtgatttatgtttctccctatgcattcctgtttgaaagcgctatgtcctccaaccatgtactgatagagctgctcaggcacattgagatcagacatacctatcaaattgctgccgtgccccaagcagaccatgcccagggccaagccagcagctaaggagtatgactttctgtcagtgcagtattccatttcaggaccaggaggccgtcctatctcagccaacaggacttctgcagtatgtctgtgagctgtcccttgatatacaaggccaatgccaaccactgcagccacttggacattgtgaggaacatccagctctgtggacgttgggggtaagagagcaggaatgcgaatgctaagaagccgagtaatagacatatccatggtgcctagttttgcagcagaaacaccaagtagcagtccaatgcttgtcatttcatggcccttggtcaagtagtcatggatattgagagtcgccagcttggtaaggtgcccattcaaacccagagccatgagaaagccagcatactcattggccaactcagcatgcttgggcttattgtaaacaatccaagctgagtcgatctgggaggcaggagctatcttcaggccagcagccacaccattatgaaagctggcccagcttgtcatgttgggaggcacatcgatgtttccactattaaggtctactgttgtgttccgaggaggggcacgccctatccagccaaacgaagaacattgagagaataaaaatccacaaaaccaagattgttaaatttagatctttgagactaagattacttacgttttctacattcaaaaccattaaccccataatgcctggaacgttaggtctctatgaccacttaaaacttttgtacatgtgagtcaaacttaatggaactggaaaaaccttcactgtctaaacagttcattgtcctttttgttaaaatgtatgaggctatataatgagataactgataccaatttaacattatacagagatgactgggataatcactcattttttctttcaaacagagagcttaaaaaccaaaatgaagactaacatcactgttaaactatacaagttataaatcccaacatctgatgacactgatgttaatttcaaatgttctatcctatattttcccctagacattaaggaaaaatgacatcttaagaaaagacaaaagccaggcc

SEQ ID NO: 187022 - DNA, 997 bp, Homo Sapiens
ttggatgaacaccatttttagtgttcaggaccctaaaaatgtgaagcgttagatgggctagaggacgtaggaggtgggtaaagactcattccctctgagagttttgattattgtcttttgaggtctttgtgtttagagttgtgtagaggaagaggaaattcaggagctataaagggtgtggggtggctggggagggagagtctgatgttagagctgcccttcctgggcctggggtctgttcctccccagggcatggtgatggtgagcccggagatgaatcctaccatctgctcggtgtttgaggcagagatagtcttactgttccatgccaccaccttccgacgaggattccaggtgacagtacacgtgggcaacgtacgtcagacggcagtggtggaaaagatccatgccaaggacaaactgcggacaggcgagaaggcagtggtacgtttccgcttcctgaaacacccagagtacctgaaggtgggcgccaaactgctgttccgggagggtgtcaccaagggcatcggccatgtcactgatgtacaagccattacagcaggagaagcccaggccaacatgggcttctgaacccttcaggcagggacagttctattgctgtccctacaatatataaggtgacttctggccatgctgccctgccattggcggctctgtgtgttaataggctagggagagaggggtgctgtctgccacttgctccctgccaactttctggagaggtgccaaacttggtgtggccaggaaagggcagtcctgagggagaagacaggattcagggcagtgctccgaaactgtgtgctcaccgggttggatcatcaaatctggcaaccctgtggcctgtctgccggagctgactggatccactcatcaattcttcgtccccactactaagactgggcatgttttgctggtgtggtctctttattttttgaatggtcacaacatggggtagccctcaaaagcactccttttt

SEQ ID NO: 187023 - DNA, 1417 bp, Homo Sapiens
  misc_feature (394)..(408): n is a, c, g, or t
  misc_feature (1070)..(1092): n is a, c, g, or t
ctttgtacaaaaaagttggtattactcccttttagcaacctagcatgatgccaacaagactattcttgaaagagcaaaggttcctgtaaatttaattagggctagatttgagctgcttgtaagtcacaggttttccagatgtctgccaacaagaaatgactcatactgtgatgataccttttgctttgccttgtggacaatgtgggtttttgaaatttgcacccttcaaacaatgatttatcagagaaaggggtctgttttcaaaaaagattctgtaatgaattttatgtgtggcatatacttatttcttgagagaagattttaacttattgtttttattttatggttacatatgatgataacctgctattattaaactttttctaaaaagtgnnnnnnnnnnnnnnngatataagaactcaaggtcccatactctgtattcgggatccatctgagatgcatgctaagctatgtgtatgtttttaattttgcactgctctttcctggcaatttgttttaatggttattgcagaatattaaggtacatgtctctctgttttaagtaatattgcactttataaaaaagtatgaataaagcaaactattttataaagtgcactgtttaaagcatttgcactgtatttttgccatttattttcattttctactttaaatttgtcctcacattcctcttctactttgtatgcaacaagtagaatggggcatgttgtgtcatgtagtcagccacttatgcaccaatgtgaggaaaacctaaagggaaattaaactaaacactgtgcttcatatttgtacactgtgttgtactacagtgaggaatttcctcctgtagtcatatattatgtacataatattttagaatcatacctatgacttgtttggaaatttttctgttaaattttaaatccagaaagcatattttataaacttatgcagagcacttttattgctcaaaagttctgaattcatacagaaaacaagtactatgtgatgaaaacatttcattaaaagattgctgcatttaaaaatacaattaattcgttccctatgcnnnnnnnnnnnnnnnnnnnnnnngaagtgatagggtttgtgtgttatattttcttttaaagccatcatgtgaaatgtcaggactgaaaaaagtgatttttttgctttgtttacaggaatcatgcttaaagagataatgcccaacatgtttattttatagtttttgttaatgataaccttttgagcattagtttggaatttggacatgatatttatttattcctttcttgaggttatagcagcattaatttcaaccagttatgaatactaaaaatattgcactctatgtaatagtagtatatttattactaaatcaatgtatatattaatagcacaggcaaaaaatggc

SEQ ID NO: 187024 - DNA, 1650 bp, Homo Sapiens
tttgatgaatgttcctcagatatcctatggacgcttatgaaggcagtcgagtggcatttgcaaaaaagaaaaattgcagtcagagcacagacaccctgaatgaagcccctggcatgatgtaaacacaaaagaaagtgtctcagcaaggctgagccctccttctcgtgtctgcattgcttccttttcccaacaattgtagatcaagatcaacctcaacttgaaacccaccagaggccaccatgcactgtgacacattatttaagagctcctattccccaacctggcttcccttacaaaccccgctttgttgtcagttcctaagcaatcattctggaatccacatttcagaagacgtggatgtaagttgttttggagtcactgccgagaatgttttttgccatgcacttgtagaagccggcatctctctgtgtggcatgctggatggtcagtgatccctgggggtgaagaaatctgtttccatacagacgagcctgaacccctgccttcagatgcgacttatccggtaactcccacgtgatgtcagctttgggaatccccatagccatgcagttcagtttcacggtgttcccgggccgggtgtagatgaccggggtgggctcgctggtgatccggggaggataggcgatcacaatcacggggatgctggtgaccgaagggccgtactccgtctccatcctgcatacataggtacccctgtcaaacaccgaggcctcacgaaccgtgagggtgccattgtccagaagagaaacgcgtcccagggtttgggggccctccagatgcatgccattggggagcgtccaggagaaacgtccctgcccagccccgggaggggtgcaggggagcttcagggtctcaccattgatgatgctgaccaggttatgatactgcttgtttgcttctggcttcagtcccaccttcagggagaccagcctctccgtgtggccagcggcattgcgggccacgcagcggtaggccccagcgtccaccgaggagagaccgctaatgtgtagcatgccgtcagccttgtggtagaagcgctgcagctgctgtccactctgcagatcggtgccattgggaaggacccacaccaggctgggtgtcggggtccccgcggcagagcagttgaggctgatggtgtggcccgccatggccgtgatcttctcgctgatcgggtcgtggaagatgggtttctccatgggctccaggacagtgagctgcacgatcaacctcgcctcccctccctcgttgcgtgccatgcataccagctggacggagtcgctcttcctcaaactcctgatgtccagggaaccgttgccatggacagtgatccggtttccatagtatggagctggcagaaccacaccctcgggaaaagcccataacaccctcggggtggggatgccttcagctttgcagtcaatcagtttccgactgcccccggctgctatctcccgcacggtggtgatggggttggggttaccgttgatcttgggtggctggacgttgacgtgaatccacaccgtcttcctatcctctcccgcgctgttcctgaccaagcaggtgtagttgccgctgtcagaacgctgggctttctgaataaggagagtgccccaacttttttgtacaaag

SEQ ID NO: 187025 - DNA, 972 bp, Homo Sapiens
ccatgcataccagctggacggagtcgctcttcctcaaactctgatgtccagggaaccgttgccatggacagtgatccggtttccatagtatggagctgggcagaaccacaccctcgggaaaagcccataacaccctcggggtggggatgcttcagctttgcagtcaatcagtttccgactgcccccggctgctatctcccgcacggtggtgatggggttggggttaccgttgatcttgggtggctggacgttgacgtgaatccacaccgtcttcctatcctctcccgcgctgttcctgaccaagcaggtgtagttgccgctgtcagaacgctgggctttctgaataaggagagtgccatcttggtatatctgatacttctcagaggaggtggggatcaccttgttggttggggacaaccaagtcaccttgggcatgggttctcctttggcctcacaggctacagtgaccacgtctccatagggcacctgaaccgccaagtaagtcttgttccggatggtggcgggcgctgtcaccaccttgactctgactctcatctcgtccttcccgacctgattttcagcaaagcaggtgtagtctccttcctccctcatccccacttcgttaaagtagagtgtcccattgttgaagacgacatagcgcttggtgcgtccaccgctgtcatccgactgcatgaaggagttcaccagactcccgtctgggaggctccaggagatctcgggattgggaagcccggtggccacacagtccactttcaggtcacccccgtagaagactttgtggtcgttctcctccttgtgttcaatcttggccggtttcatcaccacatccactttgagcaccacgtagtcatcaccaaccttatttcgagctacgcacaggtaatctccggcatctttgtccgtcactgatttcaccaccagggtcccattggcaaacaccttgattcccaa

SEQ ID NO: 187026 - DNA, 1164 bp, Homo Sapiens
ttggagagtcatgtcctgatgctcccgtcgccgctgctgccgctgccgccgcccgtggtgccccggctcctccgccgcgcttcgaggtggcagccgcgggcggggccgcgggagcagggtccagggtgcagcgcgccttcgccgccccggcgcgtcccggtgcagccgccgcccgccgcgggtgatgccgccacctccggcctcagcataagccgtggcttggcggccgagctgcaccccaaggaagtgcacggctgtctataacgtgctgccgggtctcaggatggaggagtgaagtctcctgtcgccgtggttccagcctccggagctcgcccaagccgcgtccccagagagcgccctgagagaacagggtggccgcttggtccaggaatgtttacccttgcggaagttgcatcacttaatgacattcagccaacttaccgaatcctgaaaccatggtgggatgtgtttatggattacctagctgttgttatgttaatggtagccatctttgcaggaaccatgcaacttaccaaagatcaggtggtctgtttgccagtattgccatctcctgtaaattcaaaggcacatacaccaccaggaaatgccgaggtcaccaccaacatcccaaagatggaagcagccaccaaccaagaccaagatgggcggacaacaaacgacatttcctttgggacatctgctgtgacacctgacatacctctcagagccacatatcctcgcacagatttcgcacttccaaatcaggaggcaaagaaagagaagaaagatccaacaggtcgaaaaacaaacttggattttcagcaatatgtatttattaatcaaatgtgttaccatctggcccttccgtggtattctaagtactttccatacctagctcttatacatactattattctcatggtcagtagcaacttttggttcaaatatcccaaaacatgctcaaaagtagaacattttgtttcaatattatgaaagtgctttgaatccccttggacgacaaaagcgttgtctgagacagcatgcgaagactcagaggaaaacaagcagagaataacagtgcccagactctaccaaagcatgtttctaccagcagtgatgaaggagccccagtgccagtacaccaatgatcaataaaactggctt

SEQ ID NO: 187027 - DNA, 1244 bp, Homo Sapiens
ccaactttgtacaaaaaagttggggatgatctgcaacagatgatccaggccgtggtagataatgtgtgctggcagatgtccctggatcgaaagaccactgcactcaaacagctgcagggccacatgtggagggcggcattcacagctgggcgcatgaaagcagagttctttgcagatgtagttccagcagtcaggaagtggagagaggccggaatgaaggtgtacatctattcctcagggagtgtggaggcacagaaactgttattcgggcattctacggagggagatattcttgagcttgttgatggtcactttgataccaagattggacacaaagtagagagtgaaagttaccgaaagattgcagacagcattgggtgctcaaccaacaacattttgtttctgacagatgttactcgagaggccagtgctgctgaggaagcagatgtgcacgtagctgtggtggtgagaccaggcaacgcaggattaacagatgatgagaagacttactacagcctcatcacatccttcagtgaactatacctgccttcctcaacctagagaagggttgttaaggcagaccgccctgttccccagagttgtccctgtagtgtctaggtttattctaatggtaaaagtaacttacttaaaaaacatatgtacacatatgtatgcaagtatgtatatatgtgtatgctcagattaacttccataggtacataagtgaaagaagtctcagttcagtgaacacaaaacttatttaaagatgctttatatgtagaaattgtttcaaatcatactctaacccttagtgagggcaaagtgtagttggtagaagaaattgctaaatacctatctaatgtgctatgtttatcaaatcgtgtactaaaatggaaagctagttttgagaaattattcagaagccttgttattttaaaaatgaaatatttcaaagactgaatattttcaaagaaaatgaataattcattgcccttgtgatttagaagattataacagctgtatttcatatttgcctccttatatatatcaaagaccaaggtatttccttctgcttcaaaagaacaaaattgggaaagaaactcacttgagtcttgatcaaacaagtgtcttttactttagaagaaacttggtaatcattgtggcaccacagcaagcagttgccttaccagtgaaaaaggtgcactgaggtaacatctaaaacagagatgtggttcttaatgttt

SEQ ID NO: 187028 - DNA, 1641 bp, Homo Sapiens
ttgggttctggttggaggctgggttgagaggtcgccggtccgactgtcctcggcggttggtcagtgtgaatttgtgacagctgcagttgctccccgcccccgagcagccgaggagtctaccatggctcaagaatctcccaaaaattcagcagcagaaattccagtgactagtaatggagaagttgatgactctcgtgaacatagctttaatagggatttgaagcattcattaccatctggacttggtctctcagaaacccaaattacatctcatggctttgacaataccaaagagggtgttattgaagcaggagcatttcaaggttccccagcaccgccactgccatctgttatgtctcctagcagggttgcagctagtcgactggctcagcaaggaagtgatttaattgttcctgcaggtggccagagaacacagacaaaaagtggaccagttattctagcagatgaaattaaaaatcctgcaatggaaaagttagaacttgttagaaaatggagtctaaacacctataagtgtactcgacagattatctctgagaagctaggccgtggctcaagaactgtggaccttgaacttgaagctcagattgatatattaagggataacaagaaaaaatatgaaaatattttaaaactggctcaaacattgtcgacccagcttttccagatggtacatacccaaaggcaacttggagatgcatttgctgacctgagtttgaagtcactagaacttcatgaagaatttggctataatgccgatacccagaaactgctggctaaaaatggagagactcttcttggggccattaattttttcattgctagtgtgaacactttggtgaataaaaccattgaagatacattaatgactgtgaaacagtatgaaagtgccaggattgaatatgatgcatatcgcactgatttggaagaactgaatcttggaccacgtgacgcaaacactctgccaaagattgagcagtcacagcatctcttccaagcacataaggaaaaatatgataaaatgcgcaatgatgtttctgtcaaattgaaatttctagaagaaaataaggttaaagtattgcacaatcagctggtccttttccacaatgccattgccgcttactttgctgggaatcagaagcagcttgaacagacacttaaacagttccatatcaaattgaaaacccctggagtggatgccccatcttggcttgaagaacagtaaaatcacagcggaaaataaaaagaaagtcgcgttgttatatttctaaaccaacctaacaagaattaagcagagttgggggaagtgggaggggtgacaagcattatagtgattcttgcacaaacagctttaatttttccctttttcatactttaacaattgaactgttaagggtggttttaatgtaaacatagtttctataatctgaacacaataattttcctttttgagaaatccttttgtattgtgagggttgatggctatttctgtagtttgaaaacatctaatagagatttgcactgacaagataaaaattcaaggtttttggtcctggaaatgagggccgattgtaacttttccaagggaggtttacatgatttgtatcaacatcagatatttta

SEQ ID NO: 187029 - DNA, 1324 bp, Homo Sapiens
catggaactctgacccaaaccggtcctttcactcagcatacttttgttttattctctcaaatccctcttgggcactcaatgttgctcgctggcaccttccgcaagctgctgggcctggactgcctctgccccgtgctgccgggcttggtggcggagctcctccatccgtgtccagaagtcacccagctgcttggtcatgcttgtcaccagcttttctgctggccgcagtacctgctgaacctcagcaaccctgtcctggataagccgaagggagcggctggtgccttgcatggtgtcctgagcttcctgcagtgccactgtcccctgccgcaggttcccaaccacatcttccacctggccctccactgcatgggctcggctcctggcttcctcagcctcagcctgcaaccggcgggcacgcgcaatgtcctgcttggtctgggacagcaccaagtccacgttggggagcctggctgcaatggcctggatctcattcatcttctgcagaacagtagctgagtctgtgggcagccacagggccagcacggcctcgctgacctcctggatagtggctgcatcagtgtcggggtctgttaggaagtcccggacctgctggattaggagccgtgtgcgtctgacatcttcctccatctgggagcggctggcgctcacctgggtctccaagcgctgggcactggattgaatctgtgaggcagattcctcggctgccctaatcatctgcctggtccgctggagctgggcattgaagccccgcagctgctcagccacctgccccgccatcaagaaggccccaccggccctgggaaggacacccctgcagcgggagccacaggctgtgccattgtcttggggacatagctcaccagggcatgatattggggtgcaagccatctgcctggagttgccacagagcttgttgaaggtgggtgtcaggtcaggcaacgaagacatctccagcctcagggccacaagcttggggctgccggtgcctcctcctcctcccgcctgccgcaccagcctctctgcctctctccggctgtccctgagctggtccaaaaggcgcgagctgtcggagacctgctgagcagcctgggctgactgctcgtaggctgtgctcagcatccggaaggctcctgaaggatcagcactgcttattttttcaaactgctccctcttcctctgatacatagtaaggagaccattgaagcttctgtcaagactctccaggtctctcggaagggacaacgtctcctcctccaggggcagatccagctgcaggccctggagagttcgcctgagccaa

SEQ ID NO: 187030 - DNA, 830 bp, Homo Sapiens
aggaggactccgaccgcgccatggccaccggctcaggcttggccccgtccgaatcggccttggagtcggagtcggaggctgatggcgccttcttttttttccgtccccccagagggcccctccgtggcgcccggaccgctgctttcttctcaggtgtgaagtcctggtcgctggtcttctccgactcagatgagctttccgagttctcctcttcggatggggacacgctggcctgatccaggtcgctggaggcctttcgggctcgtttcgagaccgacatctttagcgcaggcgtcttcctcttcaggccactgttgtcgctactcttgtctgagtctgagtcgctctccatcctgtcgctggcagctgtggcggttaccgctgtgacggccatgaccccccggtcctcatcgtcctcgtcagcgtcactgccgtcggcggggttggcctcgggggcctcgctgtcggaggagctcactggcggaggggcgctgtagctggcgtgggggttgttctggatctcccacagcccttcattgaagcctttcctcttgttgggcttcccgtacttgtctttacatttgtcgtaggggaacaggtccttgggtcccaggaaggctgtttcgtgtgtgccaaagaaaaagatggggtacttgttgggtgggggcttcacggcgccatccgcgatgtcgtcgatcctggcaggccagtgagggtagcccttcatcttagcgaacaccaagtccccgggcttgaaggcgtgtggcatgctgacggcgagaggcccaggccgcggaaagcggctgcagcggcggtagcggctgcgccaa

SEQ ID NO: 187031 - DNA, 960 bp, Homo Sapiens
tcggcctcgactcccgggggctggaggagttacctttggagcccgaaaggaggaaggaagcaaaatatcaacaacagccgaggcggctcaggcgctcggccccggttccccgcttgcctgccgcccgcctgctggcccccgcgcccacgacgggggcccaggcctcacggcgccgcccagggcccgcgcggacgccggcctcatttattattctccccgcccggagctgcggcttcccggtgttgaagatcccccggaccaggggcgagggctacccgctctttgccgtgacaacaccgttcccccagccgggctggaggctgtgcagaaggtatcctgcagaccatgaactgagcactgttcccagaccgttcatgagcacagtgtaaggtgtgccgagacccaccacccagcgagcccctcccctccgtagcactgaggacccccggagaagatggggaggaaaaagattcagatccagcgaatcaccgacgagcggaaccgacaggtgactttcaccaagcggaagtttggcctgatgaagaaggcgtatgagctgagcgtgctatgtgactgcgagatcgcactcatcatcttcaaccactccaacaagctgttccagtacgccagcaccgacatggacaaggtgctgctcaagtacacggagtacaatgagccacacgagagccgcaccaacgccgacatcatcgagaccctgaggaagaagggcttcaacggctgcgacagccccgagcctgacggggaggactcgctggaacagagccccctgctggaggacaagtaccgacgcgccagcgaggagctcgacgggctcttccggcgctatgggtcaactgtcccggcccccaactttgccatgcctgtcacggtgcccgtgtccaatcagagctcactgcagttcagcaatcccagcggctccctggtcacccctttccctgg

SEQ ID NO: 187032 - DNA, 1684 bp, Homo Sapiens
  misc_feature (200)..(211): n is a, c, g, or t
ttggcttatttttaacttggatacctgctattctgccaaaagacaatttctagagtagttttgaatgggttgatttcccccactcccacaaactctgaagccagtgtctagcttactaaaaaaagagttgtatataatatttaagatgctgagtatttcataggaaagctgaatgctgctgtaaagtgctctttaagtcnnnnnnnnnnnnaatccccttctaatgaatgaaactaggggaatttcaggggacagagatgggatttgttgtatgataaactgtatgtagtttttagtctttctgttttgagaagcagtggttggggcatttttaagatggctggctactcttgttttccctcatgataataaatttgtcataactcagtaacatgaacttgcccctagaggtagttgttaataattttgaaatattaaggtcttgccaagcttctgatgattcacacctgtactactgattattaagcaggacagactgagctttctgttgcaaataccttggaggagaaagtaatttctaaatatacagagaggtaacttgactatatatgttgcatcctgtgcctcccttcatattaatatttgataaagattttaatttatgtaaaacttctaaagcagaatcaaagctcctcttggggaaatggcaagtctttaggataggcaagaccctgtatgaatagtaccaaagcattaccgcatggtagagaacacactcgattaaaaatgttaagctatctgaaaaataaaatgtgcaagtcttcaggatggcacaaaacaaaggttaatgcttcttggggcacatttcttagagggcttgctgagtgtgtaaatataatcgacttttgtttgtgttacatgacttctgtgacttcattgaaaatctgcacaattcagtttcagctctggattacttcagttgacctttgtgaaggtttttatctgtgtagaatgggtgtttgacttgttttagcctattaaatttttattttctttcactctgtattaaaagtaaaacttactaaaagaaaagaggtttgtgttcacattaaatggttttggtttggcttcttttagtcaggctttctgaacattgagatatcctgaacttagagctcttcaatcctaagattttcatgaaaagcctctcacttgaacccaaaccagagtactcttactgcctcttttctaaatgttcaggaaaagcattgccagttcagtcttttcaaaatgagggagaaacatttgcctgccttgtaataacaagactcagtgcttattttttaaactgcattttaaaaattggatagtataataacaataaggagtaagccaccttttataggcaccctgtagttttatagttcttaatctaaacattttatatttccttcttttggaaaaaacctacatgctacaagccaccatatgcacagactatacagtgagttgagttggctctcccacagtctttgaggtgaattacaaaagtccagccattatcatcctcctgagttatttgaaatgattttttttgtacattttggctgcagtattggtggtagaatatactataatatggatcatctctacttctgtatttatttatttattactagacctcaccacagtcttcttttttccccttccacctctctttgcc

SEQ ID NO: 187033 - DNA, 1116 bp, Homo Sapiens
  misc_feature (142)..(162): n is a, c, g, or t
  misc_feature (240)..(248): n is a, c, g, or t
  misc_feature (853)..(870): n is a, c, g, or t
gccaactttgtacaaaaaagttggatcatgcttgaatattgctttgatagctgctatcatgacccctttttaaggcaattctaatctttcataactacatctcaattagtggctggaaagtacatggtaaaacaaagtaaannnnnnnnnnnnnnnnnnnnnggtcacaggagtagacagtgaattcaggtttaacttcaccttagttatggtgctcaccaaacgaagggtatcagctannnnnnnnnaaattcaaaaagaatatcccttttatagtttgtgccttctgtgagcaaaactttttagtacgcgtatatatccctctagtaatcacaacattttaggatttagggatacccgcttcctctttttcttgcaagttttaaatttccaaccttaagtgaatttgtggaccaaatttcaaaggaactttttgtgtagtcagttcttgcacaatgtgtttggtaaacaaactcaaaatggattcttaggagcattttagtgtttattaaataactgaccatttgctgtagaaagatgagaaaacttaagctttgttttactacaacttgtacaaagttgtatgacagggcatattctttgcttccaagatttgggttgggggcactaggggttcagagcctggcagaattgtcagctttagtctgacataatctaagggtatggggcaaggatcacatctaatgcttgtgttccttatactctattatatagtgttattcatgattcagctgatcttaacaaaattcgtagcagtggaaccttgaaatgcatgtggctagatttatgctaaaatgattctcagttagcattttagtaacacttcaaaggnnnnnnnnnnnnnnnnnnctagacttaataaaagcttaggattaattagaagaagcaatctagttaaatttcccatttgtattttattttcttgaatacttttttcatagttatttgtttaaaaagatttaaaaatcattgcactttggtcagaaaaataataaatatatcttataaatgtttgattcccttccttgctatttttattcagtagatttttgtttggcatcatgttgaagcaccgaaagataaatgatttttaaa

SEQ ID NO: 187034 - DNA, 1342 bp, Homo Sapiens
  misc_feature (371)..(379): n is a, c, g, or t
  misc_feature (457)..(477): n is a, c, g, or t
cccaaatcttggaagcaaagaatatgccctgtcatacaactttgtacaagttgtagtaaaacaaagcttaagttttctcatctttctacagcaaatggtcagttatttaataaacactaaaatgctcgtaagaatccattttgagtttgtttaccaaacacattgtgcaagaactgactacacaaaaagttcctttgaaatttggtccacaaattcacttaaggttggaaatttaaaacttgcaagaaaaagaggaagcaggtatccctaaatcctaaaatgttgtgattactagagggatatatacgcgtactaaaaagttttgctcacagaaggcacaaactataaaagggatattctttttgaatttnnnnnnnnntagctgatacccttcgtttggtgagcaccataactaaggtgaagttaaacctgaattcactgtctactcctgtgaccnnnnnnnnnnnnnnnnnnnnntttactttgttttaccatgtactttccagccactaattgagatgtagttatgaaagattagaattgccttaaaaaggggtcatgatagcagctatcaaagcaatattcaagcatgatttcaaggatgctttcaggtttagaattagccttccttgtcaaaaatctgcacaacttcatcaaaaacttcatcaacagatttagaagcatctattttcttgactttccccatttcttcatataagtcaataattggctttgttgactgaaggtaggtctgaattctcttttccaagctctctctgttgtcatcactcctaccactactctttcccctctcaagacatcgttcaatacaaatctcattattacagtcaaaaaagagaacgaaagatacatctgccttcccatccatggtcttgttccatccttgaaggttgtcttgatttcttggaaacccatcaatcaagaatttattcttctgagcattggcagccattgtctgatccatttccctctttaataaactgatggttatctcaactggtacaatctttccttctttaatgtacttttcaataagttcaccatactgtgaatctgggttcttcctttcatcacgaagcagctctcctgcagaaaggtgtgtgtagccatatttctcgacgatgcgggcgcactgggtccccttgccggcgccggggccgccgaggacgaacacgaccagcggcttcatgagacgtggagagcagaggagaatcggccggcgggtctgcagcaggaagctaaggcccaggacgtggagcagcccgctgcggcagcggctcagcatacaccgcgcctcggccggacgctgagggagctccaa

SEQ ID NO: 187035 - DNA, 1514 bp, Homo Sapiens
  misc_feature (1004)..(1053): n is a, c, g, or t
tttgtacaaaaaagttggctaaatgaagcatatatagaagagagagatattcctcaagctgcgaaagtaaacatgactgagctggacaaagaaataagtaccttgagaagtggcttgaaagcagtagagacagagctggaatatcagaagtctcagcccccacagcccggagataagtttgggtctgttgtcagccagttcatcacagtagccagcttcagcttctctgatgttgaagaccttctagcagaagctaaagacttgtttactaaagcagtgaagcactttggggaagaggctggcaaaatacaaccagatgagttctttggcatttttgatcaatttcttcaagctgtgtcagaagccaaacaagaaaacgaaaatatgagaaagaaaaaggaggaagaagaacgtcgagctcgcatggaagctcagctcaaagaacaacgtgaaagggaacgtaaaatgagaaaagctaaagagaatagtgaagaaagcggagagtttgatgaccttgtttcagctttacgctcaggagaagtgtttgacaaagacctttctaaattgaaacggaatcgcaaacgtattaccaaccagatgactgacagcagcagagagagaccaatcacaaaacttaatttctaattttccatgaatacttttttttagaaagctcattagcagccctctaaagtgactagaacgtttcattacactgccttgcaatccaaacagtggcaattttttccttcatctgtgagtgaatgtgtgaacgtgtgtatgtaaatgtatgtgtgtatatattaaaaaatgtatatagatgtctgagtgttgtctggagacctatacgtatggttaaaaagatttatgttaatgtatgtgctccaaaacctttcgtgtatgcattcacattgagtgtggctcattttctttccccgaacgccatgactgttcagaagcacaatactatctcctgaaagagataagagacattccctagattnnnnnnnnnnnnnnnnnnnnnnnnnnnnnnnnnnnnnnnnnnnnnnnnnntattttatggtttccaagcttgatatcctttaaaattattttcattgatggaactggagttgttggaaaaacatagatttaaaatgatttttgatagctgacattgtgatgttgatgtatcacatcagtaataggaccagctttgaatttctgacattggtgtggggatacagtctgtaaatgtttattgagaacatcttgcacacaatttgaattatgtagaatgtcaatcaagtttttgtatatttaaaagttggacatcaattttttcccctgatttcatcaagttatctctgccaagtgctcttgataatttcttcagatttttggaaaaaaacactatataaatgcaatccatgcttttttaaagaacaacattgccagagtatgcttgttctaacaatatagatatataaaccttaaaaataataaaatatctcacccaagacttaaaggaagaa

SEQ ID NO: 187036 - DNA, 909 bp, Homo Sapiens
  misc_feature (110)..(149): n is a, c, g, or t
  misc_feature (645)..(670): n is a, c, g, or t
ttgggtatgcattcacattgagtgtggctcattttctttccccgaacgccatgactgttcagaagcacaatactatctcctgaaagagataagagacattccctagattnnnnnnnnnnnnnnnnnnnnnnnnnnnnnnnnnnnnnnnngcttgcaaaatattttatggtttccaagcttgatatcctttaaaattattttcattgatggaactggagttgttggaaaaacatagatttaaaatgatttttgatagctgacattgtgatgttgatgtatcacatcagtaataggaccagctttgaatttctgacattggtgtggggatacagtctgtaaatgtttattgagaacatcttgcacacaatttgaattatgtagaatgtcaatcaagtttttgtatatttaaaagttggacatcaattttttcccctgatttcatcaagttatctctgccaagtgctcttgataatttcttcagatttttggaaaaaaacactatataaatgcaatccatgcttttttaaagaacaacattgccagagtatgcttgttctaacaatatagatatataaaccttaaaaataataaaatatctcacccaagacttaaaggaagaattctctgaagggataaagattactnnnnnnnnnnnnnnnnnnnnnnnnnnttaatggggtgcctttttgttatagtttctattttctgttttgtaggacaagctgcattttctgtaaatataggtctggactaaaggatacataaagaatgcacaaaatgtcaacatcagcagagatgcccagatctatttatctctaggtatatttgaagtgattgctgtttatatgttgtcattttaaaattgtgtgtcagtaaagctacctgtaaatttcagtccaaaaaaataaa

SEQ ID NO: 187037 - DNA, 1661 bp, Homo Sapiens
  misc_feature (1356)..(1371): n is a, c, g, or t
actttgtacaaaaaagttgggcaaagagaaaggaagcaggcccgttggaagtggttgtgacaaccccagcaatgtggagcataagagatcaagatccaatgctaaactccaatggttcagtgactgtggttgctcttcttcaagccagctgatacctgtgcatactgcaggcatctaaattagaagacctgcgagtaaaactgaagaaagaaggatattctaatatttcttatattgttgttaatcatcaaggaatctcttctcgattaaaatacacacatcttaagaataaggtttcagagcatattcctgtttatcaacaagaagaaaaccaaacagatgtctggactcttttaaatggaagcaaagatgacttcctcatatatgatagatgtggccgtcttgtatatcatcttggtttgcctttttccttcctaactttcccatatgtagaagaagccattaagattgcttactgtgaaaagaaatgtggaaactgctctctcacgactctcaaagatgaagacttttgtaaacgtgtatctttggctactgtggataaaacagttgaaactccatcgcctcattaccatcatgagcatcatcacaatcatggacatcagcaccttggcagcagtgagctttcagagaatcagcaaccaggagcaccaaatgctcctactcatcctgctcctccaggccttcatcaccaccataagcacaagggtcagcataggcagggtcacccagagaaccgagatatgccagcaagtgaagatttacaagatttacaaaagaagctctgtcgaaagagatgtataaatcaattactctgtaaattgcccacagattcagagttggctcctaggagctgatgctgccattgtcgacatctgatatttgaaaaaacagggtctgcaatcacctgacagtgtaaagaaaacctcccatctttatgtagctgacagggacttcgggcagaggagaacataactgaatcttgtcagtgacgtttgcctccagctgcctgacaaataagtcagcagcttatacccacagaagccagtgccagttgacgctgaaagaatcaggcaaaaaagtgagaatgaccttcaaactaaatatttaaaataggacatactccccaatttagtctagacacaatttcatttccagcatttttataaactaccaaattagtgaaccaaaaatagaaatcagatttgtgcaaacatggagaaatctactgaattggcttccagattttaaattttatgtcatagaaatattgactcaaaccatattttttatgatggagcaactgaaaggtgattgcagcttttggttaatatgtcnnnnnnnnnnnnnnnnccagtgttctatttgctttaatgagaatagaaacgtaaactatgacctaggggtttctgttggataattagcagtttagaatggaggaagaacaacaaagacatgctttccatttttttctttacttatctctcaaaacaatattactttgtcttttcaatcttctacttttaactaataaaataagtggattttgtattttaagatccagaaatacttaacacgtgaatattttgctaaaaaagcatatataactattttaaatatccctttatcttttgtatatctaa

SEQ ID NO: 187038 - DNA, 1338 bp, Homo Sapiens
  misc_feature (94)..(108): n is a, c, g, or t
ttggtaaattttatgtcatagaaatattgactcaaaccatattttttatgatggagcaactgaaaggtgattgcagcttttggttaatatgtcnnnnnnnnnnnnnnnccagtgttctatttgctttaatgagaatagaaacgtaaactatgacctaggggtttctgttggataattagcagtttagaatggaggaagaacaacaaagacatgctttccatttttttctttacttatctctcaaaacaatattactttgtcttttcaatcttctacttttaactaataaaataagtggattttgtattttaagatccagaaatacttaacacgtgaatattttgctaaaaaagcatatataactattttaaatatccatttatcttttgtatatctaagactcatcctgatttttactatcacacatgaataaagcctttgtatctttctttctctaatgttgtatcatactcttctaaaacttgagtggctgtcttaaaagatataaggggaaagataatattgtctgtctctatattgcttagtaagtatttccatagtcaatgatggtttaataggtaaaccaaaccctataaacctgacctcctttatggttaatactattaagcaagaatgcagtacagaattggatacagtacggatttgtccaaataaattcaataaaaaccttaaagctgacttcgtttgttatgtaggctgtatgcatatattgaaaacagaagtgaaactttcgattgcttttaaataaataccaactaatgaatttactgctaagctcaaaaccgtctacgcttaaggtgagaatctttgccaacagaaaggcgttgctctaaatcgcgaatggtattacgaagaattgcaatctccttgtttttttcttcttgaaaatgctgaagtttctaaacgaaacaaaaaatttgttattagaattcagaaataaaatttagtacaaggaacaacaaaataacaaagaaatgcacttctgctattggtattttaaaaaataccttatattgttaataagaattagatgatttttatagaaacatgcttagaaagttttcttaagcaacaaatactgagaggaaaactcacatacccttctgtagatactttgtggcaaaacagtagaatcctgatatgattttgatttagtctgaactcttgctagtttggcatcaaactgaatcaaattgaaaagaaagttattgaaactctagacaattagaaacaattgtttctataattataatccatgttatcctttgacatgtaatctgtaattcagtgtaaattacagtatagacaatagaaaaa

SEQ ID NO: 187039 - DNA, 1231 bp, Homo Sapiens
  misc_feature (1112)..(1125): n is a, c, g, or t
aactttgtacaaaaaatttggattaaaatacacacatcttaagaataaggtttcagagcatattcctgtttatcaacaagaagaaaaccaaacagatgtctggactcttttaaatggaagcaaagatgacttcctcatatatgatagatgtggccgtcttgtatatcatcttggtttgcctttttccttcctaactttcccatatgtagaagaagccattaagattgcttactgtgaaaagaaatgtggaaactgctctctcacgactctcaaagatgaagacttttgtaaacgtgtatctttggctactgtggataaaacagttgaaactccatcgcctcattaccatcatgagcatcatcacaatcatggacatcagcaccttggcagcagtgagctttcagagaatcagcaaccaggagcaccaaatactcctactcatcctgctcctccaggccttcatcaccaccataagcacaagggtcagcataggcagggtcacccagagaaccgagatatgccagcaagtgaagatttacaagatttacaaaagaagctctgtcgaaagagatgtataaatcaattactctgtaaattgcccacagattcagagttggctcctaggagctgatgctgccattgtcgacatctgatatttgaaaaaacagggtctgcaatcacctgacagtgtaaagaaaacctcccatctttatgtagctgacagggacttcgggcagaggagaacataactgaatcttgtcagtgacgtttgcctccagctgcctgacaaataagtcagcagcttatacccacagaagccagtgccagttgacgctgaaagaatcaggcaaaaaagtgagaatgaccttcaaactaaatatttaaaataggacatactccccaatttagtctagacacaatttcatttccagcatttttataaactaccaaattagtgaaccaaaaatagaaatcagatttgtgcaaacatggagaaatctactgaattggcttccagattttaaattttatgtcatagaaatattgactcaaaccatattttttatgatggagcaactgaaaggtgattgcagcttttggttaatatgtcnnnnnnnnnnnnnnccagtgttctatttgctttaatgagaatagaaacgtaaactatgacctaggggtttctgtggataattagcagtttagaatggaggaagacaacaagacatgcttt

SEQ ID NO: 187040 - DNA, 1248 bp, Homo Sapiens
ttggatataatctgaacttgggaaattttggacctactaactctaagcctattttattttttataaaactatgtgacattttggttgagcagaatgtacgttagaccagcaaaatgttcctaatggttctaacttcgtgagtttacaatgttgtgattcatgcagggttaaagatgctttgtttttattttttaagtaccaaaattggtttcagaacactgataacactcagaaaaccacagtgtgttttcatatttggaactttgtaatagcgggagtagcagtagtccaaacctagtatagggaaaggataaaaataagtcaccttcaccaagagatgccaatgattaccaaacaacagacagttgccaaatactggtttctctttcccctgaaaatggcttttgttctcaaatgataagagagctaatacatttagctaatattctagctctctttattatggaacagatcttgatagatggtttaattttctcctaaagagaaataatcagttgagaatttgagaatgggttgtaattatcgctcacccattgggatggttcattgtttaaatatggcattttccccccttcagctgcaggttcctgagatttggtgcctgtgagctctgattgtaggaatgcatgtgacagtcccagtcctatggtaatgacttaggaggaatgcagataaaagtaccttgtaagataaatataaattggagttaggaatttcatgaacctcactatgacccaaattaattttttgattcagtttgtctgtctgtctgtccttcccctctcttcttttttcagggtgaggtgctgtgtttcttatttcatacgagataaaacagagagaagttctctcttctccagcttgtccatttccccacttgaagaaaacttttgatatatatgccttactgagtacatgccccctttaatgttaatatgacttggagtaatttctgaggtttactgacaaacataaaaatccctttaattgtagtgtagttgttctataaaccatattttttcatgatgtggatattttcttctatttctttgtcttcatttaatttggtggtggtgaactttacttgctgattttcttttatttttcactgaatgaagtttgtgcttgaatgaagagtgtatcttaaaccccctttttttggacaggctgcacttggataaaataggcaccactgtgttgatatgtaattaattcataactatttat

SEQ ID NO: 187041 - DNA, 1409 bp, Homo Sapiens
  misc_feature (397)..(442): n is a, c, g, or t
ttggactgaattccctttttcggatagtaatttgttcccaggggcagtgacaaccatgatgttccaggtttggtctggcactctgccttgaacgtaggaagctcttgatgatttgtggaatgaatttttaaaaaattactatctggggaaaactagttggcatacagagttgtaggacagggtttatgtgattcatttgatattttagtattttggtgtaaaagccaacaggcaaactttgccaggtactgtgtagaaactcgaaaatgtgaggccagtttgtacagttcagaggaaatgctttaacgtagaatcagatagctggaagagatcttcgagggaaagtaagttccctaaagtcacatctatgtctcctagctcagtgttctttgtcatnnnnnnnnnnnnnnnnnnnnnnnnnnnnnnnnnnnnnnnnnnnnnnattagaaagggcttcattcataccttttcccttggacctggaaaaaaaattttttttatcttttcaaatgaaatctattgatttctagtaatcatatttgaatcaatgttaaagcatatatagtcttatatgtaaactagattcttaagattatttgaacctttgagatgaagtttacactcaactaaaatcattccattgattttattgattaacatcaatcagtatgtttaaagttattctaagaagcaatagtttatttttaaaaaccttgtacagcaaaataacttaaaaccctttgtgatatcatcttaccagtttatttggtaaaaacaaacagttatttggtatttgtcagaattcttcagtgcctgctattacagctattttccaattactaatttgattatactcactcaaggcagtgcaagatcttgaagtactttttagcagttaagtaatattgaattgtattgaatagtttacatagtttattctagtctttgaaaattactgaacatggacaatgtgcatgtcattgacatctgccttagaacttctgggacaatcctgattcgagagattctatcccattatttacatataccaaaaatactttgttaatttaatgtgttggcttcccaactcctgaacacgacacaattttattattagattttgtatggtgattttaggctatgaaaacatgatcattatatgtatatagatacatttttatttgttacaaatgtttgagcagctcactagcccacccctcctctattttgggtaagagaatttactaccttttttaactatgtagttgagagcaacatgtattttgttatttttagaatggtcagtatattgctataaaattttaaatgagactatgaaagttaaagtattctgattctggttaaattaacgaatatggttccaggccctgttctctgggtttttgaga

SEQ ID NO: 187042 - DNA, 1524 bp, Homo Sapiens
ttgggttttgaacaaggaagatttaattgaagacctttcacagacaaacaaaaatacagaaaaaggtctagataactcagtcacttcttttacaaacgaaagcacttattctatgaaataccctggatctttaagcagtactgttcattcagaaaattctcataaagagaatagtaagaaagagatcctcccagtatcttcctgtgaaagtagtatttttgattatgaagaagatattccatctgttacaagacaagtaccaagtagaaaatatacaaacattagaaaaatcgaaaaggattccccttttatacatatgcaccgtcaccctaacgagaatacattgggcaaaaattctttcaacttttctgacttaaatcattcaaaaaataaagtatcctctgaaggaaatgaaaaaggaaacagcacagctctgagtagtttattcccttcatcatttactgaaaattgtgaattactgtcatgctcaggggagaatagaactatggtgcattctcttaatagcactgctgatgaaagtggactaaataaacttaaaattaggtatgaagaatttcaagaacataaaacagaaaagccaagcctcagccagcaagcagcacactatatgttttttcccagtgttgttctttctaactgtcttactagaccacagaaactatctcctgtcacatataaattacaacctggcaataaaccatcccggttaaaattgaataaaaggaaacttgcaggtcatcaggagacttctaccaaaagtagtgagactggatccacaaaagataattttatacaaaataatccttgtaatagtaatcctgagaaggataatgcattggctagtgatttaactaaaaccactcgtggagcttttgaaaataaaacacccacagatggttttatagactgtcactttggagatgggacgttagaaactgagcagtcctttggactatatggaaataaatacacacttagagccaaacgcaaggtaaattatgagactgaagacagtgagtcaagttttgtaactcacaactcaaaaattagtctacctcatcccatggaaattggtgaaagtttagatggaactctcaaatcccgaaaacgaagaaaaatgtctaaaaagctgccccctgtcatcataaagtatattattattaatagatttagagggagaaaaaatatgcttgtgaagctaggaaaaatagactctaaagaaaaacaagtaatattaacagaagaaaaaatggaactatataaaaagcttgcacctttgaaggacttttggccaaaagttcccgactcccctgcaaccaaatatcccatttatccactaacaccaaagaaaagtcacagaagaaagtcaaaacataaatctgctaagaaaaaaactggtaaacaacaaaggacaaataatgaaaatattaaaagaactttgtctttcacgaaaaaacggtcacatgctattctttctcctccctcaccatcttacaatgctga

SEQ ID NO: 187043 - DNA, 1116 bp, Homo Sapiens
ttggcacgtccttgcggaagtgacggcagttccgagtccagtgggggcggtgggagcgatgagggtctgagacggtgggagcggttgtgtgaagatggagtttcccggaggaaatgacaattacctgacgatcacagggccttcgcaccccttcctgtcaggggccgagacattccatacaccaagcttgggtgatgaggaatttgaaatcccacctatctccttggattctgatccctcattggctgtctcagatgtggttggccactttgatgacctggcagacccttcctcttcacaggatggcagtttttcagcccagtatggggtccagacattggacatgcctgtgggcatgacccatgaccctgccctgtccccatccattgttgttaactccaccctctcatcctatgtggcaaaccaggcatcttctggagctgggggtcagcccaatatcaccaagttgattattaccaaacaaatgttgccctcttctattactatgtctcaaggagggatggttactgttatcccagccacagtggtgacctcccgagggctccaactaggccaaaccagtacagctactatccagcccagtcaacaagcccagattgtcactcggtcagtgttgcaggcagcagcagctgctgctgctgctgcttctatgcaactgcctccaccccgactacagccccctccattacaacagatgccacagcccccgactcagcagcaagttaccattctgcagcagcctcctccactccaggccatgcaacagcctccacctcagaaagttcgaatcaatttacagcaacagcctcctcctctgcagatcaagagtgtgcctctacccactttgaaaatgcagactaccttagtcccaccaactgtggaaagtagtcctgagcggcctatgaacaacagccctgaggcccatacagtggaggcaccttctcctgagactatctgtgagatgatcacagatgtagttcctgaggttgagtctccttctcagatggatgttgaattggtgagtgggtctcctgtggcactctcaccccagcctcgatgtgtgaggtctggttgtgagaactctccccatttgtg

SEQ ID NO: 187044 - DNA, 1680 bp, Homo Sapiens
ttggggatggggtccagagtgagaagctgcgttcttgtgatgacggagcggagacctgggctcctgagtcgtgggacagaaggtgaaggggcctagtcccgaagcatgtgggtggtgcctgcaccttcccttctgctcgtcgcagctccggtactggtctctcgctcgcctttgtgtgagaatctatggagcacttactgcatacagctatgagggagctggcctcgcacatgtgcctgtatcatctcctcctccgccctgcacatactgtctcgtatatacccccaggcgtgcaagcgcacgcacaatcctgtgcacatgcgtgggcggacaggccctacccagccctcaccacactccccttccccctaaggagtgagcccagccctgacttcccggcgctgctggtggagaagctgcttcaggaacacttggaagagcaggaggttgcgcccccagcgctgccgcctaaaccccccaaggcaaagccggcccccacagtcctggccaatggagggagcccaccctccctgcaggatgctgagtggtactggggggacatttcaagggaggaggtgaacgagaaactccgggacactcccgatggcaccttcctagtccgagatgcttctagcaagatccagggcgagtacacgctgaccctcaggaaaggcgggaacaataagctgatcaaggtcttccaccgagatgggcactatggcttctcagagccactcaccttctgctccgttgtggacctcatcaatcactaccgccacgagtctctggcccagtacaatgccaagctggacacacggctcctctaccctgtgtccaaataccagcaggaccagattgtcaaggaggacagcgtggaggcagtgggcgcccagcttaaggtctatcaccagcagtaccaggacaagagccgcgagtatgaccagctttatgaagagtacacacggacctcccaggagctgcagatgaagcgtactgcaattgaggccttcaatgagactatcaagatctttgaagagcagggccagactcaagagaaatgcagcaaggaatacctggagcgcttccggcgtgagggcaacgagaaagagatgcaaaggatcctgctgaactccgagcggctcaagtcccgcattgccgagatccatgagagccgcacgaagctggagcagcagctgcgggcccaggcctcggacaacagagagatcgacaagcgcatgaacagcctcaagccggacctcatgcagctgcgcaagatccgagaccagtacctcgtgtggctcacccagaaaggcgcccggcagaagaaaatcaacgagtggctggggattaaaaatgagactgaggaccagtacgcactcatggaggacgaggacgatctcccgcaccacgaggaacgcacttggtacgtgggcaagatcaaccgcacgcaggcagaggagatgctgagcggcaagcgggatggcaccttcctcatccgcgagagcagccagcggggctgctacgcctgctccgtggtagtggacggcgacaccaagcactgcgtcatctaccgcacggccaccggcttcggcttcgcggagccctacaacctgtacagggtcgctgaaaggagctggtgctgcactaccagcacgcctcgctggtgcagcacaacgacgc

SEQ ID NO: 187045 - DNA, 1052 bp, Homo Sapiens
ttggcgattcttctcttctttcaagtgatgatgaaacaaaatgtaaaccgaattctgcttctgaagtcattggccctgtcagtttgcaagaaacaagtagcatagtaagtgtcccttcagaggcagtagataatgtggaaaatgtggtgtcatttaatgctaaagagcatgagaattggctggaaaccatccaagaacagcagaccactgaatctgcaggccaggatttaatttccattccaaaggccgtggaaccaatggaaattgactcggaagaaagtgaatctgatggaagtttcattgaagtgcaaagtgtgattagtgatgaggaacttcaagcagaattccctgaaacttccaaacctccctcagaacaaggcgaagaggaactggtaggaactagggagggagaagcccctgctgagtccgagagcctcctgagggacaactctgagagggacgacgtggatggtgagccacaggaagctgagaaagatgcggaagattcgctccatgaatggcaagatattaatttggtaataccgtaacattgtgtttcgacttcttgctgaggaagccaggttaagtaggttttgagttttaaggagttggtggatgagtatttagtagctatttgcagtacatcttgtggttgctgatggcttcatttttgtgtaggttactggctgggatagactccgttttccatgtggtttagtgatgaatctctaaagatattacagagtcttggttagacatccagtggagtacttcctaaggagaaagagcttattggtaatttcagtcagactaaatgcaggctttttgtaaacaaaactcatttggattattaatataaatctataaatgaaaaaacattttataggaggagttggaaactctggagagcaacctcttagcacagcagaattcactgaaagctcaaaaacagcagcaagaacggatcgctgctactgtcaccggacagatgttcctggaaagccaggaactcctgcgcctgttcggcattccctacatccaggctcccatgg

SEQ ID NO: 187046 - DNA, 1144 bp, Homo Sapiens
aaaaagttggagcctttcccataagtgatgagtctatgattaaggacagaaaagatcggctgcctctggagagtgcagtggttagacatagtgacgcacctgggctcccgaatggaagggaactgacaccggcatctccaacttgtacaaattctgtgtcaaagaatgaaacacatgctgaagtgcttgagcagcagaacgaactttgcccatatgagagtaaattcgattcttctcttctttcaagtgatgatgaaacaaaatgtaaaccgaattctgcttctgaagtcattggccctgtcagtttgcaagaaacaagtagcatagtaagtgtcccttcagaggcagtagataatgtggaaaatgtggtgtcatttaatgctaaagagcatgagaattttctggaaaccatccaagaacagcagaccactgaatctgcaggccaggatttaatttccattccaaaggccgtggaaccaatggaaattgactcggaagaaagtgaatctgatggaagtttcattgaagtgcaaagtgtgattagtgatgaggaacttcaagcagaattccctgaaacttccaaacctccctcagaacaaggcgaagaggaactggtaggaactagggagggagaagcccctgctgagtccgagagcctcctgagggacaactctgagagggacgacgtggatggtgagccacaggaagctgagaaagatgcggaagattcgctccatgaatggcaagatattaatttggaggagttggaaactctggagagcaacctcttagcacagcagaattcactgaaagctcaaaaacagcagcaagaacggatcgctgctactgtcaccggacagatgttcctggaaagccaggaactcctgcgcctgttcggcattccctacatccaggctcccatggaagcagaggcgcagtgcgccatcctggacctgactgatcagacttccggaaccatcactgatgacagtgatatctggctgtttggagcgcggcatgtctatagaaacttttttaataaaaacaagtttgtagaatatttatcaatatgtggactttcacaatcaattgggattggaccgggaataagttaataaatttggcttatttgcttggaagtgat

SEQ ID NO: 187047 - DNA, 817 bp, Homo Sapiens
ttggctgtcttgtctctgtgtgtgtcgtgctgtcctgtccctgcgtgtcggatgcacgtcctgtgtgccccactccttgctgggcccccacccaccattgcctgggaccccagaccatcgtgcggggcagcaaaggtgccaaagatggggccctcacgctgctgctggacgagttggagaacatgtcggtgacacgctccaactccctgcggagagacagcccgccgccgcccgcccgtgcccgccaggaaaatgggatgccagaggagccggccaccacggccagagggggcccagggaaggcaggcagccgaggccggttcgccggtcacagcgaggcgggtggcggcagtggtgacaggcgacgggcggggccagagaagaggcccaagtcttccagggagggctcagggggtccccaggagtcctcccgggacaaacgccccctctccgggcctgatgtcggcaccccccagcctgctggtctggccagtggggcgaaactggcagctggccggccctttaacacctacccgagggctgacacggaccacccatcccggggtgcccaggtaacccatcccccgccccagggcccccactgtcccctgcccgttgctcctctgtccccaccttccagccccgccccaccaccgtgcatctcatcctgaccacccatgtgtctgtcccatcgctgggtctctctcctgcttagggagcagagctgctccctgggcacccatcactgacagctacctctcttctgtttcacggggaagctcatgacgtggccccctcaagggccatcaaccggggg

SEQ ID NO: 187048 - DNA, 825 bp, Homo Sapiens
ttggggattcaacatggcggcgggagtgtccgcggtggtggcggtgcaagagagctgaaggaggcgcgagggcgcggagttccaggtcgagcagttaggccgcgagcgactgcggcgccgagccgatgagtaacccgaagcccctagaggagtggtcacctgcctgagggcacttctgtcccaccagcatcagaccaggtgtgtgcaggccgcaccgagtccccggcaccatgtttgggaagaggaagaagcgggtggagatctccgcgccgtccaacttcgagcaccgcgtgcacacgggcttcgaccagcacgagcagaagttcacggggctgccccgccagtggcagagcctgatcgaggagtcggctcgccggcccaagcccctcgtcgaccccgcctgcatcacctccatccagcccggggcccccaagaccatcgtgcggggcagcaaaggtgccaaagatggggccctcacgctgctgctggacgagtttgagaacatgtcggtgacacgctccaactccctgcggagagacagcccgccgccgcccgcccgtgcccgccaggaaaatgggatgccagaggagccggccaccacggccagagggggcccagggaaggcaggcagccgaggccggttcgccggtcacagcgaggcgggtggcggcagtggtgacaggcgacgggcggggccagagaaagatgcccaaggtcttccagggagggctcaggggtccccaggagtcctcccgggacaaacgccccctctccgggcctgatgtcggcacccccagcctgctggtctgggccagtggggcgaaa

SEQ ID NO: 187049 - DNA, 1740 bp, Homo Sapiens
ttggatacgaagcacgatgtactcacgtagtgataaatgagattactcaggaagaagaacgcattccctttactgcctggggaaaatgtatacggataaccctctgtgccagtgctgtctttttctggatcctattgatcatcgcttcagttattgggatcattgtctataggctctcggtgttcattgtattttctgcaaaacttcccaagaacattaatggaacagacccaatccagaaatacctgactccacagacagccacgtccatcacggcctccatcatcagctttataattatcatgattctgaacaccatatatgaaaaagtggcaattatgattactaacttcgaactcccaaggacccagactgattatgagaacagcctcaccatgaagatgttcttattccagtttgtcaactactactcttcatgcttctacatagcattctttaagggcaaatttgtaggctatccaggagacccagtttattggttgggaaaatacagaaatgaagagtgtgacccaggtggctgtcttcttgaactgacaactcagctgacaataatcatgggaggaaaagcaatctggaataacatacaagaagtattattgccctggatcatgaatctaattgggcgatttcacagagtttctggatcagaaaagataaccccacgatgggaacaggactaccatctgcagcctatgggcaaactgggattattttatgaatatcttgaaatgattattcagtttgggttcgtcaccttatttgtggcctcttttccactggcccctctgttggctctcgtgaacaatatattggaaataagagtggacgcatggaaactgaccacccagtttagacgcctggtaccagagaaagcccaagacattggagcatggcagcccatcatgcaaggaatagcaattctggctgtggtgaccaatgccatgatcatagctttcacgtcggacatgatcccccgcctagtgtactactggtccttctccgtccctccctacggggaccacacttcctacaccatggaagggtacatcaacaacactctctccatcttcaaagtcgcagacttcaaaaacaaaagcaagggaaacccgtactctgacctgggtaaccataccacatgcaggtatcgtgatttccgatacccacctggacacccccaggagtataaacacaacatctactattggcatgtgattgcagccaagctggcttttatcattgtcatggagcacgtcatctactctgtgaaatttttcatttcatatgcaattcccgatgtatcaaaacgcacaaagagcaagatccagagagaaaaatacctaacccaaaagcttcttcatgagaatcacctcaaagatatgacgaaaaatatgggggtgatagctgagcggatgatagaagcagtagataacaatttacggccaaaatcagaataagagctttatgttctgagaagcactttaaggaatttagctttgtcaaaatatattaggaatcactaatgagaatgtgtaagttaaatcactttggcaaatatgagtctcaactattgccatttcctcatgtattatttttcagtttcagctagcgatgcagaaactggaaaatgtaaaacttagatcatgaagggcataaaacttatcacccggaaaacctcaatgttacctttttctgataattggaattttacagaaaaagtcc

SEQ ID NO: 187050 - DNA, 1229 bp, Homo Sapiens
atgagccactgcacccggcatgacctctttttaaatggggcctttgtttacagtattcagtcaaaaagatttgtctcccaatatgtctccattttgttttcaggtatcgtgatttccgatacccacctggacacccccaggagtataaacacaacatctactattggcatgtgattgcagccaagctggcttttatcattgtcatggagcacgtcatctactctgtgaaatttttcatttcatatgcaattcccgatgtatcaaaacgcacaaagagcaagatccagagagaaaaatacctaacccaaaagcttcttcatgagaatcacctcaaagatatgacgaaaaatatgggggtgatagctgagcggatgatagaagcagtagataacaatttacggccaaaatcagaataagagctttatgttctgagaagcactttaaggaatttagctttgtcaaaatatattaggaatcactaatgagaatgtgtaagttaaatcactttggcaaatatgagtctcaactattgccatttcctcatgtattatttttcagtttcagctagcgatgcagaaactggaaaatgtaaaacttagatcatgaagggcataaaacttatcacccggaaaacctcaatgttacctttttctgataaattggaattttacagaaaaagtccctcagtgtgcttaaaaaccaccccttctaaagtagaatggattcttttttttctgtttgattattttcatttctgtctattctcaggcgcatgatctcctttatttttaagccatgtttcatttcttcacttggctagatctgttccagggtcatcttttccttacagtaccatcattatagatttaatttaatagctttcatgtgattaaaaatagctaactagactcaaggattcacaatatttaggtgtattttcaatacctccagaaaggaaacctcagttaatcagaggaaatagtttcagtcttcatttgagcatgtctttccatctcaaaaaaatactcttagtaggttggagtgaagatagcaagggttttgaagcatatttgtcctaatccacagtgacactttttatcttccaggagcactcctaggaggttccgtgcctaatcaatgttgactgctttgcagatctcaagggaataaaatgacaaaagcaggaaagttacagattcaaacagcattttaactcatgttgatctgga

SEQ ID NO: 187051 - DNA, 1275 bp, Homo Sapiens
aatagccaactttgtacaaaaaagttggattaggaatcactaatgagaatgtgtaagttaaatcactttggcaaatatgattctcaactattgccatttcctcatgtattatttttcagtttcagctagcgatgcagaaactggaaaatgtaaaacttagatcatgaagggcataaaacttatcacccggaaaacctcaatgttacctttttctgataaattggaattttacagaaaaagtccctcagtgtgcttaaaaaccaccccttctaaagtagaatggattcttttttttctgtttgattattttcatttctgtctattctcaggcgcatgatctcctttatttttaagccatgtttcatttcttcacttggctagatctgttccagggtcatcttttccttacagtaccatcattatagatttaatttaatagctttcatgtgattaaaaatagctaactagactcaaggattcacaatatttaggtgtattttcaatacctccagaaaggaaacctcagttaatcagaggaaatagtttcagtcttcatttgagcatgtctttccatctcaaaaaaatactcttagtaggttggagtgaagatagcaaggttttgaagcatatttgtcctaatccacagtgacactttttatcttccaggagcactcctaggaggttccgtgcctaatcaatgttgactgctttgcagatctcaagggaataaaatgacaaaagcagggaaagttacagattcaaacagcattttaactcatgttgatctggataattaatcttttctaaagatgtgtagtttcttggaaaacagtgatatcacatgattaaaattacatttttatcaacataattgtctggaaaagataagcccctcaattttctaccagttgacttttattcattagatacagaaggtgcagtattacacatcaccagctgcctttgtgaatggctcactacacagccattggggtacaactgtgtgcatgggcagaaacagcaagtgccctcattgtggtcattgggtggggagtgccttttgtcaaggagtctgcaggaattggcttatttctgtatgccaaagtgatcaacacaccaaagtctctgccataaagaatgtggcttccttgcatcctccatcctgttactctgggcccagtaatttgatgtaactgtctgattgtactagagacaggagtatacccagcttattcataatcaagtaaagagactcagattagatttgatttttta

SEQ ID NO: 187052 - DNA, 894 bp, Homo Sapiens
ttgtacaaaaaagttgggtcttacagaacttttgttacattaccccaggctactgcactttacatatttgaaggacaacacattatattaagcgaaggaaaattgatttaactgctggcctctgaaaaattctcttttctcctaccaggttctacacatgttttaacacccaaaaagctgttggatgatataaagatgctgaataaacccaaggataaagtctccttaattaaagatgaatagcatttctttttggagggtttagagattcttactaatatgttgaactaaaatagaaagaaaatgttgctgtcatgtaatttaaacaatgtaaatattttatggaataatggcttttcaaatacatttcttaaggaactgtttatgattattactggatttgtcatttttgataatttaaatattgctgctgctttgtagatgatgagaagaaatgttaaagtgctttctaaaaggaaattttttcacctttggaggagaatatattagagttgtgggtaatttttcacagccacctatgtacatactaattacccattggatacttatatctaaaagtctcatgctgaagtatagtttttgggaaagaatgattttaaataaagagattgtaaaagtaaaaaactgtaaatgtatatgtatgatagaattgtttcctctaagtgtagtttttctttcaactaaaattcagtttatgtgtaaaataattcagtcattaatagaaatggagtgatttcacagtgtgtactgttttgccacatacttctaaagaacacaattttatataattttgaaatcatgtatgtttaaattagaaaaccaaaaatcatgaacattctaagagaaaataaatataggatttaaaaaattaaa

SEQ ID NO: 187053 - DNA, 1772 bp, Homo Sapiens
ttggcgctcggcttcctggtaattcttcacctcttttctcagctccctgcagcatgggtgctgggccctccttgctgctcgccgccctcctgctgcttctctccggcgacggcgccgtgcgctgcgacacacctgccaactgcacctatcttgacctgctgggcacctgggtcttccaggtgggctccagcggttcccagcgcgatgtcaactgctcggttatgggaccacaagaaaaaaaagtagtggtgtaccttcagaagctggatacagcatatgatgaccttggcaattctggccatttcaccatcatttacaaccaaggctttgagattgtgttgaatgactacaagtggtttgccttttttaagtataaagaagagggcagcaaggtgaccacttactgcaacgagacaatgactgggtgggtgcatgatgtgttgggccggaactgggcttgtttcaccggaaagaaggtgggaactgcctctgagaatgtgtatgtcaacacagcacaccttaagaattctcaggaaaagtattctaataggctctacaagtatgatcacaactttgtgaaagctatcaatgccattcagaagtcttggactgcaactacatacatggaatatgagactcttaccctgggagatatgattaggagaagtggtggccacagtcgaaaaatcccaaggcccaaacctgcaccactgactgctgaaatacagcaaaagattttgcatttgccaacatcttgggactggagaaatgttcatggtatcaattttgtcagtcctgttcgaaaccaagcatcctgtggcagctgctactcatttgcttctatgggtatgctagaagcgagaatccgtatactaaccaacaattctcagaccccaatcctaagccctcaggaggttgtgtcttgtagccagtatgctcaaggctgtgaaggcggcttcccataccttattgcaggaaagtacgcccaagattttgggctggtggaagaagcttgcttcccctacacaggcactgattctccatgcaaaatgaaggaagactgctttcgttattactcctctgagtaccactatgtaggaggtttctatggaggctgcaatgaagccctgatgaagcttgagttggtccatcatgggcccatggcagttgcttttgaagtatatgatgacttcctccactacaaaaaggggatctaccaccacactggtctaagagaccctttcaacccctttgagctgactaatcatgctgttctgcttgtgggctatggcactgactcagcctctgggatggattactggattgttaaaaacagctggggcaccggctggggtgagaatggctacttccggatccgcagaggaactgatgagtgtgcaattgagagcatagcagtggcagccacaccaattcctaaattgtagggtatgccttccagtatttcataatgatctgcatcagttgtaaaggggaattggtatattcacagactgtagactttcagcagcaatctcagaagcttacaaatagatttccatgaagatatttgtcttcagaattaaaactgcccttaattttaatatacctttcaatcggccactggccatttttttctaagtattcaattaagtgggaattttctggaagatggtcagctatgaagtaatagagtttgcttaatcattttgtaattcaaacatgctatattttttaaatcaatgtggaaaacatagacttatttttaattgtac

SEQ ID NO: 187054 - DNA, 1581 bp, Homo Sapiens
ttggggcaaggactctgcgtgcattctccactgccgtctactcggccactccggtcccgacacctagcctgccggaaagaacacccggaaatgaaaggccaccaagaagaaaggcactacctcctaggacagagaaaatggctgttgaccaggactggcctagtgtttacccagttgcagcaccatttaaaccctctgcagtacctcttcctgttcgaatgggttatccagtaaaaaagggcgtgcccatggcaaaggagggaaatctagaacttttaaagattcccaattttctgcatttgactcctgtagcaattaaaaagcactgtgaagcccttaaagatttttgcactgagtggccagccgcactggacagtgacgagaaatgtgagaagcattttccaattgaaattgacagcactgattatgtttcatcaggaccatctgttcggaaccccagagcacgagtagtagtcttaagagtaaagctttccagtttgaatttagatgatcacgcaaagaagaaattaattaaacttgtaggagagcgatactgcaagaccacagatgtgcttaccatcaaaacagataggtgccctttaaggaggcagaattacgattatgcagtgtatctactaacagtgttataccatgagtcttgggaatactgaagaatgggaaaaaagtaagactgaagcagacatggaagagtatatatgggaaaatagctcatcagaaagaaatatcctggaaacgcttctccagatgaaagctgctgagaaaaatatggaaataaataaagaagagctccttggtactaaagaaattgaagagtacaaaaagtctgttgttagtcttaaaaatgaggaggaaaatgaaaattccatttctcagtacaaagaatccgtgaagagactattaaatgtgacatgaattatggagtagaaaaatctgcttgatttattaattttatgatatatgtgatcagtatctaatttgatataaaattgaaaatgttaaaaaatcattttttttcctcagagttaaaattatttccctcatactaatgcttaatggcaatgattactccagagttttttaatttttacactggggcaatagactaggaggtctctgatttcttcttggtctaaagtgttttgattttatttctacataatagctttggtattcatgtatatacatgcatttaattgtgattttatcacctttcccatttctttccccacaagctggcatttcagtagttgcttttgaataatggttttggttacctgggaaggcaggcccagaacccatttccttgacttgcagttccgggctgtgttcacatgactgctgtctagctgatgcatttttcacatttgtcaactctggttagaaacaggtcctcaggagtattctctaacctgatattttctaaaaagatatgttgattcaactttgtttagcatcctactttctagattgtggggctcattttgccagggccaagctaccagaaaagtagaagtggagattacctggtatgtatctctctgggtgcccagttagagctgc

SEQ ID NO: 187055 - DNA, 1396 bp, Homo Sapiens
tcaggggctcggggaacagcacagagccctcaaagaagcccaagtggcccccatgcagaggcagcacaaacatgacgttctctcgtttctctgaaagagattttggaatggttagaagactttcatgcaccaacggatcgtcagctgcattaaccagcatgagaggaacataaatcctgtgcaggtaccgcatgcaactttcttcctcatagtattccttcagggagttatagccgtgaaacttcctcatcacattgtcatcaatctgcatcagggatgttgctgtgtagagccggctcaagtccgtgtcttccaggctctggggtttcttaacatggtctccaaaaagagcttgcctgtgcgagaggatgatcttcttcatgttgtcagccatgaggaagttgtagaaccgccggcactgatcccattgcatgaaggtttcctgggccctcagtgcactgtacccctggcacacgctgacgcagcacaggaccttctcttggtttgcctgagtctcccccaagtatttgcacacaatgttaccacccaggctgaagcccacgacgaccagctgggtcaggggatatgtcttcttgatgtagttcaccatggctccaaattcccacgtgcagccataggtgaacatgcgtggcgaggtcaattcaatgttgggcagggcacccaggtggttcagcacggcgcaccgatagccatttttctgggcgtagtcaacgaaagtgcggatgtattgcttctcgctgtgattggcaattccagggcagatgaccatggtgatatcatcccaacacagtgctcagccaagggctcgaagaggtcgaatgtagaagtggctccatcagacatagtgatgaacttccggtgcccataaggatgtggcgacctcacccttcccatcttcccatacaaggctgtctggatgtgtccacttttcccccagatcaacggtggaatgtattctttggtcagaagaggacaggacttgagcagaaagcgtgagagccccgagtcctggaagtagaggtcaggtggggctgtggggctcttcaggttcaaacaccggacgatcacgtacagcacagcagccactgcagccagcttcactccatcaaacacggctgggagttcgggagtctccagcatggcattcatcttgatcaatgttacttattcttcccactgcaaatacgaattttccttgaagagttgtacagttgggccggtcaggtcagatctcttattcaaacaaacctaaaagtttcccagtgtcatacagctggtgggtagaaaagccagctttcatatctggcccaagagatcctcctcttaatcaccatgctgtgctacttgaaggcaggtaagtgagaaagaaagccaa

SEQ ID NO: 187056 - DNA, 1162 bp, Homo Sapiens
  misc_feature (480)..(514): n is a, c, g, or t
  misc_feature (523)..(588): n is a, c, g, or t
  misc_feature (596)..(642): n is a, c, g, or t
  misc_feature (652)..(774): n is a, c, g, or t
ttggcaccctatgcccggcccatcttcctgcgcctcctgccccaggtggacaccacaggcaccttcaagatccagaagacgaggctgcagcgagagggctttgacccacgccagacctcagaccggctcttcttcctggacctgaagcagggccactacctgcccttaaatgaggcagtctacactcgcatctgctcgggcgccttcgccctctgaagctgttcctctactggccacaaactctgggcctggtgggagaggccagcttgagccagacagcgctgcccaggggtggccgcctagtacacacccacctggccgagctgtacctggcacggcccatcctggactgagaaactggaacctcagaggaacccgtgcctctctgctgccttggtgcccctgtgtctgcctcctctccctgcttttcagcctctgtctccttccatccctgtccctgtctggccttaactcttcccnnnnnnnnnnnnnnnnnnnnnnnnnnnnnnnnnnnaagatagannnnnnnnnnnnnnnnnnnnnnnnnnnnnnnnnnnnnnnnnnnnnnnnnnnnnnnnnnnnnnnnnntggggttnnnnnnnnnnnnnnnnnnnnnnnnnnnnnnnnnnnnnnnnnnnnnnnacccgccacnnnnnnnnnnnnnnnnnnnnnnnnnnnnnnnnnnnnnnnnnnnnnnnnnnnnnnnnnnnnnnnnnnnnnnnnnnnnnnnnnnnnnnnnnnnnnnnnnnnnnnnnnnnnnnnnnnnnnnnnnnnggcgtgagcctctggcccggcctttcctttttcctctcctctcctgccgagagtggaacacgcgtgtcctgggagctgcatcttgtgtagggtccagctgcttttggggactgcaggaatcatctcccctgggccctggactcggactggggcctccccacctccctctcggctgtgccttacggagccccgatccaggcctcctgtggctgttgggttccagatgctgcagctccatgtgacttccaagcaggccctccgccctccctgctgaatggaggagccgggggtcccccaggccaactggaaaatctcccaggctaggccaattgccttttgcacttccccgttcctgtcacatttccccagccccaccttcccctcctga

SEQ ID NO: 187057 - DNA, 904 bp, Homo Sapiens
ttggaacacctttgatttcattaaagtgttgcggcagcacaggatgatgattttatactgtaccttgctggccagtgcacaaagtgaagctgaaaaggaaaggattatgggaaagatggaagctgacccagagctatccaagttcctctaccagcttcatgaaaccgagaaggaggatctgatccgagaggaaaggtcccggagagagcgagtgcgtcagtctcgaatggacacagatctggaaaccatggatctcgaccagggtggagaggcactggctccacggcaggttctggacttggaggacctggtttttacccaagggagccactttatggccaataaacgctgtcagcttcctgatggatccttccgtcgccagcgtaagggctatgaagaggtgcatgtgcctgctctgaagcccaagccctttggctcagaagaacaactgcttccagtggaaaagctgccaaagtatgcccaggctgggtttgagggcttcaaaacactgaatcggatccagagtaagctctaccgtgctgcccttgagacggatgagaatctgctgctgtgtgctcctactggtgctgggaagaccaacgtggccctgatgtgcatgctccgagagattgggaaacacataaacatggacggcaccatcaatgtggatgacttcaagattatctacattgcccccatgcgctccttggtgcaggagatggtgggcagctttggaaagcgcctggccacttatggcatcactgttgctgaactgactggggaccaccagctgtgcaaagaagagatcagtgccactcagatcatcgtctgcacccccgagaagtgggacatcatcacccgcaagggtggtgagcgcacctacacccagctggtgcggctcatc

SEQ ID NO: 187058 - DNA, 1890 bp, Homo Sapiens
ttggggaagatggggccgtggaactagagtggatcccagagactctctataacaccgccatctccgctgtcgtggacaactacatccgctcccgccgagacatccgctccttgcccgagaacatccagtttgatgtttactacaagctttaccaacagggacgcttatgtcaactgggcagtgaattttgtgaattggaagtttttgctaaagtactgagagctttggataaaagacatttgcttcatcattgttttcaggctttgatggatcatggtgttaaagttgcttcagtcttggcctactcattcagtaggcggtgctcttatatagcagaatcagatgctgcagtaaaggaaaaagccattcaggttggctttgttttaggtggctttctttcagatgcaggctggtacagtgatgctgagaaagtttttctgtcctgccttcagttgtgtactctacacgatgagatgcttcattggtttcgtgcagtagaatgttgtgtgaggttgcttcatgtgcgaaatggaaactgcaaatatcatttgggtgaagaaacatttaaattagctcagacatatatggataaactatcaaaacatggccagcaagcaaataaagctgcactctatggagaactgtgtgcactcctatttgcaaaaagtcactatgatgaggcatacaaatggtgcatcgaggcaatgaaagaaattacagcaggcttaccagtgaaagttgtggtggatgtcttaagacaagcttctaaggcttgtgtagtaaaacgtgaatttaagaaggcagaacagttaattaaacatgcagtgtatttggcacgggatcattttggatccaaacacccaaaatattctgatacactgctagattatgggttctacttactcaatgtagataatatctgtcagtctgttgcaatttatcaggcagcccttgacattagacagtcagtgtttggtggcaaaaatatccacgtagcaacagctcatgaagatttggcctactcttcttatgtccaccagtatagctctgggaaatttgacaatgcactatttcatgcagaaagagctattggtatcattacccacatcctacctgaagatcatcttcttttggcttcttcaaagagggtgaaagcacttattttagaggagattgcaattgattgtcataataaggaaactgaacagaggctgcttcaagaagctcatgatttgcacctgtcttcactccaactagctaaaaaagcttttggggaatttaatgtacagactgcaaaacactatggaaaccttggaagactttatcagtcaatgagaaaatttaaggaagctgaagaaatgcacatcaaagcaattcagattaaagaacaacttcttggtcaagaagattatgaagtagccctttcagtgggacatctggcttctttatataattatgacatgaatcagtatgaaaatgctgagaaactttatttgcgatctatagcaattgggaagaaactttttggtgagggctacagtggactagaatatgattatcgaggtctcattaaactttacaactccattggaaattacgagaaagtgtttgaatatcacaatgttctgtctaactggaaccggttgcgagatcggcaatattcagtgacagatgctcttgaagatgtcagcaccagcccccagtccactgaagaagtggtgcagtccttcctgatttctcagaatgtcgagggaccgagctgctgagggaggacctcagttaaccaattaccttttcccggattccagggaattcatactgtgaaatcaaaaccatgttgttttggggggctggaatttgcattgaaacactggtccagtccattgaaga

SEQ ID NO: 187059 - DNA, 966 bp, Homo Sapiens
  misc_feature (279)..(290): n is a, c, g, or t
ttggttttaacaactttttaatatgtaattcttccatgtggaggtattcaatactgtagtgtaaagaaattttatgcggaaaatctttatatgcagtatagaaaagttaacacaagtactaataaaagagggacatcccgacttacgtttttctaccttgcccagataagtggatacaaccactctatattacaaggaaaggactgtcagattcatctgaactggaccagtgttgatctgtaatgtaatagaaaatctgatagaccagcacttctgacnnnnnnnnnnnnggtacaacaatgcaagatgctctgatagcatttgctaacaggaccaggaggatctaaaaaggaccagcctaatgtagaaggtggttatttggaccagaggctttagattattattttagatcctacatatacttttatcagtagaatgatttcatttagatgtataatgaaaaaggataatgcaaaaattatgtaatagataccaaattagggaagtttggcaatttcaatggcatatttttagtcaaggtacacagatggcagtgccataagcaagtctataaatatcggctgcagccatccccctcattttaaatgttgccctaataatcaatgcagttaacaagtatattggctgtgtgtcatgaaatagttcatgttcagatggaaatgttaggttactgtatggtttatggagattaatgaaaatgaatgcccaaaaataagtcttagaaaatcctccatttttatggtaaatagtaatacaactaggtcatttcatttgaaatctaggagtcaaatggaaagatcccctaataatacacctatttcactaacttgtctttctgtttattgggttttgatttgattttttgtaaggcagtcaggttatttaatgatgaggtaataatcaaatttaagaatttggtgacatgtagcaattcaggaaacaaaa

SEQ ID NO: 187060 - DNA, 1561 bp, Homo Sapiens
  misc_feature (909)..(970): n is a, c, g, or t
  misc_feature (1306)..(1317): n is a, c, g, or t
ttggagatggttttgaagtacactaatttattgccttcttttttagcacttattttagaggagattgcaattgattgtcataataaggaaactgaacagaggctgcttcaagaagctcatgatttgcacctgtcttcactccaactagctaaaaaagcttttggggaatttaatgtacagactgcaaaacactatggaaaccttggaagactttatcagtcaatgagaaaatttaaggaagctgaagaaatgcacatcaaagcaattcagattaaagaacaacttcttggtcaagaagattatgaagtagccctttcagtgggacatctggcttctttatataattatgacatgaatcagtatgaaaatgctgagaaactttatttgcgatctatagcaattgggaagaaactttttggtgagggctacagtggactagaatatgattatcgaggtctcattaaactttacaactccattggaaattacgagaaagtgtttgaatatcacaatgttctgtctaactggaaccggttgcgagatcggcaatattcagtgacagatgctcttgaagatgtcagcaccagcccccagtccactgaagaagtggtgcagtccttcctgatttctcagaatgtcgagggaccgagctgctgagggaggacctcagttaaccaattaccttttcccggattccagggaattcatactgtgaaatcaaaaccatgttgttttggggggctggaatttgcattgaaacactggtccagtccattgaagaccctattttgggtgatccctatcttgcagaatgtctgtaggaataagcatatattcagttatattcagcatgtaccgcatgtgtaagtagtctggcccacattttcaacctagtagaacaaacaacannnnnnnnnnnnnnnnnnnnnnnnnnnnnnnnnnnnnnnnnnnnnnnnnnnnnnnnnnnnnntacccctaaataaaactatttaagagtttaaaagagttgcattcttattatgtaaggatgattttaacaactttttaatatgtaattcttccatgtggaggtattcaatactgtagtgtaaagaaattttatgcggaaaatctttatatgcagtatagaaaagttaacacaagtactaataaaagagggacatcccgacttacgtttttctaccttgcccagataagtggatacaaccactctatattacaaggaaaggactgtcagattcatctgaactggaccagtgttgatctgtaatgtaatagaaaatctgatagaccagcacttctgacnnnnnnnnnnnnggtacaacaatgcaagatgctctgatagcatttgctaacaggaccaggaggatctaaaaaggaccagcctaatgtagaaggtggttatttggaccaaaggctttagattattattttagatcctacatatacttttatcagtagaatgatttcatttagatgtataatgaaaaaggataatgcaaaaattatgtaatagataccaaattaaggaagtttaggcaatttcaatggcatattttta

SEQ ID NO: 187061 - DNA, 1340 bp, Homo Sapiens
gggctgggtgctgtcagagttgaggggagaaagaaagacgctttccaactgccccacgggcagaccagagagtggagcagggcatcaggcagaggcatgcatgtggacaggacgtggcaggagggacaaggctgggcctcaggacaggagcaggccctgtcaccctcatcccatcgattccgctcaccggcgccaggcccggcaggccaccagcagggcaggaccagcacggccagcacttcccttttgtgtgggctgccccgagggcagaggaggttggtgactgaggtcactgagtgagagagttcacagcaaggggttcccaaaggcgggctattgctgtcagcaggccccaaacctgcttcagacctgagcatggcctcccgatgccacggtgggccggcagagttggagagaggctgttgagcatgtcgaagcacatcttgatgttgaagcgccttttctgctcagctgagatgtgcttcatctgccggttctgctttagtgcagccacatttttggggtcggatttccctgagcagttgttctggggagattgaggactggggctctgctccgatgcacacggagaggcctgccctgagtttgggcagtcccgactgggccctgtgacagtgacctgggggctgcccccatgcagcgggacctgctcgcccttccccagggggtcttgcgctgtgcttgggaagagccgggagacgggggcaggcgggctgctcgtgccatggccgagatctgtcaccaggatgctgctgtggaactccgggaccccaggagccctggcgatggcagcaggcgcaatgaccacgttggactgggacacgggtggaggccaacatcccttctctcttcagaggccctgacgtcatgatcaccgcttgtggttggcctgaaaaggcagctggggcgatacgggcattcttcaacaccaaggacacgggctctggtttgggagcaggcactattttgtggggctgcttaggcctgcccccagtcaaggatacaggtttggggtgcacaaaagttaaccgtggctggggaggccgggtgacaggagacagtgccagcccacaaggggccgctgacggggcagggtgatgggtggtgatcacaaggccctgactctggctaaaggtggtggcgggggcatcgtgggtgagggtggcagaggccgtgtgggtgatgacagacggcgctttgttgactccagcaaacttctgtggctgatggaaggtgggtggagccggggggttcagggcagtggcaggaggaggaactaatggtaacacgggggagatgccaacttttttgtacaaagt

SEQ ID NO: 187062 - DNA, 1358 bp, Homo Sapiens
  misc_feature (1238)..(1253): n is a, c, g, or t
ttggggagaaaatatcgttgcaacttgcctgggaaactgagctctgttgggatgtttttgagggactttctcatcttcaagttctgtatttgaatcataactatcttaattcccttccaccaggagtatttagccatctgactgcattaaggggactaagcctcaactccaacaggctgacagttctttctcacaatgatttacctgctaatttagagatcctggacatatccaggaaccagctcctagctcctaatcctgatgtatttgtatcacttagtgtcttggatataactcataacaagttcatttgtgaatgtgaacttagcacttttatcaattggcttaatcacaccaatgtcactatagctgggcctcctgcagacatatattgtgtgtaccctgactcgttctctggggtttccctcttctctctttccacggaaggttgtgatgaagaggaagtcttaaagtccctaaagttctcccttttcattgtatgcactgtcactctgactctgttcctcatgaccatcctcacagtcacaaagttccggggcttctgttttatctgttataagacagcccagagactggtgttcaaggaccatccccagggcacagaacctgatatgtacaaatatgatgcctatttgtgcttcagcagcaaagacttcacatgggtgcagaatgctttgctcaaacacctggacactcaatacagtgaccaaaacagattcaacctgtgctttgaagaaagagactttgtcccaggagaaaaccgcattgccaatatccaggatgccatctggaacagtagaaagatcgtttgtcttgtgagcagacacttccttagagatggctggtgccttgaagccttcagttatgcccagggcaggtgtttatctgactttaacagtgctctcatcatggtggtggtggggtccttgtcccagtaccagttgatgaaacatcaatccatcagaggctttgtacagaaacagcagtatttgaggtgccctgaggatctccaggatgtggggtggttttttcataaactctctcaccggtttttaaagaaagaaacagcacacgacagaaagccaatacctttccgtggcaaaactgtagcaaccatctcttaatcaaaggagcaatttccaatttatctcaagccacaaataatttttcactttgtatttgcaccaagttatcatttgggggtcctttcgggaggnnnnnnnnnnnnnnnngttattaggaaaacaacataaatttttcaattttggtttcaaccccatgttttgtttcactaccctccaaagggaaaataatagatttagaaaattgcaactccc

SEQ ID NO: 187063 - DNA, 1927 bp, Homo Sapiens
ttgggtgaatattacaattccctaagatggattcttgaaaatgacccaacagaattggacctcaggtttatcatagatgaagaactttttggacagacacatcaacatgagctgaaaaatggtggatcagaaatagttgtcaccaataagaacaaaaaggaatatatttatcttgtaatacaatggcgatttgtaaaccgaatccagaagcaaatggctgcttttaaagagggattctttgaactaataccacaggatctcatcaaaatttttgatgaaaatgaactagagcttcttatgtgtggactgggagatgttgatgtgaatgactggagggaacatacaaagtataaaaatggctacagtgcaaatcatcaggttatacagtggttttggaaggctgttttaatgatggattcagaaaaaagaataagattacttcagtttgtcactggcacatctcgggtgcctatgaatggatttgctgaactatacggttcaaatggaccacagtcatttacagttgaacagtggggtacgcctgaaaagctgccaagagctcatacctgttttaatcgcctggacttgccaccttatgaatcatttgaagaattatgggataaacttcagatggcaattgaaaacacccagggctttgatggagttgattagattacaaataacaatctgtagtgtttttactgccatagttttataaccaaaatcttgacttaaaattttccggggaactactaaaatgtggccactgagtcttcccagatcttgaagaaaatcatataaaaagcatttgaagaaatagtacgacaacttatttttaatcacttttaaataatgtgttgcatttacacagttgtttcatgctgtctttagagttaggtgcctgcctaaagccaggcaccaccacacctggctttagagttcacacaataggatataagtcctgtatgacttaaatagtgaattttgtccttaacatttacctcttgtatagtatctgccaggcagttttttcttaaactactgagatgataactgtgaaatatttgtgatacgtgtcatgtgtgaaaagtttgatgcattttgagatggaaaactgaaatttggaaaaagaaatactttactattgagtaaactacaatatatttagtgctactcgcagctatttattattttgtagacctgccttatgcaccttactgcctagatttttgggaaaaaactttggaaagtgtgttacctatatttctagccaactaactcacagaaaaactgtttacttcttcactttcgaagtatttggcttttgttaatatgcagttttactaaacagatggttcataagacatgtgaagcaaattcatatttgcaatgggtaaaaagtattaaagcctttctcttgcctgcatatcctattgaccattggtatagtcatcactttttcatattttagtgtagttagaagaattccttcttcaaacattaaagatccacaaagcagtatttctaaatatgccttgaagaactaaatgaagtgtatagcacttgcctttactagatattctttacacttgtacaattatgtagtaaatgtatgtttacagggtttatcatgtttacagattaagctaatttctgtagtcgcatttttatatttttagtatcactctagtaaaaaaaccaaataatttgtttaaaataaccaaagagttgttataatgcataatttgtattaaatttattactatttcttatgccttttaaaatactgtttactatgaagacaatgtttttaattacaaatccagaattctgtaggcaaaatgctacagttcatatcttcctttaaccaaactgaagtacataaagaccatgtacatgtattcatcaaacgtttattgaatgctgc

SEQ ID NO: 187064 - DNA, 2320 bp, Homo Sapiens
ttggaacacggccatcgccgtatcccagatgtcctcaggccagtgccgcctggcccccctcatccaggtcatccaggactgcagccacctctaccactacacggtcaagctcctgttcaagctacactcttgtctccctgcggacaccctgcaaggccacagggaccggttccacgagcagtttcacagcctcaggaacttcttccgcagagcctccgacatgctgtacttcaagcggctcatccagatcccccggctgcccgagggaccccctaacttcctgcgggcctcagccctggctgagcacatcaagccggtggtggtgatccccgaggaggccccggaagatgaggagccggagaatctcattgagatcagcacagggccccccgcgggggagccagtggtggtggctgacctcttcgatcagacgtttggaccccccaatgggtctgtgaaggacgacagggacctccagattgagagcttgaagagagaggtggaaatgctccgctctgaactggagaagatcaagctggaggcccagcggtacatcgcgcagctgaagagccaggtgaatgcactggagggtgagctggaggagcagcggaagcagaagcagaaggccctggtggataatgagcagctccgccacgagctggcccagctgagggctgcccagctggagggcgagcggagccagggcctgcgtgaggaggctgagaggaaggccagtgccacggaggcgcgctacaacaagctgaaggaaaagcacagtgagctcgtccatgtgcacgcggagctgctcagaaagaacgcggacacagccaagcagctgacggtgacgcagcaaagccaggaggaggtggcgcgggtgaaggagcagctggccttccaggtggagcaggtgaagcgggggtcggagttgaagctagaggagaagagcgaccagctggagaagctcaagagggagctggaggccaaggccggagagctggcccgcgcgcaggaggccctgagccacacagagcagagcaagtcggagctgagctcacggctggacacgctgagtgcggagaaggatgctctgagtggagctgtgcggcagcgggaggcagacctgctggcggcgcagagcctggtgcgcgagacagaggcggcgctgagccgggagcagcagcgcagctcccaggagcagggcgagttgcagggccggctggcagagagggagtctcaggagcaggggctgcggcagaggctgctggacgagcagttcgcagtgttgcggggcgctgctgccgaggccgcgggcatcctgcaggatgccgtgagcaagctggacgaccccctgcacctgcgctgtaccagctccccagactacctggtgagcagggcccaggaggccttggatgccgtgagcaccctggaggagggccacgcccagtacctgacctccttggcagacgcctccgccctggtggcagctctgacccgcttctcccacctggctgcggataccatcatcaatggcggtgccacctcgcacctggctcccaccgaccctgccgaccgcctcatagacacctgcagggagtgcggggcccgggctctggagctcatggggcagctgcaggaccagcaggctctgcggcacatgcaggccagcctggtgcggacacccctgcagggcatccttcagctgggccaggaactgaaacccaagagcctagatgtgcggcaggaggagctgggggccgtggtcgacaaggagatggcggccacatccgcagccattgaagatgctgtgcggaggattgaggacatgatgaaccaggcacgccacgccagctcgggggtgaagctggaggtgaacgagaggatcctcaactcctgcacagacctgatgaaggctatccggctcctggtgacgacatccactagcctgcagaaggagatcgtggagagcggcaggggggcagccacgcagcaggaattttacgccaagaactcgcgctggaccgaaggcctcatctcggcctccaaggctgtgggctggggagccacacagctggtggaggcagctgacaaggtggtgcttcacacgggcaagtatgaggagctcatcgtctgctcccacgagatcgcagccagcacggcccagctggtggcggcctccaaaggtgaaggccaacaagcacagcccccacctgagccgcctgcaggaatgttctcgcacagtcaatgagagggctgccaatgtggtggcctccaccaagtcaggccaggagcagattgaggacagagacaccatggatttctc

SEQ ID NO: 187065 - DNA, 1864 bp, Homo Sapiens
ttggcagggcgtcgtctaggggagcgagtcgtgaccggttgggccacactcaacgtgggacgaagcttcgcctactgtttgactacgtgcgtgcagcctcccctcgatgtcggccctcgaaaagagcatgcacctcggccgccttccctctcgcccacctctacccggcagcgggggcagtcagagcggagccaagatgcgaatgggccctggaagaaagcgggacttttcccctgttccttggagtcagtattttgagtccatggaagatgtagaagtagagaatgaaactggcaaggatacttttcgagtctacaagagtggttcagagggtccagtcctgctccttctgcatggaggaggtcattctgccctttcttgggctgtgttcacggcagcgattattagtagagttcagtgtaggattgtagctttggatctgcgaagtcatggtgaaacaaaggtcaagaatcctgaagatctgtctgcagaaacaatggcaaaagacgttggcaatgtggttgaagccatgtatggggaccttcctcctccaattatgctgattggacatagcatgggtggtgctattgcagtccacacagcatcatccaacctggtaccaagcctcttgggtctgtgcatgattgatgttgtagaaggtacagctatggatgcacttaatagcatgcagaatttcttacggggtcgtcctaaaaccttcaagtctctggagaatgctattgaatggagtgtgaagagtggccagattcgaaatctggagtctgcccgtgtctcaatggttggccaagtcaaacagtgtgaaggaattacaagtccagaaggctcaaaatctatagtggaaggaatcatagaggaagaagaagaagatgaggaaggaagtgagtctataagcaagaggaaaaaggaagatgacatggagaccaagaaagaccatccatacacctggagaattgaactggcaaaaacagaaaaatactgggacggctggttccgaggcttatccaatctctttcttagttgtcccattcctaaattgctgctcttggctggtgttgatagattggataaagatctgaccattggccagatgcaagggaagttccagatgcaggtcctaccccagtgtggccatgcagtccatgaggatgcccctgacaaggtagctgaagctgttgccactttcctgatccggcacaggtttgcagaacccatcggtggattccagtgtgtgtttcctggctgttagtgacctgctgtccacccctcctcaacatcgagctctgttgtaaatacgtcgcaccagaggccactgtgatgccactgtctcctctccatcccgcccagccatgtgacactggctcccggtagacgggcaccccgagatgtaccaaccttttcatgtattctgccaaaagcattgttttccagggcccttgaccaacatcggcttccccagtccagggctcccctgctcctttcccttccctgtactggggtagctcctgcctgctctccctgcgttgcctagggtaaagcctccagatttgccatactgagcccctcttcctagcatcaggcgatacatctgagttcaaatgtcttcccaggctcagggacctccattccttgagattgtcttggcatggcccagccctgcctcatgggatggacaatgcatggggtggtctttatttttccctttcaaataaaacactagtcaggtaccgttttatcccagtcgtactcttccaggtttggaagacccagagaggccaagatcccatccttagccatagcgagcggtggtggtggatagcatcacaagaaacgagccctgaaaatc

SEQ ID NO: 187066 - DNA, 1799 bp, Homo Sapiens
ctttgtacaaaaaagttggaaatattacaagcttgaagttggcagaaatgcagcggatgagcgagaacttgcgaggagccgaccagaagccgacctcagcagactgtgcagtgagggccatgctgtactcccgggctgtccgcaacctcaagaagaaactccttccgtggcagcggcgggggctcctccgtgctcaagggctccggggctggaaggcgaggagagcgaccaccgggacccagaccctcctatcctcaggcaccaggctgaaacaccacggccggcaggctccaggcctctcacaggcaaaaccatccctgccagacagaaatgatgttgtcaaggactgcccgccagacccagttggaccttctcctcaggaccccagcttagaagcctcaggcccatcccccaagccagcaggagtggacatctctgaagcacctcagacctcttctccctgcccatctgctgacattgacatgaagacaatggagactgcagagaaactggctagatttgttgctcaggtgggaccagagatcgaacaattcagcatagaaaacagcaccgataaccctgacctgtggtttctacatgaccaaaatagttctgctttcaaattctatcgaaagaaagtgtttgaactatgtccatcaatttgtttcacgtcatctccgcacaaccttcacactggtggtggtgacaccacgggttctcaggagagccccgtggacctcatggaaggggaagcagagtttgaagacgagccccctccgcgggaggctgagctggagagcccagaggtgatgcctgaggaggaggacgaggacgatgaggatgggggagaggaggcccccgctcctggaggggcgggcaagtctgagggcagcacccctgccgacggccttcccggcgaggctgccgaggacgacctggctggagcacctgccttgtcacaggcctcctcaggtacctgcttccctcggaagaggatcagcagcaagtcattgaaggttggcatgattccagctcccaagagagtgtgtctcatccaggagccaaaagtccatgaaccagttcgaattgcctatgacaggcctcggggtcgtcccatgtccaaaaagaagaaacccaaggacttggacttcgcccagcagaagctgaccgataagaacctgggcttccagatgctgcagaagatgggctggaaggagggccatggcctgggctccctcggaaagggcatcagggagccggtcagcgtgtacgcagcaggcagcctggggtgggagtgggtggggcctcagtccttccacctgcagcctgccgcttggctccttcacagccaagatggcttacagctggcagttgatttttgttttttaaacagaaggcatcttcagatgagaagctgatcatttacatgtgcaggtgtttacagggctcctttctgtcctggtgtagattttttaaccagcttgttggccctggtcattttggccacatttgtgaccatcataaaagctaagtggtatttctgtgtagtttccgtctggaactgctttcccattcccgggaacccatagccgggccagccagggtcccgaacacaggcccaaagtttattaaaccccgatcataacctccagcaggcatttcatttaatactgagcttaattcctgctgggtaaggcattccgaggtaaccagggccctctgggcaccccctcaaaaagccagctcttcgagagtgagtactccttgttttctactgtgagtcgcgtcttgattttccc

SEQ ID NO: 187067 - DNA, 1275 bp, Homo Sapiens
  misc_feature (214)..(228): n is a, c, g, or t
ttgggttttttctttaagaaaggtaaattttgtcagctagtttactatgttccttgaatataaacaggttataatactaccctgttcactttactaaatataagtacagtaatgatgcataattagaaaatgaggtattctaggtaaaatgtatgtttgccttgacatgtttttaaaagttatgatgtacctccctgcctttaaacagaatacnnnnnnnnnnnnnnnggcctttctcagattagtcaaaaattctatagaatgactcacttcgaatactaagacacaggaggtttagcctgctttcttaccaaattcatgttacccagacttgtgttctcttgcgtcccttggactgcctgttgattgatggaaagtgtctgcactgacacttttcgtcagtagtctgtagtttcgtggcctcttttgattataactggggtcaccaagaaggtttacttaattaaataccgcatttctaagagaagatactttgtgtaagaaaagatgccacatttagtggtttaacttttgtaacttcacttgatagtttttaagcaattagaatggagttagggaaagaacatatcatactgaacaaatgtcattctagtttagatagcatttctaagataactgatactaatacttgttttcttccctataacataaaaaacttcactgttaagtcatgtcccttgaaacatgatagttacatacacagttttctctccacacataaataacaccactaaagttgttttgtaaggttccaaactaatatggcatatatcaactctacagtttcaaataaatgactttttaattgtaaaagattagttgaaaaactgtatgaatgtgaagatcacatgcttagtcatttttatgttcattccactttgtatatcttttctatttattgacttctcatgttctagagagtaggacttttattccgtgtacctgatatatatacaattaaaatatctgtgtaattatgttttaatgaagtttatttcaacagatattttatgaaatgcagtttaaccacagtgaatgaattttagctttgcttttgaaatacattgtaagatttgacttgaggtttttgacacttaagtacatgcttaatgatgtattttcaaaagtcatcagtctacttacataaactttacctaatttttttcactttaacaaaaacataactatgccctttgttttttcatactttgacccaaaatatgccattttgaaataaaatttaagctttgatac

SEQ ID NO: 187068 - DNA, 1567 bp, Homo Sapiens
ttggcccagctgggagccccagccctcggtgggcagcagtcagtctccaataagcttctggcctggagcggggtcctggagtggcaagagaaacccaaacctgcctcagtggatgccaacaccaagctgacgcggtcactgccctgccaggtctacgtgaatcatggcgagaacctgaagacggagcagtggccccagaagctgatcatgcagctcatcccccagcagctgctgaccaccctgggccctttgttccggaactcaaggatggtccagttccatttcaccaacaaggacctggagtctctcaaaggcctctaccgcatcatgggcaacggcttcgcgggctgcgtgcacttcccccacacggcgccctgtgaggtgcgcgtgctcatgctcctgtactcgtccaagaagaagatcttcatgggcctcatcccctacgaccagagcggcttcgtcaacggcatccggcaggtcatcaccaaccacaagcaggtccagcagcagaagctggagcagcagcagcgaggaatggggggacagcaggcacccccagggctggggcccattctggaggaccaagccaggccctcacagaatctgctccagctccgcccaccgcagccccagcctcagggtaccgtaggggcctctggggccacggggcagccccagccccaaggtactgcccagcccccgccaggtgcccctcaaggccctcctggagcagcttctggcccaccccctcctggacccatccttcggccccagaaccctggggccaaccctcagctgcgaagcctcctcctcaacccaccaccgccgcagactggggtgcccccaccccaggcctccctccaccacctccagccaccaggggctcctgcgctgctgcctccgccgcaccagggcctggggcagccccagttggggcccccactcctgcatccaccacctgcccagtcctggcccgcacaacttccccctcgggctccactgccagcggcaaaacgaaagagagaaggagagggccgtgtgtttcgagaaaaatgggagcgagcctatttctttgtggaagtgaagagcatgcctatgtgtttaatatgcaaacaaatcgtgtctgtgttgaaagaatacaacctgaaacgccactatgaatcaaagcatagtaagagctacgaccagtacacagaacagactcgagatgccatcctcaacgaactgaaaaagggactcaaatgtcaatagggtttgttttgaaaagcgaattaacagaagtggcgcggcagtggtacgccgttccggaatcacgtgagaagaatgacctgggcattcagagctacagcagatggcaagtttataaaggagcagagtgacgtgtcctgcacagaaacacatgactgttgagaccgttatttaagtctaacgggcatttgcgttgcacagtgagttggagataactcgggggatttacaagtccagttgcttgaaagagtcaaattgattgtggccttttctttcgctgctcataaactattaccacccagttagctttatttatttg

SEQ ID NO: 187069 - DNA, 1411 bp, Homo Sapiens
ttggtgaaatgtgtgctaacaatgacttcgttcaagtggatccagggcaggttggcttaataaattcaaatgtgtctatggtagatttaaccagtgttaccttagaagatgtaacacctaagaagtcaccaccaccaaagacaaatttaacccctggccaaagtgattcagcaaaaagggaagtaaagcagaagatcagtccctactttaaaagtaatgatgtggtgtgcaaaaatcaagatgagctgagaaatcgtagtgtgaaagtcatttgtttgggaagcctagcatctaaattgtccagaaaatacgtaaaggctaaaaaatcaatagataaggatgaagaatttgccggttctagtccacagagttccaaatccacagttgttaagagcctgattgataactcttcagaaattgaggacgaggatcaaattttggagaacagttctcaaaaagaaaacgtgtttaaatgtgattctctaaaggaagagtgcattcctgaacatatggtaagaggaagtaaaataatggaagccgaaagccaaaaggctacccgggaatgtgagaaatcagccctcacccctggattctcagataatgcgatcatgttattctcaccagatttcactcttaggaatacattaaagtctacttcagaagacagtcttgtaaagcaagagtgtatcaaagaagtggttgaaaaacgtgaggcatgtcattgtgaagaagtaaaaatgactgttgcttcagaagctaaaatacagctgtcagattcagaggcaaaatctcatagttctgcagatgatgcttctgcatggagtaacatccaagaggctcctctgcaggatgacagttgcttaaacaatgatatccctcacagcattcctttggagcaggggtcaagctgcaatggtcctggtcaaacaaccggtcatccttactaccttcggagtttccttgtggtgctgaaaaccgtacttgagaatgaagatgatatgttgctctttgatgagcaggagaagggaattgtaactaaattttatcagttatcagctactggtcagaagttatatgtaaggctctttcaacgtaaattaagctggattaagatgaccaaattagagtatgaagagattgccttagacttaacacctgtgattgaagaattgacgaatgcaggctttctacagacagaatctgagttgcaagaactctctgaagtgcttgaactcctttctgctcctgaactaaaatccctagccaagaccttccacttggtgaatcccaatggacagaaacagcagctggtggacgcctttctcaaattggccaaacagcgttcagtctgcacttggggcaagaataagcctggaattggtgcagtgattttaaaaagagccaaagcctt

SEQ ID NO: 187070 - DNA, 2083 bp, Homo Sapiens
  misc_feature (1924)..(1987): n is a, c, g, or t
tcgtagacattcatcactgttccaccgattagacacaattggccgcaaacgtttgacacacacaacctcacgcatatcttcgtatgacggatcactcggtaccatgttgtaatatggcaattggtatcttccacgatccctcctgtgatacaacgacgagccatctcccaaatgattaggccgaagctgtagatgtcagccatgatgtagggctggaagtggtttttgttcaggctttcgtccagcacttcgggagccatgtagcgtttggtgcccaccctggtattcaagggcacatcaacttcatttgtgtcactgttgaatttaacagcaaggcccaggtcagcaatgcagcaactcccatttttcttgatgaggatgtttttgctctttaggtctcgatgagcaattgcgggctttccttgggtgccataaatttctgtgtgcaggtggcacagaccacaggcagctgaataagccaatttaagcagggctctggtgtccagtgtagcacatttcaggaagtcatagagagatccattttcatggtaatcagtaatcaaatagagctgagtccaggaacctgtacctttaatgtctgccgctatgaaaccaagtatgttttcatggcgcattagcacagtttggtagatttctgtttctcgaaaccagctggcttcttcagtggtaaagaatactttcaccgccactttttcgccacgccatttgcccatccatacttctccatatcggcctttaccaacttgccggaccatctgaatctgtttggcaatagttcgctgaaccaataaaggtagtccagacccactaccagaactttgtgactggtcaataaggtcttttagtgattctccaactggaataaatgcttcatcctgttccaaatcacgattgtaacgacgtctgcttgagatgctcttgcaataatgtttgtaacaaaagcagctggagaagatgatcatagcaattatgcagacagccatagaaatgagcaaaaccagccatcgaatgctgccatcaaaaaacggacctatgacaacagggggcagtgtgggttgcaaatactggttacataaattggtccgacaacattctattgtccggcgtagctgggcttttggagaatctttgcactgaaaatcagatccttcatatttcatacaccctgaagctaatgtggtttctccctggtcatcttcttctatgatggcaaagcaatgtccattagttatgcatgtgttattaatagcatcatctggacagtgccctgagcaatagcactttaaaaaaggcaaggtatcctctggtgctaaggttactccattttctgactttttctggtcggagtctgatttcatcccagtgccatgaagcatactatccagattctgtccttgaacacgagaaatgatgaacaaataggctcccaataatctgatgtaaatgtatagctgagtcattgttcaattgtaatgttttcctgtgtactgtcacctttaataattggtcttgctacttcaccaatttaaatgactatcattcagtgagattttcttgtaaaagatcgcaagcacttgacaatgacttcaactcccactgctttcttacgactcctccaagatgtggctagataaaactgtacttctgattttctccaaacagctttgacctatgcttccatctcatgaattccaagacagtattaaactgatgcatattttcataagtccggaccccagggaacgcatcctccagccctcggcgcggagcgggtgggcgcggcgagccgccggggcgaagtggggcccgaatcggccttcgcccttggcgtgcagcggccccgacccggtcgcccctcgatcgggccgtgcgatcttcgccgcgcgcggacggacgcgccgannnnnnnnnnnnnnnnnnnnnnnnnnnnnnnnnnnnnnnnnnnnnnnnnnnnnnnnnnnnnnnntcgccaagcccggcaggcggattccaatctctgcagcggccgccgccaccgccgccgactcaaggccaggaggggagccaacttttttgtacaaag

SEQ ID NO: 187071 - DNA, 1701 bp, Homo Sapiens
actttgtacaaaaaagttgggtgtgagtgtgcgcgctccgagtgtgtgtgtatttgtgtatcggcggtcccgcaggtcccggatgttgcggacagtatgaggcaagcgcagggggacggggaccagcagctgtcgccgccgctctcagggtgaagagggaacagaaatctttgccccctgactttggaaatctcgtttaaccttcaaactggcgatgtcaagggttccaagtcctccacctccggcagaaatgtcgagtggccccgtagctgagagttggtgctacacacagatcaaggtagtgaaattctcctacatgtggaccatcaataactttagcttttgccgggaggaaatgggtgaagtcattaaaagttctacattttcatcaggagcaaatgataaactgaaatggtgtttgcgagtaaaccccaaagggttagatgaagaaagcaaagattacctgtcactttacctgttactggtcagctgtccaaagagtgaagttcgggcaaaattcaaattctccatcctgaatgccaagggagaagaaaccaaagctatggagagtcaacgggcatataggtttgtgcaaggcaaagactggggattcaagaaattcatccgtagagattttcttttggatgaggccaacgggcttctccctgatgacaagcttaccctcttctgcgaggtgagtgttgtgcaagattctgtcaacatttctggccagaataccatgaacatggtaaaggttcctgagtgccggctggcagatgagttaggaggactgtgggagaattcccggttcacagactgctgcttgtgtgttgccggccaggaattccaggctcacaaggctatcttagcagctcgttctccggtttttagtgccatgtttgaacatgaaatggaggagagcaaaaagaatcgagttgaaatcaatgatgtggagcctgaagtttttaaggaaatgatgtgcttcatttacacggggaaggctccaaacctcgacaaaatggctgatgatttgctggcagctgctgacaagtatgccctggagcgcttaaaggtcatgtgtgaggatgccctctgcagtaacctgtccgtggagaacgctgcagaaattctcatcctggccgacctccacagtgcagatcagttgaaaactcaggcagtggatttcatcaactatcatgcttcggatgtcttggagacctctgggtggaagtcaatggtggtgtcacatccccacttggtggctgaggcataccgctctctggcttcagcacagtgcccttttctgggacccccacgcaaacgcctgaagcaatcctaagatcctgcttgttgtaagactccgtttaatttccagaagcagcagccactgttgctgccactgaccaccaggtagacagcgcaatctgtggagcttttactctgttgtgaggggaagagactgcattgtggccccagacttttaaaacagcactaaataacttgggggaaacggggggagggaaaatgaaatgaaaaccctgttgctgcgtcactgtgttccctttggcctggctgagtttgatactgtggggattcagtttatgcgctggccccgaggatatccccagcggtggtactttcggagacaccctgtctgcatctgactgagcagacaaatcgtcacgtgcctggagcaaaagg

SEQ ID NO: 187072 - DNA, 2304 bp, Homo Sapiens
  misc_feature (1396)..(1408): n is a, c, g, or t
ttgggttttctaggttgaagctgatctgggctatccaggtggaaaggcgaaagtcatccataaggaatctgatatgatcatggcattttctgttaataaggcaaattgtaatgaaattgttttggcttcaacacatgatgttcaagaacttgatgttacttctctactggcctgtcagtcatacatatggatcggagaagaatatgacagagaatccaaaagttcagatgatgttgattatcgtggttccactacaactctttatcaacccagtgcaacatcctattcagcaagtcaggtgcatccaccttcatctctgccatggctgggcactggacagactagcactggagctagtgtgcttatgaaaaggaatctacataatgttaagagaatgacttcacacccagtccatcaatactatcttacaggtgctcaggacggcagtgtacgaatgtttgaatggacgcggcctcagcaacttgtctgctttcgtcaagctggcaatgcaagagttactagattatattttaattcacaaggcaacaagtgtggtgttgcggatggagagggttttctgagtatctggcaagttaaccaaactgcatcaaatcctaaaccttatatgagttggcagtgccacagtaaagccacaagtgactttgcatttattacctcttcaagtctagttgccacatctggacactccaatgacaatagaaatgtttgcctctgggacacattaatatcacccggaaacagcctcattcatggtttcacgtgccacgatcatggtgccacggtactgcagtatgcacccaaacagcaactcctaatctcggggggtaggaaaggacacgtctgcatttttgacatcaggcaaaggcagctcattcacacgttccaggcccatgactcagctattaaggctctggccttggatccctatgaggaatattttaccacaggttcagcagaaggtaacataaaggtttggagattgacaggccatggcctaattcattcatttaaaagtgaacatgctaagcagtccatatttcgaaacattggggctggagtcatgcagattgacatcatccagggcaatcggctcttctcctgtggtgcagatggcacgctgaaaaccagggttttgcccaatgcttttaacatccctaacagaattcttgacattctataaagattggggttttatttttatatacatttcagtttaaaaggcacactacagtcatcactaggcaattctgctttctaagcagttgtattgaaaacagagaatctctgtgtagaatttgaatatgacccaagctgagtattatctaaacaggttggtggaatgaatgcgcatgtaccttattatgctgacatactnnnnnnnnnnnnncctagtattgtatgaaggatagctattctttacagcatttagcaaacctgattcagaaaacatttgagattagcaaattagtaacttgaaataatgaaaaggacgtttataccaaattaaggaagaaaatgttgctgatttgggtttttcttcctgttcttaccactgactgaagcatgcctgcagtctcctcctctgttgaatgaaggataatcataaggtgtttgttaggagcgctagaccacctggaaaactttcttagctgtggagcagtgcgcagtgaccagttctctgctgtgagaggccgtttccattctttcctgctgaatatttttcctgttagtgtttatactgagctagtactgtaacttgcaaatgagtgcaaatttaaatgcaatgttttactcacaatttgcacattcacattttttggactgctagtttttctatttaaatatttgccttcatgttaggaatgtactatgtgaacatgacatatttgtagttaaccaaacacaccttcttagtccagtttagtactttttcttttcgtgtattcaaggttaaacacccaaacatttaaggatatgttgaaactacaccaatagagcatttcatatcataattaaaatgaatgttaggcttcttgtggccagttaatagttgatgagattggtgacattatttattgccacagcctattgtataaactatgcagagttaaatatttgcttgtaaaatattagccaatgttgtcattattttgatgtatttccttggttatgaccaaaaatatgttgagatactgaaactaatgtctgtgtgtttaaatgtttaccagcaaattgtcttatcatgttaatgagaatgttcaatgcctgtgtggtaaatagtaa

SEQ ID NO: 187073 - DNA, 1684 bp, Homo Sapiens
  misc_feature (930)..(965): n is a, c, g, or t
ttggctgggtcctcgcccttgcctcagaaccgcgaagaaaggaagctcgcgtgtttgctagaaaacctagttgggagtgcgaggcagagaacgttcagcacctttgttcctcccgaaccctcgggacagaggcagggttctgagggcagggattccccctcgtcttggccccaccgcccgggctgggcactaaactcgggccgcggcggggcgagcgaggcgggctccggagggagctgacgcctgatgatggcgcagtccaacatgtttaccgtggctgatgtgttgagtcaagatgaactgcgcaaaaagctataccagacgtttaaggatcggggtatactggatacactcaagacacaacttcgaaaccagctaattcatgagttgatgcaccctgtattgagtggagaactgcagcctcggtccatttcagtagaagggagctccctcttaataggcgcctctaactctttagtggcagatcacttacaaagatgtggctatgaatattcactttctgttttctttccagaaagtggtttggcaaaagaaaaggtatttactatgcaggatctattacaactcattaaaatcaaccctacttccagtctctacaaatcactggtttcaggatctgataaagaaaatcaaaaaggttttcttatgcattttttaaaagaattggcagaatatcatcaagctaaagagagttgtaatatggaaactcagacaagttcgacatttaacagagattctctggctgagaagcttcagcttattgatgatcagtttgcagatgcttaccctcagcgtatcaagttcgaatctttagaaataaagctaaatgagtataagagagaaatagaagagcaacttcgggcagaaatgtgtcaaaagttgaagttttttaaagataccgagatagcnnnnnnnnnnnnnnnnnnnnnnnnnnnnnnnnnnnnggagttaaccatgttccagaatgattttgaaaaagcttgtcaagcaaaatctgaagctctcgttcttcgggaaaagagtacccttgaaagaattcacaagcaccaagagattgaaacaaaagaaatttatgctcaaaggcaacttttactaaaagatatggatttgctaagaggaagagaagcagagctgaagcaaagagttgaagcttttgaattgaaccagaagctccaggaagaaaaacataaaagcataactgaggcacttaggagacaggagcagaatataaagagttttgaggagacctatgaccgaaagctcaagaatgaacttctaaacttgaattagagtctgtcaaagcccagtctttggcaataacaaaacaaaaccatatgctgaatgaaaaggttaaagagatgagtgattattcactactaaaagaagagaaactggagcttctggcacaaaataaattacttaaacaacaactggaagagagtagaaatgaaaacctgcgtctcctaaaccgcctagctcagccggctcctgaacttgcagtctttcagaaagaactacggaaagccgaaaaggctatagtggttgagcatgaggagttcgaaagctgcaggcaagctctgcacaaacaactgcaagacgaaattgagcattctgcacagctgaaggcccagattctaggttacaaagcttctgtaaagagttt

SEQ ID NO: 187074 - DNA, 1241 bp, Homo Sapiens
ttggatctgtaaatcgtgtgaaagaacttgagcttgaattagagtctgtcaaagcccagtctttggcaataacaaaacaaaaccatatgctgaatgaaaaggttaaagagatgagtgattattcactactaaaagaagagaaactggagcttctggcacaaaataaattacttaaacaacaactggaagagagtagaaatgaaaacctgcgtctcctaaaccgcctagctcagccggctcctgaacttgcagtctttcagaaagaactacggaaagccgaaaaggctatagtggttgagcatgaggagttcgaaagctgcaggcaagctctgcacaaacaactgcaagacgaaattgagcattctgcacagctgaaggcccagattctaggttacaaagcttctgtaaagagtttaactactcaggttggatttaaaattgcaactgaagcaaactcagacagccctagagaatgaagtgtactgcaatccaaagcagtctgtgatcgatcgttctgtcaatggattaataaatggcaatgtggtgccttgcaatggtgagataagtggggatttcttgaacaatccttttaaacaggaaaacgttctagcacgtatggttgcatcaaggatcacaaattatccaactgcatgggtggagggtagttcccctgattctgaccttgagtttgtagccaatactaaggcaagggtcaaagagcttcagcaagaggccgaacgcttggaaaaggctttcagaagttaccatcggagagtcattaaaaactctgccaaaagcccactagcagcaaagagcccaccatctctgcacttgctggaagccttcaaaaacattacttccagttccccggaaagacatatttttggagaggacagagttgtctctgagcagcctcaagtgggcacacttgaagaaaggaatgacgtcgtggaagcactgacaggcagtgcagcctcgaggctccgcgggggcacttcctccagacgcctctcttccacaccccttccaaaagcaaaaagaagcctcgaaagtgaaatgtatctggaaggtctgggcagatcacacattgcttcccccagtccttgtcctgacagaatgcccctaccatcacccactgagtctaggcacagcctctccatccctcctgtctccagccctccggagcagaaagtgggtctttatcgaagacaaactgaacttcaagacaaaagtgaattttc

SEQ ID NO: 187075 - DNA, 1431 bp, Homo Sapiens
  misc_feature (474)..(485): n is a, c, g, or t
ggatagtgcttgtctttattccgatgcccatcttcttcagaggttaagaagaaatgacactgatgtacaaatgactcacccaagggactctcacctgactctacccttgcaggggtggaataaatcccttctattttcaagtctatttgtcccatttctgtttagacataatttgaaagccagcttggaccttgtacttttcaattatgttaacgtaaaatactcgtaacgaatgtagtatgagtttaaagtgagcttttcagatcctataagtgcatcctaagtaatgacaggctttaagataaggaatatatgcattttgttaaggcagaaatctcataaaatttcatgaaaaaccatggtcaatccaatgatgcactttttaagacaagtttgtttggaaactggaagggtcaaaagacaacaaaaaagcacacaccaaaaaacctcactttaagcaaatctataacttgnnnnnnnnnnnngcctaagaatattctgagagtggtacatagttttatagtagccacagtaacttccagtgactggcaaatttctttgcatcagctggcatgtgtggtgaatggaattcccatgaacagctcttacatccttccgctttccttctacaggcctcggtcttgtttccaaaggtgactgcagtgaggatgtaaggtccatgacctctagggataatgccatccactcaggaagaaagatgctgagaaactctagggatatctaagtttacatcacagggggagaatcaattgtggaggttttaagaagacatttgaatttttgcccctaatcaagaagtgttttgccatctggtttacattcaataactagttggctcatcatttgcagaaataaactttcctctagattaggaaacttcatcatgagatctgagatatactggtttggaaagtttcctcagtttctcttggcttcgaagtccccggcctcggagtggggtaaggcccattggaggcagatgaattggccttgggtaaggaatcttgtaatgcagtccaatttcaatcctggctgtgcattcatctatacactgtttaattaggtctgtgtccgtgagatttttgtttttccggaacagcgttctggcttcatttagtatgtactgtttttctttgatggtgtcttccatctgccctgatgtcgcctgccatttcctcgcaagcctgaaaatgctgcggtagaggccaaggacttcttgtcgtgttgccgttgtcattctgcgtcagtcctgccttcccccacccacagaagcgcgcagcccgcggcgggccgggaggaggcggcgccaggagcccagcagagccgtggccgaccgagcacaggctggtccagtaggccaggccggaccaaaccaccgggcccacctctgtgggagcaccagttccccaa

SEQ ID NO: 187076 - DNA, 1223 bp, Homo Sapiens
  misc_feature (131)..(155): n is a, c, g, or t
ttgggtctctcaaaggacagccacggcaggaactgcgtccccaccctgaatgcattggccggtgcccggctcatggtctgggggatgcaggcaggggaagggcagagatggcttctcagatatggcttgcnnnnnnnnnnnnnnnnnnnnnnnnntcaaaaattggagaaatccttaacacaattttctaaaaaataacagacatttttgttatacattagactatcagacactggacctaccttaatggttagacactttatgcaaaaaaagagaaaggtcccaggtgattttccacaaagaatgtgctaaaatgtccactgaaaacaaagccaagcctctgccctgcctctcccagctcccacaagggttccaggaattcctggtgttcccaggacaccagactgcaataactggaggcgcctccttcctgcccacccttcgctcacgccccagcgccctctctgaccagcctccgcttggtggccttcctctggccgtgtgatgaggtggttgctgtctccataggggccagctccccagggcagactcacgtgcccctctgaggctcagaaaatgcccagcccttcctcaaaatgagcagccacccatgactttgtgggctccttgttagcctgagaccaggctttgcagaggggcggggggtgaggcttagcccagaaggagaactgagcaggaaaccaaggctcttctctgtcccctgcccttcccctcctgccagggggaggctcaggttggtccccgagtgccgcctgtactcacaaaggctgcctttcctctagagtcactaattttacctgatgctatgagagaatcatattgaagatgaaatgtctaatatataatgtatattttaaagcagagactattttggtggataggtgggagggagcaaggggagtttgagggaatcagagcttgatgctactgtacagaactggacaggttgggccggcagtggtggggccagagggctctgtgctctaggagctaagccagcagcccccgagaggggacttggctgggcctttcctatgggcaagcccagtgctcttcctgcccaccagggaccatggagcagtggcaccctatggggctatgatccctatgcctgggcctgggcctgcctgtggcccagagctaccctgggagtgtcagtgctagcagcacagctacctctggtggcaggagaagagaggccc

SEQ ID NO: 187077 - DNA, 1398 bp, Homo Sapiens
ttggtaccgggagctcaggggcctgggcttgctgaggcctcgccatgcagaacattcagattcaaactgggcctgcccaagaagcagggacgcagctctctccagcttcagaacgttacagctgggaacgcagagctcatgggaaagccattctcgagggatgggccccaagcccaccccgtccgggccatgtgctgccccccaagcgtgggggacctggtgctgagtgtggttgtttggagcggggaagggaccgccagggaggcgggtcctcttgcctagactagggcactctcttgtcccatattcagggtgaagacggctttcctgggtttaaaggagacatgggcatcaagggtgatcggggggagatcggcccacccggtcccaggggagaagatggccctgaaggcccaaagggtcgcggaggtcccaatggtgaccccggtcctctgggaccccctggggagaagggaaaactcggagtcccagggttaccagggtatccaggaagacaaggaccaaagggctctattggattccctggatttcctggcgccaatggagagaagggcggcagggggacccctggaaagccaggaccgcgggggcagcgaggcccaacgggtccgaggggtgaaagaggcccccggggcatcactgggaagcctggccccaagggcaactccggaggtgacggcccagctggccctcctggtgaacggggacccaatggaccccaaggacccacaggatttcctggaccaaagggcccccctggccctccaggcaaggatggactcccaggacaccctggacagagaggcgagactggtttccaaggcaagaccggccctccaggcccccccggcgtggtcggccctcagggtcccacgggagaaacgggcccaatgggtgagcgtggccaccctgggccccctggaccccccggtgaacaggggcttccgggccttgctggaaaagaagggacgaagggtgacccaggccctgcaggcctccctgggaaagatggccctccaggattacgtggtttccctggggaccgagggcttcctggtccagtgggagctcttggactgaaaggcaatgaagggccccctggcccaccaggccctgcgggatctccaggggagagaggtccagctggagccgctgggcccatcggaattccagggagacctgggccccagggacccccagggccggcaggagagaaaggggctcctggcgagaaaggcccacaaggcccagctggccgagacggtctccaggggcctgtggggctcccgggtccagctggccctgtgggtccccctggagaaagacggagataaagggaaagatcgggggagccggggcaaaaaggatacaaggggg

SEQ ID NO: 187078 - DNA, 1675 bp, Homo Sapiens
  misc_feature (1270)..(1292): n is a, c, g, or t
ccaactttgtacaaaaaagttggggctttccttggaccccctggagaagacggagataagggagagatcggggagccggggcagaaaggaagcaagggggacaaaggagaacagggtcctcctgggcctacaggtcctcaaggccccatcggacagccaggcccctctggagctgacggcgagccggggcctcggggccagcagggccttttcgggcagaaaggtgatgaaggtcccagaggctttcctggaccccctgggccagtggggctgcagggtttgccaggacctccaggcgagaagggtgagacaggagacgtgggccagatgggccccccgggtccccctggcccccgaggaccctccggagctccaggtgctgatggcccacaaggtcccccaggtggaataggaaaccctggtgcagtgggagagaagggcgagcctggcgaagcaggtgagcctggccttccgggagaaggcggccccccgggacccaaaggagaaaggggagagaagggcgagtcaggcccttcaggtgctgccggaccccctggacccaaaggccctcccggagatgatggtcccaaaggcagccctggcccagtgggttttcctggagatcctggcccccccggagagcctggccccgcgggtcaagatggtccccctggtgacaaaggagatgatggtgaacccgggcagacgggatcccccggccctactggtgaaccaggtccatcggggcctccaggaaaaaggggtcccccaggccccgcaggccccgaaggcagacagggagagaaaggggccaagggagaagccggcttggaaggccctcctgggaagactggccccatcggcccccagggggcccctgggaagcccggaccggatggccttcgagggatccctggccctgtgggagaacaaggtctcccaggatccccaggcccggacggtccccccggccccatgggtcccccaggacttcccggcctcaaaggagattctggtcccaaaggtgaaaagggtcatccaggcctgatcgggctcatcggtcctccgggtgaacagggtgagaagggcgaccgtggtctccctggcccccagggctcctccggtcctaagggagaacagggtatcactggtccttctggcccgattgggcctcctgggccccctggcctgccgggtccgcctggtccaaaaggtgctaagggctcctcgggtccaactggcccgaagggtgaggcaggccacccaggannnnnnnnnnnnnnnnnnnnnnngggagaggtcatccagcccctgccaatccaggcatccaggacgcggcggaacatcgacgccagccagctgctggacgacgggaatggcgagaactacgtggactacacggacggcatggaagagatcttcggctctctcaactctctgaagctggagattgagcagatgaaacggcccctgggcacgcagcagaaccccgcccacacctgcaaggacctgcagctctgccaccccgacttcccagatggtgaatactgggtcgatcctaaccaaggatgctccagggataccttcaaggtttactgcaacttctcagctggggggtcgacatgcgtcttccctgacaagaagtccgaatggagccagaatcacttcttggccc

SEQ ID NO: 187079 - DNA, 1197 bp, Homo Sapiens
tccaggaaaacccactgggccagggctgcttttgagaccatcatctccgagagggttttgggtccagagagtccggcagcacgtgaagggcttgactcgcccttctctcccctttctcctttgggtcccggaaggccgccttctcccggaaggccaggctcacctgcttcgccaggctcgcccttctctcccactgcaccagggtttcctattccacctgggggaccttgtgggccatcagcacctggagctccggagggtcctcgggggccagggggacccggggggcccatctggcccacgtctcctgtctcacccttctcgcctggaggtcctggcaaaccctgcagccccactggcccagggggtccaggaaagcctctgggaccttcatcacctttctgcccgaaaaggccctgctggccccgaggccccggctcgccgtcagctccagaggggcctggctgtccgatggggccttgaggacctgtaggcccaggaggaccctgttctcctttgtcccccttgcttcctttctgccccggctccccgatctctcccttatctccgtcttctccagggggacccacagggccagctggacccgggagccccacaggcccctggagaccgtctcggccagctgggccttgtgggcctttctcgccaggagcccctttctctcctgccggccctgggggtccctggggcccaggtctccctggaattccgatgggcccagcggctccagctggacctctctcccctggagatcccgcagggcctggtgggccagggggcccttcattgcctttctccaagagctcccactggaccaggaagccctcggtccccagggaaaccacgtaatcctggagggccatctttcccagggaggcctgcagggcctgggtcacccttcgtcccttcttttccagcaaggcccggaagcccctgttcaccggggggtccagggggcccagggtggccacgctcacccattgggcccgtttctcccgtgggaccctgagggccgaccacgccgggggggcctggagggccggtcttgccttggaaaccctttagggagctgggccaaatttcgaagggctgatggggccaggaaaatgatcccatttctgatgagggctttttctcccaactgaaaacactggagtcctttcaggttgcagccaa

SEQ ID NO: 187080 - DNA, 660 bp, Homo Sapiens
  misc_feature (514)..(553): n is a, c, g, or t
aactttgtacaaaaaagttggcaggacaatgtggatgggcacagctccagcgaggacgccggcgcctgcatgcacctggtgatctggaaggttcgagaagacgccaagaccaagcgatgacgcctgcccgcctcccacccgcctctcctgccgtcccgctggtccttagccccatgcctcttccaaaacagtgcaataaatctccggtaacccgtccacctggccgaggcagcccagagcagcgggatgagctggcggccagagaacgcccagcccagcccacccccgctcacgtcctgccgcacccctccgccggtccccaccctctgccccccatccctctggcgtctctagaaactgctgctgatggagaccaggacagagcccgcccccacccggcccgcaccccctcatgcccctcctgccaggccctccctcccgggtggtggccggcacctctgctcctcacgtgggtcgcggggcgggcttgtcccaggtttgtttgaaaaagtcnnnnnnnnnnnnnnnnnnnnnnnnnnnnnnnnnnnnnnnnaaacctgatgacttgaacagcatctttcccaccgggaagaacgggcctgctgccttccctcctgcggggagggggtgggacagaccccattgggggccagggccaca

SEQ ID NO: 187081 - DNA, 840 bp, Homo Sapiens
  misc_feature (518)..(574): n is a, c, g, or t
  misc_feature (648)..(688): n is a, c, g, or t
  misc_feature (753)..(762): n is a, c, g, or t
ttggcatcggacacagcctggagagcgacctcctggccctgaaggtcatccacagcaccgtggtggacacgtctgtgctcttcccccaccgcctgggcctcccctacaagcggtccctgcggaacctcatggccgactacctcagacagatcatccaggacaatgtggatgggcacagctccagcgaggacgccggcgcctgcatgcacctggtgatctggaaggttcgagaagacgccaagaccaagcgatgacgcctgcccgcctcccacccgcctctcctgccgtcccgctggtccttagccccatgcctcttccaaaacagtgcaataaatctccggtaacccgtccacctggccgaggcagcccagagcagcgggatgagctggcggccagagaacgcccagcccagcccacccccgctcacgtcctgccgcacccctccgccggtccccaccctctgccccccagccctctggcgtctctagaaactgctgctgatggagaccaggacagannnnnnnnnnnnnnnnnnnnnnnnnnnnnnnnnnnnnnnnnnnnnnnnnnnnnnnnngggtggtggccggcacctctgctcctcacgtgggtcgcggggcgggcttgtcccaggtttgtttgagacagtcnnnnnnnnnnnnnnnnnnnnnnnnnnnnnnnnnnnnnnnnnaacctgatgacttgcacagcatctttcccaccgggaagagcgggcctgctgccttccctcctgcnnnnnnnnnntgggacagaccccagtgggggccagggccacactcagcgcactgtgggctggacccgcctctgtgctccaggggctgg

SEQ ID NO: 187082 - DNA, 1341 bp, Homo Sapiens
cctttaagccaactttgtacaaaaaagttgggaggtgaggaggtttcgacatggcggtgcagccgaaggagacgctgcagttggagagcgcggccgaggtcggcttcgtgcgcttctttcagggcatgccggagaagccgaccaccacagtgcgccttttcgaccggggcgacttctatacggcgcacggcgaggacgcgctgctggccgcccgggaggtgttcaagacccagggggtgatcaagtacatggggccggcaggagcaaagaatctgcagagtgttgtgcttagtaaaatgaattttgaatcttttgtaaaagatcttcttctggttcgtcagtatagagttgaagtttataagaatagagctggaaataaggcatccaaggagaatgattggtatttggcatataaggcttctcctggcaatctctctcagtttgaagacattctctttggtaacaatgatatgtcagcttccattggtgttgtgggtgttaaaatgtccgcagttgatggccagagacaggttggagttgggtatgtggattccatacagaggaaactaggactgtgtgaattccctgataatgatcagttctccaatcttgaggctctcctcatccagattggaccaaaggaatgtgttttacccggaggagagactgctggagacatggggaaactgagacagataattcaaagaggaggaattctgatcacagaaagaaaaaaagctgacttttccacaaaagacatttatcaggacctcaaccggttgttgaaaggcaaaaagggagagcagatgaatagtgctgtattgccagaaatggagaatcaggttgcagtttcatcactgtctgcggtaatcaagtttttagaactcttatcagatgattccaactttggacagtttgaactgactacttttgacttcagccagtatatgaaattggatattgcagcagtcagagcccttaacctttttcagggttctgttgaagataccactggctctcagtctctggctgccttgctgaataagtgtaaaacccctcaaggacaaagacttgttaaccagtggattaagcagcctctcatggataagaacagaatagaggagagattgaatttagtggaagcttttgtagaagatgcagaattgaggcagactttacaagaagatttacttcgtcgattcccagatcttaaccgacttgccaagaagtttcaaagacaagcagcaaacttacaagattgttaccgactctatcagggtataaatcaactacctaatgttatacaggctctggaaaaacatgaaggaaaacaccagaaat

SEQ ID NO: 187083 - DNA, 1524 bp, Homo Sapiens
  misc_feature (746)..(755): n is a, c, g, or t
  misc_feature (971)..(1014): n is a, c, g, or t
ttggccccttttcaaatccacagcagactgtccagatgctgtgccttcctccgctgaaacagggggaacgaattatctggcccctggggggctttcagattcccaacttcttctggagcctggggatcggtcacactggtgcgtggtggcatactgggaggagaagacgagagtggggaggctctactgtgtccaggagccctctctggatatcttctatgatctacctcaggggaatggcttttgcctcggacagctcaattcggacaacaagagtcagctggtgcagaaggtgcggagcaaaatcggctgcggcatccagctgacgcgggaggtggatggtgtgtgggtgtacaaccgcagcagttaccccatcttcatcaagtccgccacactggacaacccggactccaggacgctgttggtacacaaggtgttccccggtttctccatcaaggctttcgactacgagaaggcgtacagcctgcagcggcccaatgaccacgagtttatgcagcagccgtggacgggctttaccgtgcagatcagctttgtgaagggctggggccagtgctacacccgccagttcatcagcagctgcccgtgctggctagaggtcatcttcaacagccggtagccgcgtgcggaggggacagagcgtgagctgagcaggccacacttcaaactactttgctgctaatattttcctcctgagtgcttgcttttcatgcaaactctttggtcgnnnnnnnnnngtttgttggttggttttcttcttctcgtcctcgtttgtgttctgttttgtttcgctctttgagaaatagcttatgaaaagaattgttgggggtttttttggaagaaggggcaggtatgatcggcaggacaccctgataggaagaggggaagcagaaatccaagcaccaccaaacacagtgtatgaaggggggcggtcatcatttcacttgtcaggnnnnnnnnnnnnnnnnnnnnnnnnnnnnnnnnnnnnnnnnnnnncaggagcggcagatggggagacaacgtgctctttgttttgtgtctcttatggatgtccccagcagagaggtttgcagtcccaagcggtgtctctcctgccccttggacacgctcagtggggcagaggcagtacctgggcaagctggcggctggggtcccagcagctgccaggagcacggctctgtccccagcctgggaaagcccctgcccctcctctccctcatcaaggacacgggcctgtccacaggcttctgagcagcgagcctgctagtggccgaaccagaaccaattattttcatccttgtcttattcccttcctgccagcccctgccattgtagcgtctttcttttttggccatctgctcctggatctccctgagatgggcttcccaagggctgccggggcagccccctcacagtattgctcacccagtgccctctcccctcagcctctcccctgcctgccctggtgacatcagtttttcccggacttagaaaaccagctcagca

SEQ ID NO: 187084 - DNA, 1470 bp, Homo Sapiens
ttggtgaatgttaggtctggtggcggtcaatgcgcttccggacccgggatcagagtgtgtggatcgctatagggggaggggagctcaggtatcaccatggcaacagccagccctccggactcgtgacgtcacccttctgatttcgcgcttagaggcctctgcaggagaaagctggggagtcctcgaagggggcgcacctcgcctccttctgtgcggggcggtcccgccctgatcccttggagggctttgttcttttgttctggcctaaggggaagtcgggtgccgggccccgccttgcttgtccaccttccagctttaacgctctgcaacagggtagacaacctcagcgtgttgcagattccctgcaaggggagttagacatctgagtcctagaccgagataccagctgaaggaacgctgcctggcgaaccctggtgttcaagttccagaggaacgggatgagctcctgagatggaagatctgtcctctccagactccacccttctccaagggggacataatctactctcatcagccagttttcaggaatcggtgactttcaaggatgtgatagtggactttacccaggaagaatggaaacagctggaccctggccagagagatttgttcagggatgtgacattggaaaattatacacacctggtctctataggactccaagtttctaaacctgatgtgatttcccagttagagcaagggacagagccatggatcatggagccaagcattccagtaggtacctgtgcagactgggagacaagacttgaaaatagtgtgtcagccccagagcctgacatttctgaagaagagctatctccagaggtaatagtggaaaaacacaaaagagatgattcttggagttccaacttgctagaaagttgggaatatgaaggcagtttagagagacagcaggcaaaccaacagacactgccaaaggaaataaaggtaaccgaaaagacaatacccagttgggaaaaaggccctgtaaataatgaatttgggaaaagtgtcaatgtgagttcaaaccttgtaacacaagaaccatctccagaagagacctctactaaaagaagcatcaaacagaattcaaacccagttaaaaaagagaaatcttgtaagtgcaatgaatgtgggaaagcctttagttattgttcagctcttattcgccatcagagaacacatactggagaaaaaccctacaaatgtaatgaatgtgaaaaagccttcagccggagtgaaaaccttataaaccatcaaagaattcatactggagataaaccatataaatgtgatcagtgtggaaaaacttcattgagggtccatctcttactcaacatcaaagaattcatactggagaaaaccatataaatgtgatgaatgtgggaaagcctttagtcagaggacccatcttgttcagcatcagagaattcatactggcgagaagccata

SEQ ID NO: 187085 - DNA, 651 bp, Homo Sapiens
ctttgtacaaaaaagttgggtcattgtattgattaatgacaaaaccctttagataattatcttccattttaaataaaattttatttcacaaatatgagccaagaaagaggaaagttgatttgaagtgaggattagaagtgaatgacaataaagtctggcagccaagcacgaaccaagactggcactatttttcttagtgtatataattgtttaaactgcaaggttgacatttattgtgttgtgtctaagttaatttcaatctaatgtacctgattctagcctctgtgaacaacaagaatatgtttgtgtatgttcacatggtgcttataatatttcactatcaattcaattaattcacataaattccatgtgaaatgtattcaacaatggaatattttctaaaacatttagtatacatttgaatgtattttaaaccatgccaaactactgctttaatgtcaagtttgcagaattgtctctgaaaataaaaaccctgactttagttgtaaaacaataaaagttagctacttggtatacggagatgttaatttgggatatggaggcatttttatcttctgtcactactacttaaaactctgatgattatgttagatttttttgctaactaataaagatttcaaatggcaattt

SEQ ID NO: 187086 - DNA, 2288 bp, Homo Sapiens
ttggggcccgtacgcgcccgcctgactgtcgccagcagctcctcggcggccccaccgcagccgccgctccctgaggcgcgggaggcccgcgccccgcggctcgctgtgcgtgggagggcgcgagcgaacgcgggcgaggagcggccgagccgctgaagaggagctgggcgccggccgcccggccgcgctcggcccgcggatcgcctccgcccggtcttcgccggccccggcccctggcgagatgccgtgtggggaggattggctcagccacccgctgggaatcgtgcagggattcttcgcccaaaatggagttaatcctgactgggagaagaaagtaattgagtattttaaggaaaagctgaaggaaaataatgctcctaagtgggtaccatcactgaacgaagttccccttcattatttgaaacctaatagttttgtgaaatttcgttgcatgattcaggatatgtttgaccctgagttttacatgggagtttatgaaacggttaaccaaaacacaaaagcacatgttcttcattttggaaaatatagagatgtagcagagtgtgggcctcaacaagaacttgatttaaactctccacgaaataccactttggaaagacagactttctattgtgttccggtgcctggggaatctacgtgggtaaaagaagcctatgttaatgcaaaccaagctcgagtcagtccctcaacatcctacactcctagtcgccacaagaggagttatgaagatgatgacgatatggacctacagcccaataagcagaaagaccaacatgcaggtgccagacaagcagggagtgttggtggtcttcaatggtgtggagagccaaaacgtttagaaactgaagcttctactgggcaacagctgaactctctgaacttgtcttctccttttgatttgaattttccattgccaggagagaagggccctgcatgccttgtgaaggtttatgaagattgggattgtttcaaagtaaatgacattcttgagctatatggcatactgtctgtggatcctgtgctgagtatactgaataatgatgaaagggatgcctctgcactgctggatccgatggagtgcacagacacagcagaggagcagagagtacacagtcctcctgcttcattagtgccgagaattcatgtgatcttagcccagaagttgcaacacatcaacccattattgcctgcctgccttaacaaagaggagagcaaaacctttgtttcaagtttcatgtccgaattgtctccagtcagagcagaacttcttgggttccttactcatgcccttctgggggatagtttggctgctgaataccttatattacatctcatctccacagtatatacaagaagagatgtccttccactaggaaaatttacagttaacttgagtggttgcccacggaatagtaccttcacagaacacttgtatcgaattattcaacatcttgttccagcatcttttcgtctgcagatgactatagagaacatgaaccatttgaaattcattccccacaaagactacacagccaatcgcttggtcagtgggctcctccagctgcccagcaatacttcccttgtaatcgatgagactctcctggaacaggggcagctggataccccaggtgttcataatgtgacagccctgagcaacctcataacgtggcagaaggtggattatgacttcagctaccatcagatggaattcccctgcaatattaacgttttcattacttcggaggggaggtcactcctcccggcagactgccagattcacttacagccccagctaattccaccaaacatggaggagtacatgaacagccttctctcagcggtgctgccttccgtgctgaacaaattccgcatttatctaactcttttgagattcttggaatatagcatatctgatgaaataaccaaggcagttgaagatgactttgtggaaatgcggaagaacgaccctcagagcatcactgctgatgatcttcaccagctgctcgtggtggctcggtgtctgtctctcagtgctggtcagacaacgctgtcaagagaacgatggctgagagcaaagcagctagagtctttaagaagaacgaggcttcagcagcaaaatgtgtgaatggaaatgaactttaaagatgtatacctatgaagagtaatgggcaaactgtagccacataattgtaaaattcagatattcatttataccacattgttttataggtaatttctatcacaaaccagtgacatttcctgaaatc

SEQ ID NO: 187087 - DNA, 965 bp, Homo Sapiens
tttgtacaaaaaagttggcttttcgtctgcagatgactatagagaacatgaaccatttgaaattcattccccacaaagactacacagccaatcgcttggtcagtgggctcctccagctgcccagcaatacttcccttgtaatcgatgagactctcctggaacaggggcagctggataccccaggtgttcataatgtgacagccctgagcaacctcataacgtggcaaaaggtggattatgacttcagctaccatcagatggaattcccctgcaatattaacgttttcattacttcggaggggaggtcactcctcccggcagactgccagattcacttacagccccagctaattccaccaaacatggaggagtacatgaacagccttctctcagcggtgctgccttccgtgctgaacaaattccgcatttatctaactcttttgagattcttggaatatagcatatctgatgaaataaccaaggcagttgaagatgactttgtggaaatgcggaagaacgaccctcagagcatcactgctgatgatcttcaccagctgctcgtggtggctcggtgtctgtctctcagtgctggtcagacaacgctgtcaagagaacgatggctgagagcaaagcagctagagtctttaagaagaacgaggcttcagcagcaaaaatgtgtgaatggaaatgaactttaaagatgtaatacctatgaagagtaatgggcaaactgtagccacataattgtaaaattcagatattcatttataccacattgttttataggtaatttctatcacaaaccagtgacatttcctgaaatcaagcctggtaacacctgatgtttatatgatattcagtaaggacttttaccttactgatttcatggagcttttgaagtttgttttataatattatataaattagtaatgatgtaaaaaagtattgatattaaaagtttatat

SEQ ID NO: 187088 - DNA, 1134 bp, Homo Sapiens
  misc_feature (90)..(137): n is a, c, g, or t
ttgggttgaatgtaagatggcgcccagggagctgtgaggagaaaaccctgtcggtcttggagcgacgacggcagaaccagggtccctggnnnnnnnnnnnnnnnnnnnnnnnnnnnnnnnnnnnnnnnnnnnnnnnnagtgacgtcgccgggaaccctaaggactctgcaatatgaataattccctagagaacaccatctcctttgaagagtacatccgagtaaaggcacggtctgtcccgcaacacaggatgaaggaatttctggactcactggcctctaaggggccagaagcccttcaggagttccagcagacagccaccactaccatggtgtaccaacagggtgggaactgcatatacacagacagcactgaagtggctgggtctttgcttgaacttgcctgtccagtcaccaccagtgttcagccacaaacccagcaagaacagcagatccaggttcagcagccgcagcaggttcaggtccaggtgcaggtacagcagtctccgcaacaggtctcggctcagctctccccacaactcaccgttcaccagcctactgagcaacccatccaggtccaggtgcagatccaaggccaggcaccacagtcagcagccccctccattcagaccccgtctctgcagagtcccagtccctcgcagctgcaagcagctcagatccaggtgcagcacgtgcaagcagcccagcagatccaggctgcagaaatcccggaggagcacatcccacatcagcaaatccaggctcagctggtggctggccagtctcttgctggtggtcagcagatccaaatccagaccgtgggtgccctttccccaccaccatcccagcaaggctcaccccgggaaggggagcggcgggttggcacggccagtgtcctccaaccagtgaagaagcgcaaagtggacatgcccatcactgtgtcctacgccatctcagggcagccggtggccaccgtgctggccattccacagggccagcagcagagttatgtgtctttgaggccagacttactgacagtagacagtgcccacctgtacagtgccactgggaccattactagccctacaggagaaacctggaccatccctgatttattctgcccagccccgggggg

SEQ ID NO: 187089 - DNA, 958 bp, Homo Sapiens
ttggcgtttaaatccgtgccggaggcgcgtcctgcatcgtctgccgctttggtgacttctgacagctctctccatggaaggaggcggcggccgcgatgagccttcagcctgccgggcaggggacgtgaacatggatgaccctaagaaggaagacattcttcttttggccgatgaaaaatttgacttcgatctttcattgtcttcttcgagtgcaaatgaagatgatgaagtcttcttcggaccctttggacataaagaaagatgtattgctgccagcttggaattaaataatccggttcccgaacagcctccgttgcccacatctgagagtccctttgcctggagccctctggccggggagaagttcgtggaggtgtacaaagaagctcacttactggctttacacattgagagcagcagccggaaccaggcagcccaagctgccaagcctgaagaccctcggagccagggcgtggaaagattcatacaggagtcaaaattaaaaataaacctctttgagaaagaaaaggaaatgaagaaaagccccacgtctcttaaaagggagacatactacctgtcagacagccccttgctggggccccctgtgggtgagcctcggctcttggcctcctccccggccctgcccagctctggtgcccaggcccgcctcacccgggcgccggggcctccgcactctgctcatgctttgcccagggaatcatgcactgctcatgctgcaagtcaggcagcgactcagaggaagcccgggaccaaattgctgctgcctcgagcggcctctgttagaggaagaagcatccctggggctgcggagaagcccaagaaagagattccagctagtccttccaggacaaaaatcccagctgagaaggaatcccaccgggatgttctccctgacaaacctgccccgggtgctgtcaatgtgccggccgccggaagc

SEQ ID NO: 187090 - DNA, 1913 bp, Homo Sapiens
ttggtgtgaggctgcggaccgggagcagcggccgcaggcgccatggctgcggagcggacccggccgctgcaaggctctggcggtccgagcgtgcctagtagctgtgaacccggcgcgaggtcccgggccccggggcgctcgctcaggtaaatttttccataaccttatggagagaaaggactttgagacatggcttgataacatttctgttacatttctttctctgacggacttgcagaaaaatgaaactctggatcacctgattagtctgagtggggcagtccagctcaggcatctctccaataacctagagactctcctcaagcgggacttcctcaaactccttcccctggagctcagtttttatttgttaaaatggctcgatcctcagactttactcacatgctgcctcgtctctaaacagtggaataaggtgataagtgcctgtacagaggtgtggcagactgcatgtaaaaatttgggctggcagatagatgattctgttcaggacgctttgcactggaagaaggtttatttgaaggctattttgagaatgaagcaactggaggaccatgaagcctttgaaacctcgtcattaattggacacagtgccagagtgtatgcactttactacaaagatggacttctctgtacagggtcagatgacttgtctgcaaagctgtgggatgtgagcacagggcagtgcgtttatggcatccagacccacacttgtgcagcggtgaagtttgatgaacagaagcttgtgacaggctcctttgacaacactgtggcttgctgggaatggagttccggagccaggacccagcactttcgggggcacacgggggcggtatttagcgtggactacaatgatgaactggatatcttggtgagcggctctgcagacttcactgtgaaagtatgggctttatctgctgggacatgcctgaacacactcaccgggcacacggaatgggtcaccaaggtagttttgcagaagtgcaaagtcaagtctctcttgcacagtcctggagactacatcctcttaagtgcagacaaatatgagattaagatttggccaattgggagagaaatcaactgtaagtgcttaaagacattgtctgtctctgaggatagaagtatctgcctgcagccaagacttcattttgatggcaaatacattgtctgtagttcagcacttggtctctaccagtgggactttgccagttatgatattctcagggtcatcaagactcctgagatagcaaacttggccttgcttggctttggagatatctttgccctgctgtttgacaaccgctacctgtacatcatggacttgcggacagagagcctgattagtcgctggcctctgccagagtacaggaaatcaaagagaggctcaagcttcctggcaggcgaagcatcctggctgaatggactggatgggcacaatgacacgggcttggtctttgccaccagcatgcctgaccacagtattcacctggtgttgtggaaggagcacggctgacaccatgagccaccaccgctgactgactttgggtgccggggctgcgggttttgggtgcaacctctgcggcagccgactgcatgaaccaaagttctcacctaatggtatcatcacgcagtgcacaatcatttatctatgttttgccaggggccagggctcggggtgggggagggcttgttttattgacatacaacgcagcatgctaatggggtacaccattgacttcatttgtacttagttatgttggtcagtgttagaggatgcattttgggttcatctttcttgagtggagtattggttttaagtaaagaaagttaaatgatccattaatctgctaattggttgcctatgaaatcacattgtctgttattaaggcttttta

SEQ ID NO: 187091 - DNA, 1132 bp, Homo Sapiens
ttggattttaatatgcccagtgtggataaaatgtcacatttctgtaacttttgactaaagagcctatatttatctagttaatgaatttaaaggatctatctttcccttcataaaatacctcttatttccattaaagccccccaagtttaattaatttaggattttgaatgattattgacatccaatagttatttttaatatttgtattcttgttatttctggaagaaagcctttgtgtagcacttggtattttgcaaagtgcttttaaaacattcttacttaccgtatttcatagaagggaaggaaaaatgtaaggtttaacagtaagcacttgcattgaacatggaggcatgtggtatcatgatattcttcactaaatttagctgtccctaatcacagatcctaaggtaatataatataattttagtgcatttctcctcatcaggaatgctggaggtgcattttaagttttaataataagtgctagaatgaccaaattgcagactaattgtttccatattgtacttaaaatgagtttttaaaagtgaaaaagaaatgactatatacaatcaatgctatttattgtacctctgggcctactcttctaaaaattgtagcttatcgatttttctctgtcaagcttgaactaatgtaaataattgaaataatgtaaagttatattttcatgtttttatagatacaacatgacaagaatacataatgtaagagtatttcaactatggataatgttgattggataatgcacatctcagttacaagcagtactcatagtttaatatccatgtaacggtgcatcaatatattgctatataaatatgtctgtgtgcatataagtgaaaagtggtcaaacaagagtgatgacagctgtctaaaggtttttttattcattttatataaaaactgttatggaaagaccaaaatgtttatgaactattcttatgtaaatttacaattgtcctttactgtacttttttgtttacagtatagtaccttattttctgctgtgttaagtgggtgtcaaactcccagaagacatacactttctataacttctattgaagatattggaaattttcaatttttcatgtgtactatgtcagaaaatgctttc

SEQ ID NO: 187092 - DNA, 1069 bp, Homo Sapiens
tacaaaaaggcaggcctgtggtcagctgttagatgaggcacaagtgactttatccttccaagactggctggccagtgtcacagaacgcatccatcaaaccatgcactatcagtttgatggcaaaccagaaccattggtgttccacattcctcagtcattttttgatgccctgcaacaaagaatatctataggaagtgcaaaaaaacggctccccaactccaccacagatgcccttggaaatcacccgtagctttatccagaaccgagatgggacttatgagctatttaaatgccctaaagtggaagtagaaagcatagcagaaacctacggtcgtatagaaaaacaaccagtgctgcgacccttggaactaaaaacttttctcaaagttggcaacacttccccagatcaaaaggagccaacacctttcatcatcgagtggatcccagatatccttccccaatctaagattggcgagctgcggatcaagtttgagtatggccaccaccggaatgggcatgtggcggagtaccaagaccagcggccccccttggaccagcccttggaactggcccctctgaccactattactttcccttaaagcaaaacaagataataatcttttgctgcttaatttgcacatccccaccccttgacaactttaaatgctagttaggcacttagatggccctgttccttggtaaactgctcttagctaagatgcaaattctcagtgctttcaagtggattctgttgaagaaaatctcttgtaaatagcctttttgatgctgctgtgtacagtcttcattatgcattgggcagtatttctggctagagttttaaaaggaacagaaagaaaaccagcttattttccttcttacggactcatctttagcgtttatttcaaccttttgctaattctctgagaaatctgcagcactcagccatacaccaacagtgttggaaagttaacacccatggttagggcagaatgttaaagaccatcttggcagagttccagccacgctctttattctgttctcaaataaagcagtgtcactagtttttcct

SEQ ID NO: 187093 - DNA, 2368 bp, Homo Sapiens
  misc_feature (1959)..(1995): n is a, c, g, or t
  misc_feature (2049)..(2062): n is a, c, g, or t
  misc_feature (2218)..(2226): n is a, c, g, or t
ttggctggaaacaataaacttggaggacaggacttcaatcagagattgcttcagtacttatataaacagatctatcaaacatatggcttcgtgccctctaggaaagaggaaatccacagattgagacaagctgtggaaatggtcaaattaaatctgactcttcatcaatctgctcagttgtcagtattactaacggtggaggagcaggacaggaaggaacctcacagtagtgacactgaactgccaaaagacaaactttcctcagcagatgaccatcgcgtgaacagtgggtttggacgtggcctttctgataagaaaagtggagaaagtcaggttttatttgaaacagaaatatcacggaaactctttgatacccttaatgaagacctctttcagaaaatactggtacccattcagcaagtattgaaagaaggccacctggaaaagactgagattgatgaggtggttttagttgggggctccactcgtattcctcggatccgtcaagtcattcaagagttctttggaaaagatcccaacacatctgtagaccctgacctagcagtagtaacgggagtggctatccaagcagggattgatggaggctcttggcctctccaagtcagtgctttagaaattcccaataagcatttacaaaaaaccaacttcaactgaattctgcagaaataatggttatttgtgaacttgtctgatgatctcttcccatttatcagattaccttttccacaaaagaaagtctctaaaatatcacagatttacctagagggcaacatttagatacaggaaaattttacatagtgttttgtcttaggattagacgtgaccagattgatcctgtttgattttggagagatcctattctaacaaatactctaaaatgataaaattgaggtacaactctcttaaaagagtatggataactatattttctggattctggaggttgataaccatatgcacttaacattatattctataaacattaagtagtgccagttatgagattcccagttcttactaaattgtattagcaggagctggtaattacttgtattatcacatgtaactaataatttgaactatacttgaaggaccgtgttgatgtcaggtatttacagtggttggaagatagcagtattattagcataagctgcatacgtaatattcagtaactgccatattatataacaaatttacattcacaaattcagtatcctgttaagtgtcatattcttgtaatctgcattctccaggagttttatgtgtttaatagatgaatttattttatttctaaaggtattcaaatgtttcagcaccatatagtagaaatacccaattatattctagttcctttatgtcctgtacatcattctctgcttggatttccattattctgtttggttagagaataaaattggtaattgcatttgaagaatgtgttaatgtcataataaagccatgattgctatcttatttttgttatccaagacctttgcaaacattggcaaatagcatcaattacctactgtatttgtttctttgtttatattttcagtaagccctggggaatatagcatggaattgagctactaaatggttttggttccgttttacggagatttttcctcatatttagttttgaatgaggaaaatgtgctcaattataaaagctgtgttattgttttctattattatttttaaataatcacacttggactcttttcaaacattaggttagtttgtaatgaaagcaaaaaatttgtgaatactggaagtaacgtggaaatctaatgtggaagccattgtggcaaggtttctacaaatcggcatttggagcagagttgtttgtttttgttgtttgtttcctttaagaaaaaccacagggaccaagaaagaaaatataacagtttgatttctgtcatacccattgtatttgannnnnnnnnnnnnnnnnnnnnnnnnnnnnnnnnnnnntttccttaatagaggaatgcttcatattattcaaaaattatatcctgatcaccnnnnnnnnnnnnnnattgtaaagtatctctgctttatccattgctgaattcgataggatgttgaaatgctggtcaccaaaaaaggaaactgagcaaattcatttcaacaacatcaaaacttcagcttctcatagtaaaaagctgaatgttactaatatttttcatatctnnnnnnnnnttcttagcaatgaaattgctgttaaaacacaaatttcaatcaaatacttttgtgtatagaaaatatgtatagtacgtagatagaaaggtataaaaatgtttgttgaagtatcttattttagaatgaatggagaaatgccaaa

SEQ ID NO: 187094 - DNA, 1040 bp, Homo Sapiens
ttggctaaaaagaaagtacgaattaaagaccgcaataaactttctacagaggaacgccggaagttgtttgagcaagaggtggctcaacgggaggctcagaaacaacagcaacagatgcagaacctgggaatgacatcaccactgccctatgactctcttggttataatgccccgcatcatccctttgctggttacccaccaggttatcccatgcaggcctatgtggatcccagcaaccctaatgctggaaaggtgctcctgcccacacccagcatggacccagtgtgttctcctgctccttatgatcatgctcagcccttggtgggacattctacagaacccctttctgcccctccaccagtaccagtggtgccacatgtggcagctcctgtggaagtttccagttcccagtatgtggcccagagtgatggtgtagtacaccaagactccagcgttgctgtcttgccagtgccggcccccggcccagttcagggacagaattatagtgtttgggattcaaaccaacagtctgtcagtgtacagcagcagtactctcctgcacagtctcaagcaaccatatattatcaaggacagacatgtccaacagtctatggtgtgacatcaccttattcacagacaactccaccaattgtacagagttatgcccagccaagtcttcagtatatccaggggcaacagattttcacagctcatccacaaggagtggtggtacagccagccgcagcagtgactacaatagttgcaccagggcagcctcagcccttgcagccatctgaaatggttgtgacaaataatctcttggatctgccgcccccctctcctcccaaaccaaaaaccattgtcttacctcccaactggaagacagctcgagatccagaaggaagatttattactaccatgtgatcacaaggcagactcagtgggatcctcctacttggggaaagcccaggagatgatgccagccttgagcatgaagctgagatggacctggggaactccaacatatgatgaaaacccca

SEQ ID NO: 187095 - DNA, 975 bp, Homo Sapiens
ctttgtacaaaaaagttggcccaaaccaaaaaccattgtcttacctcccaactggaagacagctcgagatccagaagggaagatttattactaccatgtgatcacaaggcagactcagtgggatcctcctacttgggaaagcccaggagatgatgccagccttgagcatgaagctgagatggacctgggaactccaacatatgatgaaaaccccatgaaggcctcgaaaaagcccaagacagcagaagcagacacctccagtgaactagcaaagaaaagcaaagaagtattcagaaaagagatgtcccagttcatcgtccagtgcctgaacccttaccggaaacctgactgcaaagtgggaagaattaccacaactgaagactttaaacatctggctcgcaagctgactcacggtgttatgaataaggagctgaagtactgtaagaatcctgaggacctggagtgcaatgagaatgtgaaacacaaaaccaaggagtacattaagaagtacatgcagaagtttggggctgtttacaaacccaaagaggacactgaattaaagtgactgttgggccagggtgggaggatgggtggtcaggtaagacagactctagggagaggaaatcctgtgggcctttctgtcccacccctgtcagcactgtgctactgatgatacatcaccctggggaattcaaccctgcagatgtcaactgaaggccacaaaaatgaactccatcaacaagtgattacctagttgtgagctgttggcatgtggttagaagccatcagaggtgcaagggcttagaaaagaccctgggccagacctgactccactcttaaacctgggtcttctcctttggcggtgctgtcagcgcacagacccatgcgcattccccacccacaaccctttaccctggatgatctgtattatattttaatgtatatgtggaatatattggaaaataatttgttttt

SEQ ID NO: 187096 - DNA, 2209 bp, Homo Sapiens
  misc_feature (269)..(297): n is a, c, g, or t
  misc_feature (974)..(1014): n is a, c, g, or t
ttggttccctttatagcaccattgaatcccagtcctaacagaagtactgcgaatcttgtggcctcattctgaacaaaagggattagagaagaaaaatctcttgatataaggcttgaaagcaagggcaggcaatcttggttgtgaatattttctgatttttccagaaatcaagcagaagattgagctgctgatgtcagttaactctgagaagtcgtcctcttcagaaaggccggagcctcaacagaaagctcctttagttcctcctcctnnnnnnnnnnnnnnnnnnnnnnnnnnnnntttgccagaccccacacccccggagccagaggaggagatcctgggatcagatgatgaggagcaagaggaccctgcggactactgcaaaggtggatatcatccagtgaaaattggagacctcttcaatggccggtatcatgttattagaaagcttggatgggggcacttctctactgtctggctgtgctgggatatgcaggggaaaagatttgttgcaatgaaagttgtaaaaagtgcccagcattatacggagacagccttggatgaaataaaattgctcaaatgtgttcgagaaagtgatcccagtgacccaaacaagacatggtggtccagctcattgacgacttcaagatttcaggcatgaatgggatacatgtctgcatggtcttcgaagtacttggccaccatctcctcaagtggatcatcaaatccaactatcaaggcctcccagtacgttgtgtgaagagtatcattcgacaggtccttcaagggttagattacttacacagtaagtgcaagatcattcatactgacataaagccggaaaatatcttgatgtgtgtggatgatgcatatgtgagaagaatggcagctgaggccactgagtggcagaaagcaggtgctcctcctccttcagggtctgcagtgagtacggctccacagcagaaacctatagnnnnnnnnnnnnnnnnnnnnnnnnnnnnnnnnnnnnnnnnncagaagaggcaggctgagttattggagaagcgcctgcaggagatagaagaattggagcgagaagctgaaaggaaaataatagaagaaaacatcacctcagctgcaccttccaatgaccaggatggcgaatactgcccagaggtgaaactaaaaacaacaggattagaggaggcggctgaggcagagactgcaaaggacaatggtgaagctgaggaccaggaagagaaagaagatgctgagaaagaaaacattgaaaaagatgaagatgatgtagatcaggaacttgcgaacatagaccctacgtggatagaatcacctaaaaccaatggccatgttgagaatggcccattctcactggagcagcaactggacgatgaagatgatgatgaagaagactgcccaaatcctgaggaatataatcttgatgagccaaatgcagaaagtgattacacatatagcagctcctatgaacaattcaatggtgaattgccaaatggacgacataaaattcccgagtcacagttcccagagttttccacctcgttgttctctggatccttagaacctgtggcctgcggctctgtgctttctgagggatcaccacttactgagcaagaggagagcagtccatcccatgacagaagcagaacggtttcagcctccagtactggggatttgccaaaagcaaaaacccgggcagctgacttgttggtgaatcccctggatccgcggaatgcagataaaattagagtaaaaattgctgacctgggaaatgcttgttgggtgcataaacacttcacggaagacatccagacgcgtcagtaccgctccatagaggttttaataggagcggggtacagcacccctgcggacatctggagcacggcgtgtatggcatttgagctggcaacgggagattatttgtttgaaccacattctggggaagactattccagagacgaagatcacatagcattgatcattgaactgctggggaaagtccctcgaaaatacgctatgttggggaaatactccaaggagtttttcaccagaaaaggagaactgcgacacatcaccaagctgaagccctggagcctctttgatgtacttgtggaaaagtatggctggccccatgagatgctgcacagtttacagatttcctgatcccgatgttagaaatggttccagaaaacga

SEQ ID NO: 187097 - DNA, 1837 bp, Homo Sapiens
  misc_feature (1527)..(1538): n is a, c, g, or t
ttggcgatgttagaaatggttccagaaaaacgagcctcagctggcgaatgccttcggcatccttggttgaattcttagcaaattctaccaatattgcattctgagctagcaagtgttcccagtacattggacctaaacggtgactctcattctttaacaggattacaagtgagctggcttcatcctcagacctttattttgctttgaggtactgttgtttgacattttgctttttgtgcactgtgatcctggggaagggtagtcttttgtcttcagctaagtagtttactgaccattttcttctggaaacaataacatgtctctaagcattgtttcttgtgttgtgtgacattcaaatgtcatttttttgaatgaaaaatactttcccctttgtgttttggcaggttttgtaactatttatgaagaaatattttagctgagtactatataatttacaatcttaagaaattatcaagttggaaccaagaaatagcaaggaaatgtacaattttatcttctggcaaagggacatcattcctgtattatagtgtatgtaaatgcaccctgtaaatgttactttccattaaatatgggagggggactcaaatttcagaaaagctaccaagtcttgagtgctttgtagcctatgttgcatgtagcggactttaactgctccaaggagttgtgcaaacttttcattccataacagtcttttcacattggattttaaacaaagtggctctgggttataagatgtcattctctatatggcactttaaaggaagaaaagatatgtttctcattctaaaatatgcattataatttagcagtcccatttgtgattttgcatatttttaaaagtacttttaaagaagagcaatttccctttaaaaatgtgatggctcagtaccatgtcatgttgcctcctctgggcgctgtaagttaagctctacatagattaaattggagaaacgtgttaattgtgtggaatgaaaaaatacatatatttttggaaaagcatgatcatgcttgtctagaacacaaggtatggtatatacaatttgcagtgcagtgggcagaatacttctcacagctcaaagataacagtgatcacattcattccataggtagctttacgtgtggctacaacaaattttactagctttttcattgtctttccatgaaacgaagttgagaaaatgattttccctttgcaggttgcacacagttttgtttatgcatttccttaaaattaattgtagactccaggatacaaaccatagtaggcaatacaattttagaatgtaatatatagaggtatatttagcctcttttagaagtcagtggattgaatgtctttttattttaaattttacattcattaaggtgcctcgtttttgactttgtccattaacatttatccatatgcctttgcaataactagattgtgaaaagctaacaagtgttgtaacaataatccattgtttgaggtgcttgcagttgtcttaaaaattaaagtgttttggnnnnnnnnnnnnccagacattgccttggtcattgccctataaatgatagaatcaatgaacatttgctatcagagtagtgtcactaaaactaaataccagcattcctgttgcagcagatgtagttgtagaacatgcattgaggcgtattataaggaaatcatttattgttttttaaggggcagaagggatttagggagaaaagctacagtatagattgattctctagaatatcaatgatcctttttcatccatggttcatcaaaaacatactaactgcatttgtttgatcattgcaaatttaaaaacaaaac

SEQ ID NO: 187098 - DNA, 1201 bp, Homo Sapiens
  misc_feature (789)..(829): n is a, c, g, or t
ttggcaagagttaaactcctaaagggcaagcgtgttgtgtgatgaatattaagaacaatatgatctagacaccatgctttgtgtggacccaactgagaatctaggagaaagagaaatgactattcagctgcttctttgtcacttaacttactgatttggacattaattttctggaatttggagctcctgagccaaagttggtggatatcatccagtgaaaattggagacctcttcaatggccggtatcatgttattagaaagcttggatgggggcacttctctactgtctggctgtgctgggatatgcaggggaaaagatttgttgcaatgaaagttgtaaaaagtgcccagcattatacggagacagccttggatgaaataaaattgctcaaatgtgttcgagaaagtgatcccagtgacccaaacaaagacatggtggtccagctcattgacgacttcaagatttcaggcatgaatgggatacatgtctgcatggtcttcgaagtacttggccaccatctcctcaagtggatcatcaaatccaactatcaaggcctcccagtacgttgtgtgaagagtatcattcgacaggtccttcaagggttagattacttacacagtaagtgcaagatcattcatactgacataaagccggaaaatatcttgatgtgtgtggatgatgcatatgtgagaagaatggcagctgaggccactgagtggcagaaagcaggtgctcctcctccttcagggtctgcagtgagtacggctccacagcagaaacctatagnnnnnnnnnnnnnnnnnnnnnnnnnnnnnnnnnnnnnnnnncagaagaggcaggctgagttattggagaagcgcctgcaggagatagaagaattggagcgagaagctgaaaggaaaataatagaagaaaacatcacctcagctgcaccttccaatgaccaggatggcgaatactgcccagaggtgaaactaaaaacaacaggattagaggaggcggctgaggcagagactgcaaaggacaatggtgaagctgaggaccaggaagagaaagaagatgctgagaaagaaaacattgaaaaagatgaagatgatgtagatcaggaacttgcgaacatagaccctacgtggatagaatcacctaaaaccaatggccatattgagaatggcccattctcactggagcagcaactggac

SEQ ID NO: 187099 - DNA, 1098 bp, Homo Sapiens
  misc_feature (219)..(268): n is a, c, g, or t
  misc_feature (925)..(965): n is a, c, g, or t
ttggcttgtggcctcattctgaacaaaagggattagagaagaaaaatctcttgatataaggcttgaaagcaagggcaggcaatcttggttgtgaatattttctgatttttccagaaatcaagcagaagattgagctgctgatgtcagttaactctgagaagtcgtcctcttcagaaaggccggagcctcaacagaaagctcctttagttcctcctcctnnnnnnnnnnnnnnnnnnnnnnnnnnnnnnnnnnnnnnnnnnnnnnnnnnggagccagaggaggagatcctgggatcagatgatgaggagcaagaggaccctgcggactactgcaaaggtggatatcatccagtgaaaattggagacctcttcaatggccggtatcatgttattagaaagcttggatgggggcacttctctactgtctggctgtgctgggatatgcaggggaaaagatttgttgcaatgaaagttgtaaaaagtgcccagcattatacggagacagccttggatgaaataaaattgctcaaatgtgttcgagaaagtgatcccagtgacccaaacaaagacatggtggtccagctcattgacgacttcaagatttcaggcatgaatgggatacatgtctgcatggtcttcgaagtacttggccaccatctcctcaagtggatcatcaaatccaactatcaaggcctcccagtacgttgtgtgaagagtatcattcgacaggtccttcaagggttagattacttacacagtaagtgcaagatcattcatactgacataaagccggaaaatatcttgatgtgtgtggatgatgcatatgtgagaagaatggcagctgaggccactgagtggcagaaagcaggtgctcctcctccttcagggtctgcagtgagtacggctccacagcagaaacctatagnnnnnnnnnnnnnnnnnnnnnnnnnnnnnnnnnnnnnnnnncagaagacgcaggctgagttattggagaagcgcctgcaggagatagaagaattggcagcgagaagctgaaaggaaaataatagaagaaaacatcacctcagctgcaccttccaatgaccaggatggcgaatac

SEQ ID NO: 187100 - DNA, 561 bp, Homo Sapiens
  misc_feature (218)..(243): n is a, c, g, or t
ctttgtacaaaaaagttgggctctacctccctgtccttgtctggctctcccgtcaccctccctgcctctgtctctcttctggcctgagcctgggcccagccacctcctgacgggtcccctgggtctgcataggtctcccatggcgcaatgagtcagtggcccccagccaggcagtgtgggcattgccactgcggctggacggggctgcgcgctcgcgnnnnnnnnnnnnnnnnnnnnnnnnnnttgatctcagggggtcctttttggagtttattgtattttattgtacttggtggggtgtttggggtgggggcggaggagagcttgttctcgtggggttgtcggtaccttcagaaacttttaccaaagtcacgattagctgcttgtggtggggccccaaccgccctcgggcactggggagctgggctggggctgctgctctggggtctccgggggccacagcttggggtgagttgaagacctcaggggatgtggaggggtctgcggggccctggccgcacaggatggccttcagggaaggtggtcttggggcatggtgca

SEQ ID NO: 187101 - DNA, 701 bp, Homo Sapiens
ctttgtacaaaaaagttgggaagatttcacctctcttttgaaacataatggacaaatgtgtttctttaggatgagaggtgcacctggctagtcaatctttattttcctaaaataaacaggatgaaaactcaaaacaaaaagaaatacctcatgggcaaaagctctcccaatacaactaatacagacactcaacatggctttgtagaaactgacccctctcccaagtcttatgtttgtcagaattgcatgcctatttcaatcgaagaaaagtgatctgatctcttcagatgaaggtgggacttggagatgctgctgcctagagttaacttgccagagaaaggataagcattcgggaagtgccaggatggggtatcagctgaacaatggcaggatcccttctgccagtgggctggctcagggagtaaacctccccggaaggaattttgtttctctctagaatcaaagtgggcaaaatgatcaccttattcgcctggagtgaaccaggttgaaactgagaaggcagacatgggtgataagccagatgaagtcatatgttataactaagctatgtacctgtaacttgcctggtagttttttcattctctctaaacaggtcataataagtgttagtctgtgatccactatggagagagatttctggaaagaatagaggcagtggtagagggtccaaggttgttatt

SEQ ID NO: 187102 - DNA, 1148 bp, Homo Sapiens
  misc_feature (828)..(862): n is a, c, g, or t
gtgtgagccaccgtgaccagccaatgtgccttcttatagtgtctactcattggtctttgttctgcccagtgataacaatgggataacgcctgctacacatcttcattgtgaaacccttcccctgtgctgagattaaatgaactctaagattattaaatagtatattttccttgacagcctagcgtttgatgattttaaagccttatgtataaataaaccaaaggaagtaagcagtcatattgctaatttgctaactcctatctattgaatggtgaagttttaaaaatttccccaggtaagtttaagattcaaacaccatctattgagcacctacattgtgtgccaggtagtaaaataggtgctttcatacacattgtctcaattcctgtgaggtcagaattatctctgcatttgaaacttgaggaaacatgctcagagtgcaagaagcttccttgcctgagatcacctagaaaggaaccctcagagccggcaactgaatcttggtccctgtgatgtcaagcccattgctctcccactgcagaacatggcctctagattaatgccaccgattcaggaacacctccgacagtcttgaaatacccccatgttgccttgtttgttttttccttctggcttcttctattacagtctcttcattggaagctctgtaggccaaggccagagctgatactgacacggagccaatgcagatagcacatcagatgctaggggtcgctgggaggattaagggacttaatctgctaggaacacctgtacttgaagtggaggaggctagggggccacagttgctgcttcattaacatagannnnnnnnnnnnnnnnnnnnnnnnnnnnnnnnnnnaagtggattggcagactccttgttgcttaagagtggctttctaggcaggccactggcatctgaattcctcattgacaataaatgtaagaaattggaataaaaaagagagacctgctgttattcgcttttgttctccagtgatttgattaactcagggcaaggctgaatatcagagtgtatcgcactgaagaataataatccattcagtaatgttatagtatcctcaatctaaatatgtccactggtcatttggctacttttcaaataaaatacttgaaaactggtc

SEQ ID NO: 187103 - DNA, 1514 bp, Homo Sapiens
ttggtgctctttgaaaccagtgaggtggtggatgtggccaagctcatgaaagcctacatcagcatgatcgtgaagaagcgctacagcacgacacgctccgccagcagccagggcagctccaggtgaaggcgggacagagcccacctgtctttgctacctgaacgcaccaccctctggcctaggctggctccagtgtgccatgcccagccaaaacaaacacagagctgcccaggctttctggaagcttctggtctgagggaggtgtctccgaggatccttttgcctgccgccttcattgatcctgtattaagctgtcaactttaacagtctgcacagtttccaaagctttactactcttagaggacacatgccttaaaaaaggaggggaggaaccacgctgccaccaaagcagccggaagtgccttaacttgtggaaccaacactaatcgaccgtaactgtgctactgaagggaactgcctttcccccttctgggggagacttaacagagcgtggaaggggggcattctctgtcaatgatgcactaacctcccaacctgatttccccgaatctgagggaaggtgagggagtgggaagggggatggagagctcgaggggacagtgtgtttgagctggagtgctgcgggcagcctttctcatggaatgacatgaatcaacttttttctttgtttcatcttttaagtgtacgtgcttgcctgttcgtgcatgtgttcataaactcaacactttaatcatggtttcatgagcattaaaaagcaaagggaaaaaggatgtgtaatggtgtacacagtctgtatattttaataatgcagagctatagtctcaattgttactttataaggtggttttattaacaaacccaaatcctggattttcctgtctttgctgtattttgaaaaacacgtgttgactccattgttttacatgtagcaaagtctgccatctgtgtctgctgtattataaacagataagcagcctacaagataactgtatttataaaccactcttcaacagctggctccagtgctggttttagaacaagaatgaagtcattttggagtctttcatgtctaaaagatttaagttaaaaacaaagtgttacttggaaggttagcttctatcattctggatagattacagatataataaccatgttgactatgggggagagacgctgcattccagaaacgtcttaacacttgagtgaatcttcaaaggaccctgacattaaatgctgaggctttaatacacacatattttatcccaagtttataatggtggtctgaacaaggcacctgtaaataaatcagcatttatgaccagaagaaaaataatctggtcttggactttttatttttatatggaaaagttttaaggacttgggccaactaagtctacccacacgaaaaaagaaatttgccttgtccctttgtgtacaaccatgcaaaactgtttgttggctcacagaagttctgacaataaaagatactagct

SEQ ID NO: 187104 - DNA, 1010 bp, Homo Sapiens
  misc_feature (880)..(898): n is a, c, g, or t
aaaataataactaacatcaaatgcttattatgtacaaagctccttgattttttctaatcgtgtaacacccccgagcaataattatttccatggcacaaaggagatactgaagcccaggatatttagtattactgggggtcacagagatagaaaataaatgtccgaatgggcatggaaaagcagacctgtatctccaacatccctttgcctctcagagggatttgaacatgacaaggaggtatcagtgggatagcttatcatcccacctcgtggtcaccagtgcagcccaccccggtggcatcgagaatgcagcgacccagccactcgtcagggcgcgcactgacgatgtcgttgcggcagccttccaggtgggggcgcagttgttgcagcagcatgcgcgacagcagcaccccaaagcctccgtggcagtagcggccgggggtgggctctccgccgatgaagtcctggggccggcccaggtacaggtgggcggcggaggccaggctgaggtggccagttaggcgtgccaggccgtgcgcctcggtgtaggtggtgtcaggcaccaggaagaaccagtcaaagtcgtcgccgtgctgctccagcaggtggcgcagcgccaggtgcaggtgtccaatgggtcgctcctcgcccagcgtcaccactgccatgccaggtggggcccggcggccccgtgcgcccgtcaggaacaccacacgctccagccggtgccccagcgtgcggttcacggccacgcccagcgtgggcagcgtggtctgagaggtcagcaccgccaccagcagcctctgcctgatgcccagctccgtgctgatgtagcgggtcctaggggaggagatggcacaagcttatcaaaaagacaacnnnnnnnnnnnnnnnnnnnaggtggtcagcacagaccctggcaggtcacgtcttctctgtatctgttctctcacctatgaataggttaaaaataaaccctctctcccaggggtcatgaggatttaaaccaa

SEQ ID NO: 187105 - DNA, 2450 bp, Homo Sapiens
ttggcaacgcggcgcgccggcccaactcggtgcagcccggagcggagcgcgagaagcccggggccggcgaaggcgccggggagaattgggagccgcgcgtcttgccctaccaccctgcacagcccggccaggccgccaaaaaggccgtcaggacccgctacatcagcacggagctgggcatcaggcagaggctgctggtggcggtgctgacctctcagaccacgctgcccacgctgggcgtggccgtgaaccgcacgctggggcaccggctggagcgtgtggtgttcctgacgggcgcacggggccgccgggccccacctggcatggcagtggtgacgctgggcgaggagcgacccattggacacctgcacctggcgctgcgccacctgctggagcagcacggcgacgactttgactggttcttcctggtgcctgacaccacctacaccgaggcgcacggcctggcacgcctaactggccacctcagcctggcctccgccgcccacctgtacctgggccggccccaggacttcatcggcggagagcccacccccggccgctactgccacggaggctttggggtgctgctgtcgcgcatgctgctgcaacaactgcgcccccacctggaaggctgccgcaacgacatcgtcagtgcgcgccctgacgagtggctgggtcgctgcattctcgatgccaccggggtgggctgcactggtgaccacgagggggtgcactatagccatctggagctgagccctggggagccagtgcaggagggggaccctcatttccgaagtgccctgacagcccaccctgtgcgtgaccctgtgcacatgtaccagctgcacaaagctttcgcccgagctgaactggaacgcacgtaccaggagatccaggagttacagtgggagatccagaataccagccatctggccgttgatggggaccgggcagctgcttggcccgtgggtattccagcaccatcccgcccggcctcccgctttgaggtgctgcgctgggactacttcacggagcagcacgctttctcctgcgccgatggctcaccccgctgcccactgcgtggggctgaccgggctgatgtggccgatgttctggggacagctctagaggagctgaaccgccgctaccacccggccttgcggctccagaagcagcagctggtgaatggctaccgacgctttgatccggcccggggtatggaatacacgctggacttgcagctggaggcactgaccccccagggaggccgccggcccctcactcgccgagtgcagctgctccggccgctgagccgcgtggagatcttgcctgtgccctatgtcactgaggcctcacgtctcactgtgctgctgcctctagctgcggctgagcgtgacctggcccctggcttcttggaggcctttgccactgcagcactggagcctggtgatgctgcggcagccctgaccctgctgctactgtatgagccgcgccaggcccagcgcgtggcccatgcagatgtcttcgcacctgtcaaggcccacgtggcagagctggagcggcgtttccccggtgcccgggtgccatggctcagtgtgcagacagccgcaccctcaccactacgcctcatggatctactctccaagaagcacccgctggacacactgttcctgctggccgggccagacacggtgctcacgcctgacttcctgaaccgctgccgcatgcatgccatctccggctggcaggccttctttcccatgcatttccaagccttccacccagctgtggccccaccacaagggcctgggcccccagagctgggccgtgacactggccgctttgatcgccaggcagccagcgaggcctgcttctacaactccgactacgtggcagcccgtgggcgcctggcggcagcctcagaacaagaagaggagctgctggagagcctggatgtgtacgagctgttcctccacttctccagtctgcatgtgctgcgggcggtggagccggcgctgctgcagcgctaccgggcccagacgtgcagcgcgaggctcagtgaggacctgtaccaccgctgcctccagagcgtgcttgagggcctcggctcccgaacccagctggccatgctactctttgaacaggagcagggcaacagcacctgaccccaccctgtccccgtgggccgtggcatggccacaccccaccccacttctcccccaaaaccagagccacctgccagcctcgctgggcagggctggccgtagccagaccccaagctggcccactggtcccctctctggctctgtgggtccctgggctctggacaagcactgggggacgtgcccccagagccacccacttctcatcccaaacccagtttccctgccccctgacgctgctgattcgggctgtggcctccacgtatttatgcagtacagtctgcctga

SEQ ID NO: 187106 - DNA, 935 bp, Homo Sapiens
ttggggacgaagaaaccgaagggaaagctcagctgcagcggcgactttcagtttcatttccacggaccctcctgcctgggccgcagccgccgccgcgatgcccagtaagttcagctgccggcagctccgggaggcgggccagtgtttcgagagtttcctggtcgttcggggactggacatggagacagatcgcgagcggctgcggaccatttataaccgcgacttcaagatcagctttgggacccccgcccctggcttctcctccatgctgtatggaatgaagattgcaaatctggcctacgtcaccaagactcgggtcaggttcttcagactcgaccgctgggccgacgtgcggttcccagaaaagaggagaatgaagctggggtcagatatcagcaaacaccacaagtcactgctagccaagatcttttatgacagggctgagtatcttcatgggaaacatggtgtggatgtggaagtccaggggccccatgaagcccgagatgggcagctccttatccgcctggatttgaaccgcaaagaggtgctgaccctgaggcttcggaatggcggaacccagtctgttaccctcactcacctcttcccactctgccggacaccccagtttgctttctacaatgaagaccaggagttgccctgtccactgggccccggtgaatgctatgaactccatgtccattgtaagaccagctttgtgggctacttcccagccacagtgctctgggagctgctgggacctggggagtcgggttcagaaggagccggcacattctacattgcccgcttcttggctgccgtcgcccacagccccctggctgcacagctgaagcccatgactcccttcaagcggacccggatcaccggaaaccctgtggtgaccaatcggatagaggaagagagagacctgaccgcgc

SEQ ID NO: 187107 - DNA, 871 bp, Homo Sapiens
ttggcggccgacccggaagcatgtctgtccctagcggaggcgcgggtgccgtgctgagagcgcctgcctgtgcgccccgagcggggctgggactcttccaagatgcccacgttcgcacagagaccccggatcgcggaagctcgcgtctcgaaaggcctgcggtctcacgccctgcccgtcctgggttcacggtttttcatcacctgcggctgtcctgcgatcgaccacagctgtgcaggaggggcaggaggtatctgttgctgcagttaccggaacctttgccaggactagtacaggaccacgggctggtagctcagggatgtcttgtctgtgagttacagctgcacgctctccaggaaagaaggaatttcctcttctctggaaaccccaccacacagctggtttctcattggtgctgcttgcccattccctgagctgtgactgccagaggagtgggaggttggtggtgcctccagcccatcaggggcaggccctgggaccgcctgggaacaggaggactatggcacaaaccgagtgagtgatgggagcaacccgcagggctctgccacatccctgtcttccttcactgacatgaaacgcagaaaaggcagctttgccacaacacaggagcacgcaccgaatgtggccgcccagggctctgtccttgaccctgttgtccaggactgtttaccaagggctgacaggcactgagtgccccgtgcacctggccagacactgcactcatgcagcggaaaggacagtgaacgagactttgtccctggcctccaaaggcttagggcgtagtggctgtgatgagcacagtgacaagggccaggagggggacctcttagggggccatgcagtgatggaa

SEQ ID NO: 187108 - DNA, 2214 bp, Homo Sapiens
ttgggtcttctcaaggagcctagttggctatgcacaaggaaagcgccaaaagagctaaagggaggaagggaagagaaaacatttaactctcccatggtggttactgacccagcgtgggtgcggggagattgggatgggaagtccaggtctgggggcagccagcagttgtcagtttctcattgacagccctgctccttggagattgtttttgtgggtagtcttgtgtgtggcattggtggaatggctgaatctaggagacgcggcgtgtccagaacttgctggaaattggttttgagattttgggcaaggcctctcaccccgagcctcagttccctccctaataaagcagggctgttataaggataagatgcaatcgtgagggggtgggaaaggactaagagctctgtaaaaatacaaaccaaatgctggtggtgcttccacacctgcggcatttggggtgggggtggtgacaacattgcccacactcaacccacacactcaggagttggggggggctggttcttaagacgagttggcttgcaaaggagtgaacttgagaaggacctgcgcctcgtgtatgtacatttgtttttggccaggcagaggcttacggtgaaaagcccaaggcccagctgacagtggacacaggggaatttgtttgtttgtttcaatccgcatctggagtgagtcattgccacttgtcatggtgaaatggcaaatctgggcttcctgtggttccagaagcctgcgactggaaatccacaagcgagctggtggttgaagctggttaaagaacagcctaggtattccagaagtgtttgaggatcccttccatgaaggaagagaggaaagtttttaagtaaacctcccactcccatgtgtcttcagctttcttttgcaaaggagaaaatccttgaagtttggtaaagaccgagttagtctatctctctttgcctatctcgagttgggctggggagaggaggagataggttcttttgtctttttctgtcttctcccttccccacttccttccctccagtccccactcactcacatgcacacactaaccttggagccgatgggattgagtgactggcacttgggaccacagagaaatgtcagagtgtttggttacagactcaaggaaacctctcattttagagtgctcatttggttttgagcaaaattttggactgtgaagcaaggcattggtgaagacaaaatggcctcgccggctgacagctgtatccagttcacccgccatgccagtgatgttcttctcaaccttaatcgtctccggagtcgagacatcttgactgatgttgtcattgttgtgagccgtgagcagtttagagcccataaaacggtcctcatggcctgcagtggcctgttctatagcatctttacagaccagttgaaatgcaaccttagtgtgatcaatctagatcctgagatcaaccctgagggattctgcatcctcctggacttcatgtacacatctcggctcaatttgcgggagggcaacatcatggctgtgatggccacggctatgtacctgcagatggagcatgttgtggacacttgccggaagtttattaaggccagtgaagcagagatggtttctgccatcaagcctcctcgtgaagagttcctcaacagccggatgctgatgccccaagacatcatggcctatcggggtcgtgaggtggtggagaacaacctgccactgaggagcgcccctgggtgtgagagcagagcctttgcccccagcctgtacagtggcctgtccacaccgccagcctcttattccatgtacagccacctccctgtcagcagcctcctcttctccgatgaggagtttcgggatgtccggatgcctgtggccaaccccttccccaaggagcgggcactcccatgtgatagtgccaggccagtccctggtgagtacagccggccgactttggaggtgtcccccaatgtgtgccacagcaatatctattcacccaaggaaacaatcccagaaaaggcacgaagtgatatgcactacagtgtggctgaggcctcaaacctgctgccccctcagcccgaaatgccccctacttcccttgtgacaaggccagcaaaaagaagagagaccctcctccgaaaatgagattgccctgcatttcgagccccccaatgcacccctgaaccggaaggtctggttagtccaca

SEQ ID NO: 187109 - DNA, 1242 bp, Homo Sapiens
ttgggtgtgagttaacttcacctgccacctcgtaaaagaatttcagaggtgtgatcccgctttattgggacctggtaacaatcacaaagccagtggctgtttgagaaggacctcagacattttcagcagagttgttttagcaggaaacgtgccactgaatggcccctaaatgtgtcgacagtgtgataagagactcaactaattctttaggcaacatggcagatgtgactcagatcctccaagaccaaagcggaaaggtcagggggctgggactcttctcttccatagaagcctgtttcctgttaggaggcataatggaagatgaccccacaaaggcagaggcatctttcggaacaacactggtggcagctttcagaacaaggaacccctggtgggaggacgcccaagctacagcgttgggatctgggatctgttccactgccggcagatttcaaggggaacttgctgaaaggcagccagtggtgaagatttctcccctcccaggatggactacatgccggcatgtttcttataaagctgtggctgcttgtttcagaggaagggagtttgcagtcgcgggacgtggtagagcaaggcattcttgggttttcaagttgcttcttgcagaagccacatatgcatgccataagggttaagttggtggatctttaagagccaagtgtggttgagatcttggatttgcgtttacttcttgatgaatacatatccttcaaaccctctgcctggcgctacttctgtgtgcttcagagaggtacatcacagcctggtttctgatgcctactaactcctgctcttggagagctggagacacgaggatcagatagtcccttgcctttggagcactcttgataagcttttgtattttgtgttgtccttttaaaatgttctagaatgactttacgttgcaggtactggttaattggctgttgacaccacatctattttgtcttatgattctgcagttttgcagtacttttctctatctgattcagccatttctgccagagggaaaaggtcggcagaaaagatgtattgagtgaatagttaaggataggatctttgtccaaaaatttcagaaagattgagcaaatctgacgtattcattgagtgagtttctgtgttttcaaaggtggaggagaaatttgtgctggaagtttttaagcctccgttttcttggaaatcagtctgtaacactggcaagtcttaagatagtcccgttta

SEQ ID NO: 187110 - DNA, 873 bp, Homo Sapiens
ttggcatctgctggcatttcctgcagccaggcccgcgccgccagtggagcccccgcgcgcccggccggcccggagcaccgagctcgcggcacggtaggagaagcccccgagcgcccacagcatgaaggaggaggccttcctccggcgccgcttctccctgtgtccaccttcctccacccctcagaaagtcgacccccggaagctcacccggaacttgctcctcagcggagacaatgagctctacccactcagcccagggaaggacatggagcccaacggcccgtcgctgcccagggatgaagggcccccgaccccaagctctgccacgaaggtgccaccggcagagtacaggctgtgcaacgggtcagacaaggaatgtgtgtcccccaccgccagggtcaccaagaaggagactctcaaggcgcagaaggagaactaccggcaggagaagaagcgcgccacacggcagctgctcagcgctctgacagaccccagcgtggtcatcatggctgacagcctgaagatccgcggcaccctgaagagctggaccaagctgtggtgcgtgctgaagccgggggtgctgctcatctacaagacgcccaaggtgggccagtgggtgggcacggtgctgctgcactgctgcgagctcatcgagcggccctccaagaaggacggcttctgcttcaagctcttccacccgctggatcagtccgtctgggccgtgaagggccccaaaggtgagagcgtgggctccatcacacagcccctgcccagcagctacctgatcttcagggccgcctccgagtcagatggtcgctgctggctggacgccctggagctggccctgcgctgctctagcctactgagactggg

SEQ ID NO: 187111 - DNA, 2045 bp, Homo Sapiens
  misc_feature (1039)..(1055): n is a, c, g, or t
  misc_feature (1601)..(1610): n is a, c, g, or t
tggttcagtgccggcgttagaaaaggagtgagggcagctggagtgcgttctgccgaagcttgtggttgcacgcccatcgtcttaggggctaccttccgtgaccatgtccaagtctctgaagaagttggtggaggagagccgggagaagaaccagcccgaggtggacatgagtgaccggggcatctccaacatgctggatgtcaacggcctctttaccttatcccatatcacacaactggtcctcagccataacaagctaacaatggtgccaccgaacatcgcagaactgaagaatttggaggtgctcaacttttttaataaccaaatcgaggagctgcccacacagatcagtagccttcagaaactcaaacacctgaaccttggcatgaacaggctgaacactttgccacgaggcttcggctccctgccagctcttgaggttctggacttgacttacaacaacttgagcgaaaattctcttcctggaaacttcttctacctgaccaccctgcgtgcactctatctaagtgacaacgattttgaaatcctgccgccagatattgggaagctcacaaagttgcagatactcagccttagggataacgacctgatctcgctgcctaaggaaatcggggagcttacccagcttaaagagctccacattcaggggaaccgcctcaccgttctgcccccagaactaggaaacttggatttaactggccagaagcaggtattcaaagcagagaacaatccctgggtgacccccattgcagaccagttccagcttggcgtgtcccatgtttttgagtatatccttctgagacatacaaatacctctacggcagacacatgcaggccaacccagaaccaccgaagaagaataatgacaaatcgaaaaagatcagccggaaacccctggcagccaagaacagataaggaagggattggcatcggctggccttccagcaccttctctctccaacacttcattctctcttgccctgtctctcaaataaacccaatgctgcgtgtgaggccnnnnnnnnnnnnnnnnncactctctttctaatgcttcccaccttaccttttatattcttttgctaggtgggagattgttataaggtctttaaaccatttccatttgtttctttaacattaccaaaagcagggaacaaagctcttattcaactgcgaattccatagtgggctctggcttttcttgaatagatatcacaaggttgcttattatcaaaagaataattaaaatcatgtaaccatttaaatgtcactgttaacacttttcactctttctgttgattcacctaactcattattttgctttattaaaagtcttccttcaccaccgagatatgctaatttaacttacaaatgattttaataaaatcttgagtttgtatcacatgttacttattgactcagaataaaagaacagtctgatcttggggtataacacattttcatttacttttctcccccaaaatcatcttatccaattttattggttatacatgataaacttttcatgaaagaaatgcaaaattaaatcacagttcgtttcttctcacattaatttgtcaagnnnnnnnnnnctttgaagactttctaaattaggaagcagaaaaacaaatctctaggagattctgccaaaggattttggaaagtagcattccttcgccgaagaaatggtgatttctgccaggggctggtagacaagaactgtgaaagagagagagaaaaaacctcaactgtgtattttgtcacggcggaaaatctgctcgcatcgaagcattcttctaagcgacttcgatgccaaggaagttgtgtaaatgtgcacgcgctacaccacacccagggtggaaaccacagttgcagagtcattaaacaatcaattgtttgtttaacatctgtgataggcagctttccttcttttcacagtgatacctacgaaatcaaaataaatgcaagctgaggttttgtgctcactgaaacggctgtcaaccccagaagccgacacaaaaaaatgg

SEQ ID NO: 187112 - DNA, 1527 bp, Homo Sapiens
ttgggcccttttgactgctctctctacaggtttaatttgggcatttactcattttcatggctccaaggaccatgtatgtgttggggatcttcaatattcatgttattttctcctttggtcttatatgattgttacctttatgaagctttagtgattacaaagcactttttttgtccatttttacctgagctttgtaaactctgatttgcaggatggctggctgtggtgaaattgatcattcaataaacatgcttcctacaaacaggaaagcgaacgagtcctgttctaatactgcaccttctttaaccgtccctgaatgtgccatttgtctgcaaacatgtgttcatccagtcagtctgccctgtaagcacgttttctgctatctatgtgtaaaaggagcttcatggcttggaaagcggtgtgctctttgtcgacaagaaattcccgaggatttccttgacaagccaaccttgttgtcaccagaagaactcaaggcagcaagtagaggaaatggtgaatatgcatggtattatgaaggaagaaatgggtggtggcagtacgatgagcgcactagtagagagctggaagatgctttttccaaaggtaaaaagaacactgaaatgttaattgctggctttctgtatgtcgctgatcttgaaaacatggttcaatataggagaaatgaacatggcgtcgcaggaagattaagcgagatataatagatataccaaagaagggagtagctggacttaggctagactgtgatgctaataccgtaaacctagcaagagagagctctgctgacggagcggacagtgtatcagcacagagtggagcttctgttcagcccctagtgtcttctgtaaggcccctaacatcagtagatggtcagttaacaagccctgcaacaccatcccctgatgcaagcacttctctggaagactcttttgctcatttacaactcagtggagacaacacagctgaaaggagtcataggggagaaggagaagaagatcatgaatcaccatcttcaggcagggtaccagcaccagacacctccattgaagaaactgaatcagatgccagtagtgatagtgaggatgtatctgcagttgttgcacagcactccttgacccaacagagacttttggtttctaatgcaaaccagacagtacccgatcgatcagatcgatcgggaactgatcgatcagtagcagggggtggaacagtgagtgtcagtgtcagatctagaaggcctgatggacagtgcacagtaactgaagtttaaataaaaatgtcttcagctccatgctcaaggttgaaagggttacctgtaaatttctgcccacataacattatactcatccctagtagtgcattttgggagttggggtgggaaggggtatggggaaggatagactcataattaaaatgtctaacatgtctctgttgagaaatttattttaatgtaaaggaactttgggtgtaatagttgagagctggtttaattaataacccagttttctt

SEQ ID NO: 187113 - DNA, 897 bp, Homo Sapiens
ttaagggcagggttgggttgtccggcagaattgcagcagctctggatcaaggctggcctcctggagggggcccctggccaggcacagctgtgagcgggatggcctggcctggctccaccttgcgaaaggtctcggtgtcaccagccaggccgttgcggggcttggcagtcaggacctggacgtcatgcttgcccgtcttgttgcgttttcggaggtagaagagcaggggcaggatgagcgccaggagcagaagtaccaggcacatggggatgatgacgctgaacatgttggcctcaaggaagctcaggaagcctcccttggccacagcgggctcagggctggatgccatggggcctggctcgcctgtgggggtgctgctctctggcttccctgcttccgtccgggcggcctcggggacactgagcagggccacgctgtagggccgggcagcattgtaaggctcagtggcaaagtccagggaggccacagcaggcgggacgccctgtgcccacagctccagagtgagactgtcacctgcggggccgggggccctcccctctggcctgcccacctccagccccagcctcccgtcctcaaggtcctgctgagtgaactgctccaccagctggctgcccccgggctccgtcctggctcggggcacgcggaccacgcggccatgccggggtccctccaggaggcggaagcgcggcacactgcctgtgcggttggccagctcgccagcatctaggacggtggggtccaggcgcagggtggcaccctggggccatggcccacctgcccacacatgcagcagagccctcacagtgacgttcactacggctgatgcattgacacccctagccagtgccaggactctgaagtggtcatgagagccaa

SEQ ID NO: 187114 - DNA, 2016 bp, Homo Sapiens
  misc_feature (1263)..(1280): n is a, c, g, or t
ttgggtttttattttctttgtattttccttatttgtgtgtattacataagaaagcagaaaaaaatagaatatttataattattaaagattgaagttcttaggtgctttcagtaacattatcctcacctttggggtcgtggctgcctatctggagtgctgtcttgttaaggattaagatgagtggctgaggatttgcacttctgtaagtggctgcttcatcctttgacacctgcgctgatcatttgtgtgcgctgcacctccttcaggtgctgcactatctggcaatccagaaacctgcagaccttgctcggcacctgttaccttgtgtgattcatgcagctgtactcaaggtaaaggaagaaggtaaatgtcatatttaactagtcattagtcatttccaaagtgaaagtatattttgcttaatttatttaatgctggcttcaatcttttctaaaatagaaagtctcgaaaacatttcttcagttaagaagatcataaagcagataatatcccattccagtaaagttttgcacttccccaatccagaagacaagaaattggaagaaatcattcaccagattactaatgtggaagctctcattgccagagctcggtcactaaaagccaagtttggaactgagaaatgtgaacaggaggaggaaaaggaagatcttgaaaggtttgtgagttgcctgctggagcagcctgaagtgttagtcaccggtgcaggaagaggacatgctggcaggatcattcacaagctgtttgtgaatgcccagagggctgcagctatgactccaccagaggaggaattgaagagaatgggctccccagaggaaagaaggcagaactccgtgtcagacttcccaccccctgctggccgggaattcattttgcgcaccactgtgccgcgccctgctccctactccaaagctctgcctcagcggatgtacagtgttctcaccaaagaggactttagacttgcaggtgccttttcatcagatacttccttcttctgattcttctagcattactcgttggtggcttcagagacagtgctgcctcctcctgagggagggaaggtaccagggagaacctgggaggtcctggagagggccctgtccagttgggtgatcaggaatcaaaccagcatcggaaagacttcccagcaccaagcttgagctgtgtcgtttcgtggagggggcagcgaggatgggcttgagctgttgagagatttctgccctagagatggcctttgtatannnnnnnnnnnnnnnnnnacacaaacacatcagacactccgtcctcacactggcaggacggtgttcatcgcattctcttctgtgaccagcctctaggctagcggctgcattcgtggtctgtgcaaacacttcgtggttctatatatcagcagcaagtgtgcaaaataaaggacctgttaactcagatttctggatattttggtggtagcttctagtcccagaatctgtgtttttaaaatactacatgacattctgtctattcaatcacctggtggtcatctttcttgtactaattaactgttgatgagcattttggatattctaggagaaagcctataatttcacatagtttctctttttcatgtaactgtaacctaaatgtattacttctgataaaactatatatcaaatgtcactgcaaattagttttatatctgtcatgtgagatttgtcttacttatttttcttttggttgccatggaagttatggccctgaaaatcgtctccctccccttctcttgctgtacagcatgcgttctctttttgtggttgctggctgggtactgtatttaatgaagtagaaatagcacttgcaaaaatacagtcttggtacctagagactgtcatgcagatagtataatttggtatatgtgctaatgcattgagtagaggattattttatcacactattttgcttttgtattttagttaaaataatccatggggatgtgtagcccccccgtgtgaggatgac

SEQ ID NO: 187115 - DNA, 913 bp, Homo Sapiens
aaagtggaatgtctgtataatcttcttccatgaatttcaaatcctctattttcatgatttacgtggatttccaaactaaaccgaaactctccattgttcgggtttgttcgactcacagctctccaagtttggttcccattttgtccacttcgagttgcatttcctgtgcgccgaaaggtgttcaaccattctagaagagaatcttcatgtgaactttctctagggacttctgagtctctgtaattcgttccatctctcaagtcaggctgagatgctagttgttccttgacgccatctaaccgctgttgcagttcttctgatgttatttctccaggggtgcctaaaagattatggtctctcataagccgataatcttcatcattgagttcattaataaactgataataggcctcttctctgtggagacgctcttgctgccatcttctctcattttcatgatgattatggtcttgaggtaaggtttcttcactgccaccatctgatctcgatctagactgattcatcctgagattcctggctttcttattttcctttcaacacgcttttaacatatgccatggtatccatccttcaattgtttgtgccttttttgagagctgcccatctctccaggtcttgggccttcgccctcctgtccggagaacgtgtgctgtgggcggccgttctctcgggtgctggaggctgtggttgggaggcgggataggcttgccgccgcgcctccggagcccgctgtgccctcgaattggccactgaggagagaagccggaagcccgtgctgcagcgtggggtcgtccagctggaggggatactcgggaggaagaacggcaggccccagcccttctttcccgacagccacgccgcccacttggcggcggggagccaacttttttgt

SEQ ID NO: 187116 - DNA, 1148 bp, Homo Sapiens
ttggcttaaatatagtgatgtgctagtataacctcatactgacttaaaagttctgattgttaaattttaaggaattttgtgagccagttattaaaagcagtcattatttaaaatatgtaaacttacagttaaaaacaaaggtaataaatactcagcactcatcacttcctaattattttgctacatttcactattacctttgctgttttacttatttaatctgtatgatgaaaatactgtataatagtgtgcactgcacatctgtctcttcccagctccacattcagtgctgtcttggtagcttggacttagtgggagtgtttacaccatggaaattgacaaactataaatcagggttttaattttctcagagaacctgctgtcaaatatttacagcacatcactgtgtatatatgaaaacgtatttggcaatacaaaccacataccccttctatttcctgacataaataaatggctatggccatttacagctgaaccacgtcttcaagaaagaagccaaaaatatttccgtgaggtttttaactacctctgaatctgtcctactctaaatactaccggagtctctttgtaggttggccagtatatgtttttagtgaaatattatttcacaaagaactatatcacgtacctttcctctgactgtttcctggcatatatgcatgaatatggccattattgaactatcacttcagtaaagaagttaaacagtacttttctgaggtttttcagctacctctgggtcattctgtaatgtaaatgttgttaataagaatggtttttacataaattatgcaaaggttaacaagcagtaacactgcactcctcaaaaagtggcggtatgtaatgaaaggcccttttgatatccttgattttcattgtgtatctgtttgggcacggtctatgtaacactagttctgcgtattagtattttagagtatctctgcctcccttgtcctgttgtttcttttgcccccttggaacacattggtcagcagttctaagagacactgcccacatgatgaccattccctacttcatccttgctgagctaaattttatatttttgtgcatccttctcccagatgacttaggtggtaagtccagattagtcaaagctaatcatggaa

SEQ ID NO: 187117 - DNA, 1763 bp, Homo Sapiens
ttggcataggcccagtccagactaccacaagccccacccacactatgccaagccctacccataccacagcaagccccactcatacttccacaagccccacccatacccccacaagtcccacccacaaaaccagtatgtcacctcccaccactacaagtcctacccccagtggtatgggcctagtccagactgccacaagtcccacccatcctaccacaagccccacccatcccaccacaagccccatccttataaatgtaagcccttccacttctctagaacttgctaccctctccagcccctccaaacactcagaccccaccctcccaggcactgactcccttccctgtagtcccccagtctccaattcctacactcaggcagaccctatggcccccagaactccccacccaagtcctgcccattccagtaggaaacccctcacaagccctgccccagatccctcagagtctacggttcagagtctaagccccactccctcacccccaacccctgcaccccagcattcagacctttgcctggccatggctgtccagaccccagtcccaacggcagccggagggtctggggacaggagcctggaggaggcactgggggccctaatggctgccctggatgactaccgtggccagtttcctgagctgcagggcctggagcaggaggtgacccgcctagaaagtctgctcatgcaagacaaggtctgactcgcagccgggcctccagtctcagcatcactgtggagcatgccttggagagcttcagcttcctcaatgaagacgaagatgaagacaatgatgttcctggggacaggcctccaagcagcccggaggctggggctgaggacagcatagactcacccagtgcccgccccctcagcacggggtgtccagctctggatgctgccttggtccggcacctgtaccactgcagtcgcctcctgctgaaactgggcacatttgggcccctgcgctgccaggaggcatgggccctggagcggctgctgcgggaagcccgagtactggaggcagtatgcgagttcagcaggcggtgggagatcccggccagctctgcccaggaagtggtgcagttctcggcctctcggcctggcttcctgaccttctgggaccagtgcacagagagactcagctgcttcctctgcccggtggagcgggtgcttctcaccttctgcaaccagtatggtgcccgcctctccctgcgccagccaggcttggctgaggctgtgtgtgtgaagttcctggaggatgccctggggcagaagctgcccagaaggccccagccagggcctggagagcagctcacagtcttccagttctggagttttgtggaaaccttggacagccccaccatggaggcctacgtgactgagaccgctgaggaggtgctactggtgcggaatctgaactcggatgatcaggctgttgtgctgaaggccctgagattggcgcccgaggggcgtctgcgaagggacgggctgcgggccctcagctccctgctcgtccatggcaacaacaaggtcatggctgctgtcagcacccagctccggagcctgtcactgggccctaccttccgggagagggccctcctgtgcttcctggaccagctggaggatgaggacgtgcagactcgagtggctggctgcctggccctagctgcataaagctcccgagggccattgaagcccctggttgtacctctgccaaactgacacataagctgtgagg

SEQ ID NO: 187118 - DNA, 1076 bp, Homo Sapiens
ccaactttgtacaaaaaagttgggaagtggtccctgtagaaccactgtggcaccgctactccgtgccgcgcccgtcgagcattgcgttgctgcattgcgccccaccgactccactatgttgaagaaattcgacaagaaggatgaggagtcaggtggaggctccaacccattccagcaccttgagaagagtgcggtactccaggaggcccgtgtatttaatgaaactcccatcaaccctcggaaatgtgcccacatcctcaccaagattctttatctcataaaccagggggagcacctggggaccacggaagcgaccgaggccttctttgccatgaccaagctctttcagtccaatgatcccacactccgtcggatgtgctacttgaccatcaaggagatgtcttgcattgcagaggatgtcatcattgtcaccagcagcctaacaaaagacatgactgggaaagaagacaactaccggggcccggccgtgcgagccctctgccagatcactgatagcaccatgctgcaggctattgagcgctacatgaaacaagccattgtggacaaggtgcccagtgtctccagctctgccctcgtgtcttccttgcacctgctgaagtgcagctttgacgtggtcaagcgctgggtgaatgaggctcaggaggcagcatccagtgataacatcatggtccagtaccacgcactagggctcctgtaccatgtgcgtaagaatgaccgcctagccgtcaataagatgatcagcaaggtcacacggcatggccttaagtctccctttgcctactgcatgatgatccgggtggccagcaagcagctggaagaggaggatggcagccgtgacagcccactgtttgacttcatcgagagctgcttgcgcacaagcacgagatggtggtgtatgaagccgcctcggccatcgtcaatctgccaggctgcagtgccaaagagctggccccggctgtgtcagtgctccagcttttctgcagctcacccaaactgctctccgctatgctgctgttcgtaccctcaataagttgccatgaagcatccgtcagctg

SEQ ID NO: 187119 - DNA, 666 bp, Homo Sapiens
  misc_feature (419)..(443): n is a, c, g, or t
cctataaaagccaactttgtacaaaaaagttgggtgaaatgccctggttccagttgaattttaagcatattttcatttagatataaaatatatgaagtatgctttgttgattatagtgagaacccatgacatagttaaccaaagaatatgtttggttcaaataaaaatagaagcttaatactgggcattcatactttttaaagagaatgaatgaagaaatcggtttcctgctgtagttctctatgggtaagtcttagtaaagacgagaatgctgaagtcggccgtggcgattccctcctaggaactgggaggtgtggcttgcccattacccgcttgaagctcacatctttaccctcctctcccactgtggtttgatcttcacctattcccaggccctcccagcaattggagaggtgtcnnnnnnnnnnnnnnnnnnnnnnnnnctccccgtctgcattcttaggcctcttagctattaggaactgtcagatacatactattatcttattttcctagcctgaaattatatactgtttctgcactctctacctactagggatctgacctcaagtgttttctgagcccaggcttcctggtgtggtgtcttttacctcataaaattattacaatttgcaaatgttggtattgtgatttgattatctgtac

SEQ ID NO: 187120 - DNA, 1981 bp, Homo Sapiens
ttggcgcggtctcagggaaggtggggctatggcagctgctagggaccctccggaagtatcgctgcgagaagccacccagcgaaaattgcggaggttttccgagctaagaggcaaacttgtagcacgtggagaattctgggacatagttgcaataacagcggctgatgaaaaacaggaacttgcttacaaccaacagctgtcagaaaagctgaaaagaaaggagttaccccttggagttcaatatcacgtttttgtggatcctgctggagccaaaattggaaatggaggatcaacactttgtgcccttcaatgtttggaaaagctatatggagataaatggaattcttttaccatcttattaattcactctggtggctacagtcaacgacttccaaatgcaagtgctctgggaaaaattttcactgctttacctcttggtaaccccatttatcagatgctagaattaaagctagccatgtacattgatttccccttaaatatgaatcctggaattctggttacctgtgcagatgatattgaactttatagtattggagaatttgagtttattaggtttgacaaacctggctttactgctttagctcatccttctagtttgacgataggtaccacacatggagtatttgtcttagatccttttgatgatttaaaacatagagaccttgaatacaggtcttgccatcgtttccttcataagcccagcatagaaaagatgtatcagtttaatgctgtgtgtagacctggaaatttttgtcaacaggactttgctgggggtgacattgccgatcttaaattagactctgactatgtctacacagatagcctattttatatggatcataaatcagcaaaaatgttacttgctttttatgaaaaaataggcacactgagctgtgaaatagatgcctatggtgactttctgcaggctttgggacctggagcaactgtggagtacaccagaaacacatcaaatgtcattaaagaagagtcagagttggtagaaatgaggcagagaatatttcatcttcttaaaggaacatcactaaatgttgttgttcttaataactccaaattttatcacattggaacaaccgaagaatatttgttttactttacctcagataacagtttaaagtcagagctcggcttacagtccataacttttagtatctttccagatataccagaatgctctggcaaaacatcctgtatcattcaaagcatactggattcaagatgttctgtggcacctggctcagttgtggagtattccagattggggcctgatgtttcagttggggaaaactgcattattagtggttcttacatcctaacaaaagctgccctccccgcacattcttttgtatgttccttaagcttaaagatgaatagatgcttaaagtatgcaactatggcatttggagtgcaagacaacttgaaaaagagtgtgaaaacattgtcagatataaagttacttcaattctttggagtctgtttcctgtcatgcttagatgtttggaatcttaaagttacagaggaactgttctctggtaacaagacatgtctgagtttgtggactgcacgcattttcccagtttgttcttctttgagtgactcagttataacatccctaaagatgttaaatgctgttaagaacaagtcagcattcagcctgaatagctataagttgctgtccattgaagaaatgcttatctacaaagatgtagaagatatgataacttacagggaacaaatttttctagaaatcagtttaaaaagcagtttgatgtagagatattttaaatattgtacactttgcctttttgagtaacattccagagataggtattttttgtaggctgtttcactgaactcagttaatgaaaactgtattaacataattgttgtagcataatattaatagtgcaaaagtacatataagtcattttgatgaaaaata

SEQ ID NO: 187121 - DNA, 1293 bp, Homo Sapiens
  misc_feature (1020)..(1065): n is a, c, g, or t
ttggcaaatacataggaattttctttcttaaaaaacagtaatgaagactatatctcctttcccagcactgaatgttttactagcactgggtgctcaccatgcaactgaagaaaatgtggaaactcaaaaggtcaggacagacttccaagcacttgcaactgatgttactgtcttcaattttaataattacacatatttgtatatttcagagaagtttttaatatttctctgtccactttttataagctttaaaatgattttctctgccttgagatttgcatcaagaaaaagcacctctcttcacctgaaagctttgaagactagagacacgctttacacgttttaacaagtatattgagtccacgtttggtagcatcagttgttgagttaaaaagaaaattattgcatttgatctggatggattttaaaagaatataatgttcaatattaaaaggataattcacatttgccaccataatgttcttttttatgtaaaaagaagaacttggagacattaacatgaaaaagtcttttatcattagctcatgtatttgaggaagagcagctgtctttttatatgttttttgacaaatcatattgtattcttttgtacaaaaaagaactacttgtattctagaagaaatatgaaatgcttaatttataagcgggctggagattttttccaatattgttttctttgaaaatgaaaggggatcatctattttagttttggggtctgggaactttttgaaaatttaatttgtggaccaatgttttgtgaaagctaaagagggcaggggttaaaatagggcttgaatttctcattctgtatagaccagcaaacttccctgtgcaaggcaagtttacatcacaaatccaagaatgtttgcatcctaaatgctagtttgcttcagcccctagttaacctcaggacttggtttgcatataaaaggtagacagctgatatgttttcatgaataaatattgtcagccagaaaaggttggtgtcaggtaatgcannnnnnnnnnnnnnnnnnnnnnnnnnnnnnnnnnnnnnnnnnnnnnttgggaatggttttcaaagaactctcagttctgcctaggtgtttttgggggagccctgttttccatagtgtaattccatttaagaggttgtctaaaagtctttttaattaatagaaagattttaatatccaagagtagtcaaattaaggatataaactttccacacctttcctgtcgtgacagataaaagcacagaaaggacaacccttggaaatcatgtaacgttgg

SEQ ID NO: 187122 - DNA, 1242 bp, Homo Sapiens
ttggatcttgttcagtgttttaaaatataaatagaacagcagtgggttaagaaaataaatttactaagctcccccttttaaagccaatgatacagtcttaaatataagaaaataggctgggattacaggcatgcgccaccacacacagctgagacaaattaaagaaggcaaaaaaattgacagaaccgcagtgaagacagatttgaagaaacgagtttgtttttacgtatatgatgtgtatatttttacatctttgattttgtgtctgtatcttaaaatggaactaatttcagtcattttattaatccttctcagcaattaagtgtccattttttacaggatacagaaaagcaaaagggaaaacaagccatgcctgaaaaacatgaaagtgaaatgtctcaagtgaagcaaaaaagcaaaaaactcttaaatattaagaaagaaatcccaacagatgtgaaacccagttcattagaactaccatatactccccctttggaaagtaagcaacgtagaaatctcccaagcaagattcctcttccaactgcaatgacaagtggatccaaatcacgaaatgcccagaaaacaaaaggtacaagtaagttagtggataacagaccacctgccctagcaaaattcctcccgaatagtcaagaattaggcaacaccagtagctcagagggtgaaaaagactctcctccaccggagtgggattccgttccagttcacaaacctggcagctctactgatagtctttataaactttctctgcaaaccctcaacgcagacattttcttaaaacaacgccagacctcaccgacacctgcttccccgtctcccccagctgccccctgcccctttgtggcccggggcagctacagcagcatcgtcaacagcagctccagcagtgaccctaaaataaaacagccaaatggaagcaaacacaagttgacaaaggcagcctcgctcccgggcaagaacggcaaccccacttttgctgcagtcacggctggctacgacaagagcccaggtgggaatggctttgctaaagtttcttcaaacaaaacaggtttctccagcagccttggcatttcacacgctcctgttgacagcgatgggctcagacagctcggggtttgtggagtcccgtcagcaacccaaggcagccctgacttcactcccctcaattcgttctccgccttttgggaaactcttttatctaactggtgaagttttcagcaa

SEQ ID NO: 187123 - DNA, 1569 bp, Homo Sapiens
  misc_feature (973)..(1032): n is a, c, g, or t
taaaatgcttagttccttctaaaatcataattgcaatatggacttctgcttcacgctgcatctaaggcacaaatcaggtaacctacatctcccaaatgatcaacagagcactccatcatattttaccgtcaatgctgagaaattactcctgggcccagaagttgtcacataggtggcttgggttacttggtgctcaggcaacaactgccacaggccccagcttgatgaacaccatcaatttctttaaatatgttgatactaagatggaggcctctgctcagaggaagcaaggacgtaaacgctgggacagactgcactgagggtcactacactaacagacccagatgacacgatggaacgtgaatactgaagctgacaatcttctgaaaaatctctttttcaaaacccatacgcctaatcgagaaatcagggacagggaaacattcgcataattacccaccaacatgttcttcttaacagaagtgaagattattttaagaatatgaaaagtgtttcaagacatctgttttcagggatagaccagagcagcagaagtacttttcagagctggttcattttaaagtctatctcaagaacaagggcagcctgctttcacaaggtaccaagacatgttctggcaaaaacattttcactttaagttatatgctgtcaagttcaactattttatacatatctgatccttttctgtcagcaaaaaaggtacaatttttttaaaacttgaaaatcaataatttctgggtaggatgaaggtagaattttggttgtattttatacttcagaacacagatgaaaccaaaaggtctgcaattgtctctacattcacatctttcaaaggtccttttctccttttctccttttacatgaattcatatgaatcattgccatcctgatttgaagacatattttcaactttcattagtgatgaatagctcctaagttcatccatttcccnnnnnnnnnnnnnnnnnnnnnnnnnnnnnnnnnnnnnnnnnnnnnnnnnnnnnnnnnnnncattcctctcttcacgatctctgcattctttctctgctgataggtctgggaaccgctcgactttggtcttttctaatcggttcaggatctcatttactttcttctccactgtcacaatttttacatccttctgcctgtgaaagcctatctgccccacatccatgtcagctgttttcttcaggttagaccacggcgtatataccacattaacgttgttcatcttgcagccttgaatgctattggccttcacaaggtgggcacagtccatcagcacttcctttgggatgtcttctatattctctcccttatgtaatcgaaggtatacatgagccgaagagagtttgtccacatgaaaccagatatcttcaggccagccatgcttgatcagatcttcattttcatatttatcttttcccatgtaaatagtgtaggcagatgaattaacgctgctgctggtgaagtagaacaccatgatcccgggagcggtgcggtgactccaccgcggagcagcagcgctcaactcacgaagctcaccaa

SEQ ID NO: 187124 - DNA, 1132 bp, Homo Sapiens
ttggctccttggggactgcacgtctcacttctaagtttgcggcggagagaataaagcagaaagacaggaagaggaggtggagttctacagttagtgtggttttagtttttcctaagaagtggcgtggtttggggctttatatccgggaggagcatatgtacgcaaatcctggggcgtttgcaaacccggatccggggcgtctggccccatgcccggccgggcgtttgagggctactgccacgcagcgtttctggagcctgccggctggtgccctggtggcctttatctctgtccccctttgtcctctttatctcaggctctccaggaggccggggggcccactccgcctatcgctcccctcggctacgctgccacttcaatgccccgcaggtcgcgagctgctgttctttcgaaggcgtcggagaaccaggggcgtcccgcgccacctctgactcggagcagcgccgagcactgacgctcccgcccttgggcaaggacgccagtgcgcccgcgcgcgtccctctgcgcggcagcccgtcgcgggccctcaaggggaagcccaggccaggatggccccgggtcgcgcggtggccgggctcctgttgctggcggccgccggcctcggaggagtggcggaggggccagggctagccttcagcgaggatgtgctgagcgtgttcggcgcgaatctgagcctgtcggcggcgcagctccagcacttgctggagcagatgggagccgcctcccgcgtgggcgtcccggagcctggccagctgcacttcaaccagtgtttaactgctgaagagatcttttcccttcatggcttttcaaatgctacccaaataaccagctccaaattctctgtcatctgtccagcagtcttacagcaattgaactttcacccatgtgaggatcggcccaagcacaaaacaagaccaagtcattcagaagtttggggatatggattcctgtcagtgacaattattaatctggcatctctcctcggattgattttgactccactgataaagaaatcttatttcccaaagattttgaccttttttgtggggctggctattgggactcttttttcaatgcaattttccaacttattccagatgcatttggattt

SEQ ID NO: 187125 - DNA, 1813 bp, Homo Sapiens
  misc_feature (935)..(972): n is a, c, g, or t
  misc_feature (1592)..(1604): n is a, c, g, or t
gtgtgagccaccatgccagcctgctgttttgaaagaaacatttaatataatagaacatctacagaagaagtgataaaatatcattttaaataaggactgaaagcttatatttttcctctgctaaccccaactttcatatttaggttttaggagaagttttagcacaacttctgcttcttcccaaaaggagattaacagaagaaatgctttttccaaatcgaaagctgctttgcgtcgcagttggagcagcacccccaccgcaggtggcattgaagggagcgtgaagctgcacgaggggtctcaggtcctgctcacgagctccaatgagatgggtactgttaggtatgtgggccccactgactttgcttcaggtatctggcttggacttgagctccgaagcgccaagggaaaaaatgatgggtcagtgggtgacaagcgctatttcacctgtaagccgaaccatggagtcttagttcgaccgagcagagtgacctatcggggaattaatgggtcaaaacttgtggatgagaattgttaagcttctaaaatattaaataagctcaaatatatatatttggtgtaaataaagagtccatggtaaatggtttactttatttagccatattaaaattttgaaaatatagttatcttcttaaaaaccattataacaattcagagagagttctttacaaagccatgaatatgaactatggggaatcatggttcttttaaagcaattttcaaaataagtaccaattaaagctttaggttccaagaagattctgggactcaggaagaaaaagtgccatcaggtgaccagctgttgcatttcttgcttattctgttttgtttttgcacatcataatggatttttcttagtgccctaattgtgaagggtttctctagctttggttatgtgtaatgttcacgtgacnnnnnnnnnnnnnnnnnnnnnnnnnnnnnnnnnnnnnnctgtgctttattactaataagtccaatgagtgagtagtagctagatgactagtatgtagttttatattttggtaaaattatttgccctttcagaaatgcctcatctaaagatacatgataattttggagttggaaggggccttagaggctctccagctctgcttcttgcccattgccaaatactgaaatggaagcccgtcttacctggggtcactaactggttggttaactgagctaagaatagactgtgggtctcctcacttgtggcccagtgctctttctgctatacaaaatgtctaatctcagatttttcttctgctgcttgactgcttcatctggatgaactacaaaaaacccatgattaaggtttatgaattcaagtaataattagattttttttgcacagacttacttaacttccttattggatatgtttgtaacacataaacacaaagcacttttcaaacatgatgcacttttatctttgtgaataatttactgtcctttcctcctgggatatgagaaacattttaaaaaacgtatttaacaaaagagagcaaataaagatatatcaggaaggatgtattagttatttacttaaatgtttataatatctggannnnnnnnnnnnngttactcatagaactggtgttgtttgctgtttttatttctctaattgttgcagagttctgcctgttacaaagctacagaaactgtattgtttttattttccttcttgagcacatgttaacaaactagcttcacattagagtgatgtcataatgtaaaatgtttgcatttgtggttaaggtattgaaagtttatgtcctgtctgtgtaaa

SEQ ID NO: 187126 - DNA, 1205 bp, Homo Sapiens
ttggcaccatcctggcccggcagaaggagatgcacagctccctggagaaggtaaaacagctgattcgcctcatccacggcatcgacctctccaaacctgtagactctgaggccactgtgggggccatctccaatggcccggactgcaccccccctgccaatgccgccacctccacgccggccccttccccctcctcccagagctgcacagcgaactgtaaccagggggaagagactaaataacagagcccctctaggagaagccacgggatcccggcggcaaggagaacagaacactgaagactctagaaaagcaaagccggatttctggaaagtgcagaattcttttggttctttggttccagagagagagaagatgcttgtgccaggtggcaccagagtttgccaattgatccttcttattctgtgtgtacatgcaaagattggaccatgttacatgaaatagtgccagctggaggttctttgccagcaccatgccaagtgaaataatatatttactctctctattatacaccagtgtgtgcctgcagcagcctccacagccacgatgggtttgtttctgttttcttgggtggggagcagggacgggcggagggaggagagcaggtttcagatccttacttgccgagccgtttgtttaggtagagaagacaagtccaaagagtgtgtgggctttcctgtttctaaactttcgctactataaaaccaaaaaaaggaattgagatttcaccaaccccagtgcccagaagagggaaggggagtggctggagggagcagggggtgggacagtgtatcaaataagcagtatttaatcacctctggcgggggcctcgtgcaaggggagactgacaccaagaacagccagtaggttcttctcccctgcactctgctccctgcgcggtaaccccaccactcctgaagcctgcccagtctccttccttccctgcttggtgagtcgcgcatctccgtggttatcccgctgtctcctctccaagaacaagcagagcccgggccactggcccttgcccaaggcagggaagaaggatgtgtgtgtccaggaaggaaaaaaaggtggatcagtgattttacttgaaaacaagctccatcccttttctatatttataagaagagaagatcttgagtgaagcagcacgcgacccaggtgtgtgtgaattgaatggagac

SEQ ID NO: 187127 - DNA, 2270 bp, Homo Sapiens
  misc_feature (198)..(251): n is a, c, g, or t
  misc_feature (1583)..(1624): n is a, c, g, or t
  misc_feature (1785)..(1821): n is a, c, g, or t
ttggggcagcagcccccttgcaagaggcagtgcgcgcgaggccctgcgcccccagcagctcctccctggcgccgtgcatggagacgcggcccgccacccgccgctgagcccccgccgcccggctgggacccgccagggctggggtggcctcgggctccggccggccccgccgcccgagggctgcgcgcagcccgcggnnnnnnnnnnnnnnnnnnnnnnnnnnnnnnnnnnnnnnnnnnnnnnnnnnnnnngccgtcctgagcgccatggctcactccccggtgcactcgggcctgccccgcatgcaaaacctaaaggcagacccagaaaagctttttacaaaactagagaaaattgggaagggctcctttggagaggtgttcaaaggcattgacaatcggactcagaaagtggttgccataaagatcattgatctggaagaagctgaagatgagatagaggacattcaacaagaaatcacagtgctgagtcagtgtgacagtccatatgtaaccaaatattatggatcctatctgaaggatacaaaattatggataataatggaatatcttggtggaggctccgcactagatctattagaacctggcccattagatgaaacccagatcgctactatattaagagaaatactgaaaggactcgattatctccattcggagaagaaaatccacagagacattaaagcggccaacgtcctgctgtctgagcatggcgaggtgaagctggcggactttggcgtggctggccagctgacagacacccagatcaaaaggaacaccttcgtgggcaccccattctggatggcacccgaggtcatcaaacagtcggcctatgactcgaaggcagacatctggtccctgggcataacagctattgaacttgcaagaggggaaccacctcattccgagctgcaccccatgaaagttttattcctcattccaaagaacaacccaccgacgttggaaggaaactacagtaaacccctcaaggagtttgtggaggcctgtttgaataaggagccgagctttagacccactgctaaggagttattgaagcacaagtttatactacgcaatgcaaagaaaacttcctacttgaccgagctcatcgacaggtacaagagatggaaggccgagcagagccatgacgactcgagctccgaggattccgacgcggaaacagatggccaagcctcggggggcagtgattctggggactggatcttcacaatccgagaaaaagatcccaagaatctcgagaatggagctcttcagccatcggacttggacagaaataagatgaaagacatcccaaagaggcctttctctcagtgtttatctacaattatttctcctctgtttgcagagttgaaggagaagagccaggcgtgcggagggaacttggggtccattgaagagctgcgaggggccatctacctagcggaggaggcgtgccctggcatctccgacaccatggtggcccagctcgtgcagcggctccagagatactctctaagtggtggaggaacttcatcccactgaaattcctttgggcatttgggnnnnnnnnnnnnnnnnnnnnnnnnnnnnnnnnnnnnnnnnnnaaaagtcaacgagagccttcgctgactccaccgaagaggtgcgccactgggagccaccccagcgccaggcgcccgtccagggacacacacagtcttcactgtgctgcagccagatgaagtctctcagatgggtggggagggtcagctccttccagcgatcnnnnnnnnnnnnnnnnnnnnnnnnnnnnnnnnnnnnnaccatagtgcacatattccaggaaagtgtctttaaaaacaaaaacaaaccctgaaatgtatatttgggattatgataaggcaactaaagacatgaaacctcaggtatcctgctttaagttgataactccctctgggagctggagaatcgctctggtggatgggtgtacagatttgtatataatgtcatttttacggaaaccctttcggcgtgcataaggaatcactgtgtacaaactggccaagtgcttctgtagataacgtcagtggagtaaatattcgacaggccataacttgagtctattgccttgcctttattacatgtacattttgaattctgtgaccagtgatttggggttttatttttgtatttgcagggtttgtcattaataattaatgcccctctcttacagaacactcctaatttgtacctcaacaaaatgcaaatttt

SEQ ID NO: 187128 - DNA, 1713 bp, Homo Sapiens
  misc_feature (1147)..(1161): n is a, c, g, or t
ttgggatgcatatggtacaatggcacccagtgtaaagcagctacaattaggagtggatgtgttctgtagcatcctatttaaataagcctattttatcctttggcccgtcaactctgttatctgctgcttgtactggtgcctgtacttttctgactctcattgaccatattccacgaccatggttgtcatccattacttgatcctactttacatgtctagtctgtgtggttggtggtgaataggcttctttttacatggtgctgccagcccagctaattaatggtgcacgtggacttttagcaagcgggctcactggaagagactgaacctggcatggaattcctgaagatgtttggggtttttttctttcttaatcgaaagttaacattgtctgaaaagttttgttagaactactgcggaacctcaaaatcagtagatttggaagtgattcaaagctaaactttttccttggccctccttgtgttctaattgcttgcaagtgtaatactaggatgtccaagatgccagtttttgcttctttgttagttgtcagctgcttttatcaaatttcaggccattatccaacaaacactataaaaatgtttgaacaattggatttcaaacattttcgttttgtggagtggtgctcaccaagtggtacagccctaagcaagtgaacacaaacacatttaagtgtattttgtctgattagatgttagccagttatgctatttcattcaaatgtctgaaaaaatcaattgactattcccttttcctaaagggcagagacagataatctcacttccagagaaatgacttggagaaaaaaaagtgttggtctttttgctcttttgtaattaaatccggatgtacctcaaaagacttaagactgtggtgataagatgctttcctcagcagaaaggagggaaaaaaaacaactggaactcaaagcttgaaattctgtggcaaaacatgagatgtccaggattggaggttgaaaagatttcactacagtgttctgcaatagttggagcagataactttcagtgtagccacagccatggactccagatttccagattttcaagacctggacctggaacccgaaagagcttgtcacgatgcggcaggaacactggaggtagannnnnnnnnnnnnnngaattttgggactgttgaccttgctgtgagaaaagagacaacgactgagcaagcactaccaccagcactgttactgggaattagaagacctgagtttctgtccagaccctcagtgcaaactgaggatgctccatccaaagtgaattatgtcctgtgcctcctgattgctgagtgttcacctggaccttctgactaccttccctgtgctattccatcagcctacagacctggtacctggatttttgcccgagatgattcctaccaccttactactgacgaagacacccattccagtggaccactgtgacccaggaggcattcagccatcatgatgtggcctttacctccactcctgtcttgttctacccagattcagcacagccctttatagtgaagtcagagtcctcaagccaaatagctaaagctgttttatcacaacaaagggcctagtttgttccatgagtgtgcatttcatttcttcagttaaagccttcagagacacacaataatttggaccagggattttttagttattaatgctctctgaagaaa

SEQ ID NO: 187129 - DNA, 3166 bp, Homo Sapiens
ttggatagcctcaatttatggagcatcatgaagaactgcattggaaaagaactctctaagatccccatgccggtaaactttaatgagcccttgtccatgcttcagcgccttactgaagatctggaataccatgagctgttagaccgagctgcaaaatgtgagaattctctagaacagctctgttatgttgcagctttcaccgtgtcctcctactccactactgtcttccgcaccagtaagccattcaacccactgcttggggagacctttgagctggaccgattagaggagaatgggtaccgatccctctgtgaacaggtgagtcatcatccccctgctgctgcgcaccatgctgagtccaaaaatggctggacattgcgtcaggaaatcaaaatcaccagcaagtttcgaggcaaatacctctccattatgcccctcggtaccattcattgtattttccatgcaactgggcaccactacacttggaagaaagttaccacaactgtacacaacattattgtgggcaagttgtggatagatcagtctggcgaaattgatattgtgaatcacaagacaggagacaagtgtaatcttaaatttgttccttatagctacttctctcgggatgtagcaagaaaggtgacgggggaagtgacagatccatcaggaaaagtccactttgctcttctggggacgtgggatgagaaaatggaatgtttcaaagtacagccagtcattggggaaaatgggggtgatgctcgacagagaggccatgaagcagaggaaagcagggtcatgctgtggaaaaggaatcctttaccgaagaatgcagaaaacatgtactacttctcagagcttgctctgactctcaatgcttgggaaagtggcactgcccccacagacagccggttacgacctgaccagagactgatggaaaatggacgctgggatgaagcaaatgcggagaagcagcgcctggaggaaaaacaaagactttccagaaagaagagagaagcggaagctatgaaagccacagaggatggcacaccatatgatccctataaggcactgtggtttgagcggaagaaggaccctgttaccaaggagttaacccatatttataggggagaatactgggagtgtaaagaaaaacaggactggagctcatgcccggacattttctgaaacggcagtaacaaaaaagaggagcatataatggagaagaggacagaggatgtgtgggaaagctggaagttgtgactctcttaccaagtgctttcctcaagtttgtctctcttgaccaatcattttttccaaatcaatcaccagaaggagacaccagtggtggtgattggctggttgccttagctgattgaaactgaaatcgacataggagatactatgtctgtaagggagaggtttagtggccgaaggttagtgttattccacatccacgaagtcaagtattcttggctcttctttctccctctgcccccatttaagacaatgtcactcaccctccccttgtagtatcctgctcagccaagatctgcctaagattatgattcaggggcattttggtgctgttaaaagcaagagccgaatttagaagttcccttaaaaagaaacacataagacttaccaatggaggcattgtgaatggttgcagtggagcttagtataacatcatcaagtgtgttcacacgcggggtcggtttaatggagtgtccacgcggagataactgcgatattggaacacctgtgagagagattgttctatagggctggaatattcagagttacattcttggaagtttctgtttttacttgcatcaaacacccctctgttgttctccatcatctttaatagcaactggagaccactttggtcattggtaagggggtgcattctcctcacaaaggggttttatggacttcctcaggcggagagcttctgagaacacaggcaggatggaaaaagactactagccacttttgctttcccaaccccccttaatgccatccttcattgtctttctggcttctcttcttctggcacagtaccattttgggtctgtgccccagtgtggagcaaaacattgcctgtcccattctgatatacttcagaatttgagagcagaagttaatgtggaacaaaagttttcaccatctctcaagccccaaggactggagccacctctggaataatgtgttaaatatctgtatattatatatatgtagagaaaaatctaattttttggtttgatttccttcccattaagaatcttgttttttgatacccttgtctccctgagactctttcttggacacgtgttgatgtggatggcactcctgctctccatcttttatgggcagagagatttcaaaacctgagcaggatcatgtctggcagttactaaacagggactttgtccatggtttgtatcatggggtgcctactgctgtctaaactctgctctcctaattagctgactcttgaaaatgaaatcctaacctctttcctgcctcttttctttctcttttcaggaagagtgtgggtagaaagtccggagggcaacttccaatttaattctgctctgtccggcgcataggctgaattccaaaagaactttcttcctaggatgtggggcttaaagcaccgtcatgtggggtggatcagataattgctcctgtggggccctggcttccttctctgtttgtgcagtatttgtttttgttgtcttgttgagaaatatcccctgtgcaacccacccttggttgaggatcacaaattgaggtgccttccttgtatgctttttgttagtattttttgtttttgttccttaactgctgagcctcagccagcgtgggtcctgggggaaataccattccaaaggaagccatccctatggggaaattggttttactgggtaaattaatacttttatttcttcccctatcccttccttcctagttgtgataaacatgggagaggagtgactttgactgctggggaatttcctcctaagaaccttattcccaaaataagccagggattatgtcaagggcttctttcaaggaggctcataaaaacaatgacctcatccggggctttggaaagagtgagaattccccaactaaattggactctctgctttatcccctt

SEQ ID NO: 187130 - DNA, 389 bp, Homo Sapiens
ttggcctatggggaccatataaaaaattactgggtaaattaatacttttatttcttcccctatcccttccttcctagttgtgataaacatgggagaggagtgactttgactgctggggaatttcctcctaagaaccttattcccaaaataagccagggattatgtcaaggcttctttcaaggaggctcataaaagcagtgacctcatccggggctttggatagagtgagaattccccaactaaattggacttctctgctttatccccttctcttccttcaccatctgcactacatttctggctgatcccaatcagattcccgctaatggaagaagtttagaatctttcaggtggaataaagtcacatgaaaacaaaacacaactatata

SEQ ID NO: 187131 - DNA, 1199 bp, Homo Sapiens
ttggagatggagctccgattggtgtcatggaccaaagtcttatgaaggattttcctggcgctgctggggagatttcagcctatggacctggacttgtcagcattgccgtggtacaagatggggacggcaggagggaagtgagaagcccaactaaagccccacatttgcagctcattgaaggaaagagttcacatgagactctgaatatagtggaggagaagaagcgggcagaggttgggaaagacgaaagagtaatcacagaagaaatgaatggtaaagagatatcacctgggagtggtcctggggagattcgtaaggtggagcctgtgacacaaaaagactccacctccctgtcttctgagagcagcagcagcagcagtgagagtgaggaggaagacgtgggagagtaccgtccccaccaccgagtgaccgagggcaccatcagggaggaacaggagtatgaagaagaggtggaggaagaaccccgcccggcagccaaggtagtagagagggaggaagcagtgcccgaagccagcccagtcacacaagcaggtgccagtgtaatcacagtagaaacagtgatccaggaaaatgtaggtgcccaaaagatacccggagagaagagtgtacacgaaggcgctcttaagcaagacatgggagaagaagcagaggaagagccacagaaagttaacggagaggtgtcccatgttgacattgatgttttgccacaaattatttgttgttcagagccaccagtggtaaaaacagagatggtaacaatttctgatgcctcacaaaggacagaaatctccaccaaggaagtccccattgtccaaactgagaccaaaaccatcacatatgagtctccacagattgatggcggggctggtggtgattcgggcacgttactgaccgcacaaaccatcacatctgagtccgtgtcaacaacgacaaccacacacatcaccaagactgtaaaaggtggaatttctgaaacaagaattgagaaacgcattgtgatcacaggagatggagatattgatcatgaccaggcactggctcagcgatcagggaagccagagagcagcaccctgacatgtcggtcacagagtggtggtacacaaagaaacagagttggctgagaaaggaagattaagtaagaaagtcatttttaacacactcaactttgtgaaccctga

SEQ ID NO: 187132 - DNA, 1460 bp, Homo Sapiens
tttggctgcaacagatgtggctgatcagccaaggggatggcttcagccagaggcacttcaaatggatttgggggtatacacccaaggaatgtcatggagtctgaacgtcggaaaaatggatggttttggccagtttctgcaggaagagagtcatcatcttatcattcaaagtagcactttgattggtgtcatcatcattttcatgttctgaatcttcattatcaatacccagttccaagagttctcgcgtccttttgcgttctagttgaggtgtatccaatgttgtctgctgattcattgccttaatccagtatataagtgcttgaaaaacatatgccacatgcttcaatgagcaaacatccaaaactggaagaacatcagaatgctcatcattatgagaccgcattagagacagagcataatttaggaagtctcctcgtgcagacatcattccttgacgggcgctaagcaaggtggcacgtcgtctgccttcaagtgttcgtaagctagcttcttctcgcgcagtcatcctctctcttctcgctgaattctgagaagcgtgaagaggatgatttggatgtccaggatcaccagcagatgctaatgcagaaccataacgtaattgagcttcagtagaatccataatactgaccatccagttccaagtgggaataagcttttcttctacatagttctgtaagtttactgcatcttggtaagtcaatttcacagctgctggaatctgagagtatactaggtgattatacttaggaataaggcccatcaagtccgagatttgtctaatgacaatgctgtaagccctggctaaactgcttgcagatgttaggtaactgctggcgttgctagcttccaaagcagctgctgcagctgcagcacttgtactgatggtaccaccccggcgtaagtttgaaggatcaatataaatcaaacccgctgaacttgctgctggtgtagatgtactggaaggggctgtactggctgctcgctgatgctgggtgttgcggacagcccactgcattgaacggggagcttgggcagcaccattggcatgggagctatttgtggttctttctaatggctcatcaagcataaaggtctcctgttctatgtcgtcactctgactactactgctatcagaatcacttgagtcattcgattgagaatcatcttcagaaaagaaggcaggaacactgcttgctcctgcttctgaaccagcagttgctgcagtgacaacgcttctgcgcccactagcattatcttggttgctgtggttactttcactatcactttctgtttcagctgctgctaacaagtccagctccatatcactcccgtcttcatcatgctcatcatgttgtccctctgcctcagcattttcttccccgtgttcttcctgttcatcatgatgatcctcttctccagccacaccctccacccaa

SEQ ID NO: 187133 - DNA, 2036 bp, Homo Sapiens
  misc_feature (135)..(148): n is a, c, g, or t
  misc_feature (1631)..(1640): n is a, c, g, or t
ttggctctctctgcctccacaggtacttgctgttctatcacaaacagttcctggaatacgagtagccttatctgcagctggtcagaaaaacaaaggcaatgcattggcaagcctcacaaagtgatcctccctggnnnnnnnnnnnnnnaagcctcccaccgcctccccggcctggtgacaccacctcccatgcagatgtggcccctctgcacctgggacccatcgggtcgggatggaccacacggacggggaggctcctggaggtgctttgaagatggatgagatgaggggtgtgctctgggtgggaggagcagcgtacacccgtcaccagaacatctcttgtgtcatgacatgggggtgcaacgggggcctcacagcacagagtgaccgctgcctggcgttccccagcactcggtgtggaaaggcccctacctgctgtaagattatgggtccatgaaagcagtaagctggacacagaggtgtagtgtgcgggacagagggccttgcagatgcctttctgttggtgttttagtgttaaaatacggagagtatggaactcttcacctccattttctcagcggctgtgaagcagcctcctagcttcggaagtacggacactacgtcgcgttttcaagcgtgtctgttctgcaggtaacagcatcaagctgcacgtggaagcatctcgcggttttctagaaacaggcattttcttatccctctcccgctcctttttccacaaaggtgaatttcataaatgtaatactagtaaagtgaatgaattactgagtttatacagaaatttaggtaacttctcctttagtctcaagagcgagtcttgctttttaatgggtgccgtttatgttgctgcccgccctgtgtgcctggctcctctgggtgccttggtgtctgctggtggctggcagtgggcgcagcggaggagagttgtgctgcagctcatacggtgtgtctgtcatctcagtctggagtaaatgcagtgtctgccggtgtctgatgggttctgtccctcgtattttctttgccttctatcccattgcctggctaccgctgcctggcagccaagggtgttggtcgcgaagctggagtggcctctggtggagcctgcatcttgtctcgtctgcctctgctttacatttggtgtactttcgggcgtggtggcagtaaaatgacaccgtgattgagcttgtcagcagagctgaaagagaaagtagaaggatgtgcattgtttcttgtaagatatcttgcatgtatctgtgtattcaaattcaaacagagatggtttgtccatttgtccactgagaaattataaactagggacaagggggaggaaaagtactgaaatacagtttatgaagcaagtgtgtctcgggctgtgcttgtcccaggagccccagcagcatctgaactgaggcttcttcagtcctgcaggaacaggatcatctgtctcagcggtgggcagatgttttcatagacagccagggagtaaacactgttggctctgtgggctgtatggtctctgccataaatagtacagagatgtggctgtgtctagtacaacttttagacacagaaatctgaatgacatatattgttctgtgtcaagaaacttagannnnnnnnnnaactatttaaaaacgtgaaacctattcttagctcacaggccatggagaagctggtggggaccagacccagctccttagctggctgggctggggagggggcagtgacagtggcagctgctactcactgctcagtgtggaaaacacaggacttggcaatcacagcccgcagaaccatcatgtgtggcagaagcctgagggatgcggtttcttgcccacgtgctctgttcattttctgttgtttttctgcacttaaagaattcacatggaagcatgttttataaaatgaattaccagagaaacagagatgggccgagattctcagaaatggtcccatgtgaccaagttctgctgtttgggtgacagtgctttgaagatctcctttgaggatgtgcagtc

SEQ ID NO: 187134 - DNA, 1495 bp, Homo Sapiens
ttggcaaagaagcatattcacgagcatgcgaaggcgaagcggcacaacctggccattgatctgatgtatggaggcatctactgttttctgtgccaggactacatctatgacaaagacatggaaataatcgccaaggaggagcagcgaaaagcttggaaaatgcaaggcgttggagagaagttttcaacttgggaaccaaccaaacgggagcttgaactgctgaagcacaacccgaaaaggagaaagatcacctcgaactgcaccataggtctgcgtgggctgatcaaccttgggaacacatgcttcatgaactgcatcgtgcaggccctgacccacacgccacttctgcgggacttcttcctgtctgacaggcaccgctgtgagatgcagagccccagctcctgtctggtctgtgagatgtcctcactgtttcaggagttttactctggacaccggtcccctcacatcccgtataagttgctgcacctggtgtggacccacgcgaggcacctagcaggctacgagcagcaggacgcccacgagttcctcatcgcggccctggacgtgctccaccgacactgcaaaggtgatgacaatgggaagaaggccaacaaccccaaccactgcaactgcatcatagaccagatcttcacaggcgggttgcagtcagacgtcacctgccaagtctgccatggagtctccaccaccatcgaccccttctgggacatcagcttggatctccccggctcttccaccccattctggcccctgagcccagggagcgagggcaacgtggtaaacggggaaagccacgtgtcgggaaccaccacgctcacggactgcctgcgacgattcaccagaccagagcacttgggcagcagcgccaagatcaagtgcagcggttgccatagctaccaggagtccacaaagcagctcactatgaagaaactgcccatagtagcctgttttcatctcaaacgatttgaacactcagccaagctgcggcggaagatcaccacgtatgtgtccttccccctggagctggacatgacccctttcatggcctccagcaaagagagcaggatgaatggacagtaccagcagcccacggacagtctcaacaatgacaacaagtattccctgtttgctgttgttaaccatcaagggaccttggagagtggccactacaccagctttatccggcagcacaaagaccagtggttcaagtgtgacgatgccatcatcaccaaggccagcatcaaggacgtcctggacagcgaagggtacttgctgttctatcacaaacagttcctggaatacgagtagccttatctgcagctggtcagaaaaacaaatgcaatgcattggcaagcctcacaaagtgatcctccctggccacccccctcccccaagcctcccgccgcctccccggcctggtgacaccacctcccatgcagatgtggcccctctgcacctgggacccatcgggtcggga

SEQ ID NO: 187135 - DNA, 1747 bp, Homo Sapiens
  misc_feature (1605)..(1615): n is a, c, g, or t
ttggcaaggtggacaactggaagcagaacctgcgggccatctaccagtgcttcgtgtggagcggcacggctgaggcccgcaagcgcaaggccaagtcctgtatctgccatgtctgtggcgtccacctcaacaggctgcattcctgcctctactgtgtcttcttcggctgtttcacaaagaagcatattcacgagcatgcgaaggcgaagcggcacaacctggccattgatctgatgtatggaggctcctggaggtgctttgaagatggatgagatgaggggtgtgctctgggtgggaggagcagcgtacacccgtcaccagaacatctcttgtgtcatgacatgggggtgcaacgggggcctcacagcacagagtgaccgctgcctggcgttccccagcactcggtgtggaaaggcccctacctgctgtaagattatgggtccatgaaagcagtaagctggacacagaggtgtagtgtgcgggacagagggccttgcagatgcctttctgttggtgttttagtgttaaaatacggagagtatggaactcttcacctccattttctcagcggctgtgaagcagcctcctagcttcggaagtacggacactacgtcgcgttttcaagcgtgtctgttctgcaggtaacagcatcaagctgcacgtggaagcatctcgcggttttctagaaacaggcattttcttatccctctcccgctcctttttccacaaaggtgaatttcataaatgtaatactagtaaagtgaatgaattactgagtttatacagaaatttaagtaacttctcctttagtctcaagagcgagtcttgctttttaatgggtgccgtttatgttgctgcccgccctgtgtgcctggctcctctgggtgccttggtgtctgctggtggctggcagtgggcgcagcggaggagagttgtgctgcagctcatacggtgtgtctgtcatctcagtctggagtaaatgcagtgtctgccggtgtctgatgggttctgtccctcgtattttctttgccttctatccctgcctggcagccaagggtgttggtcgcgaagctggagtggcctctggtggagcctgcatcttgtctcgtctgcctctgctttacatttggtgtactttcgggcgtggtggcagtaaaatgacaccgtgattgagcttgtcagcagagctgaaagagaaagtagaaggatgtgcattgtttcttgtaagatatcttgcatgtatctgtgtattcaaattcaaacagagatggtttgtccatttgtccactgagaaattataaactagggacaagggggaggaaaagtactgaaatacagtttatgaagcaagtgtgtctcgggctgtgcttgtcccaggagccccagcagcatctgaactgaggcttcttcagtcctgcaggaacaggatcatctgtctcagcggtgggcagatgttttcatagacagccagggagtaaacactgttggctctgtgggctgtatggtctctgccataaatagtacagagatgtggctgtgtctagtacaacttttagacacagaaatctgaatgacatatattgttctgtgtcaagaaacttagannnnnnnnnnnaactatttaaaaacgtgaaacctattcttagctcacaggccatgggagaagctggtggggaccagacccagctccttagctggctgggctggggagggggcagtgacagtggcagctgctactcactgctca

SEQ ID NO: 187136 - DNA, 1211 bp, Homo Sapiens
  misc_feature (320)..(335): n is a, c, g, or t
ttggcacggggccttagtgggaacaggtggagaccagcacttccctttcctgctgctgaggtagggattggggggtcagaacccactcacttttgcctgttaaagttgccctcctgacgctggcagctctgccttggtcactggggatgcggctcgttgctcagccaccagtggccttgcggtattgtccaccatccactagagtgggatgaagtccagagtgtgggtatacatctcagatgcccatctacccactggggacttcaatgccagctgcatttggtttggttttcttaactgttggcttctccccacagcgnnnnnnnnnnnnnnnnaaacattcatattgttttcaaacttggaattcatagacactctggctctaggttccttaagggggaaaacaaaagatgactttatttcacattcaagaaaatcagttcagttccaaagctgtggtccttccagccacttctagggacactggggaaccttgttaaacgttgacatcagtgctctccagccgtgctgtcaccctcctatcttctggatctgccttcgggatggtcagtgacagcttctggaagctgagcacacacaggtgcacagccatgctgtggtctggcctgctacggcagcatggcagctctggtggagccttctcccttgccatttggttcccctgtgccaagtagctgcaggctgcccctcaaatcttcatttgtcccttttcacttcctgcagaacaagcctgggttagagggtctgctggaaatggcctttgaagaccaaggataccaggatgtgtgcactctgtcgtgttctgtgatgaatgggaaacgtaggcttccagaaagccagctctcttctgaaatgtgacggacctaagcaggaagtcatccaggacaggagtggctcagtgttggggatggacgctgtcgcccagccatgctccaccagggccaccaatgtgtagttggctggtggtcttcgggcatgtgagacctgctcttcactgtttccaccccacttggtggcctccaggatggtagtggcaccctcagagccccatcttcagcatgttctgaagcctcagagtggaaattcctgctaaggctctgtgtggacgcctttctcccgtgatctaaaggggacactgtactcaagcttttgacctcatgccttgtgtagtaaaaaaaggatttgggggt

SEQ ID NO: 187137 - DNA, 1275 bp, Homo Sapiens
  misc_feature (436)..(451): n is a, c, g, or t
  misc_feature (1142)..(1150): n is a, c, g, or t
  misc_feature (1194)..(1207): n is a, c, g, or t
gcagaccctttaacccaggcttggtctgcaggaagtgaaaagggacaaatgaagatttgaggggcagcctgcagctacttggcacaggggaaccaaatggcaagggagaaggctccaccagagctgccatgctgcccgtagcaggccagaccacagcatggctgtgcacctgtgtgtgctcagcttccagaagctgtcactgaccatcccgaaggcagatccagaagataggagggtgacagcacggctggagagcactgatgtcaacgtttaacaaggttccccagtgtccctagaagtggctggaaggaccacagctttggaactgaactgattttcttgaatgtgaaataaagtcatcttttgttttcccccttaaggaacctagagccagagtgtctatgaattccaagtttgaaaacaatatgaatgtttnnnnnnnnnnnnnnnncgctgtggggagaagccaacagttaagaaaaccaaaccaaatgcagctggcattgaagtccccagtgggtagatgggcatctgagatgtatacccacactctggacttcatcccactctagtggatggtggacaataccgcaaggccactggtggctgagcaacgagccgcatccccagtgaccaaggcagagctgccagcgtcaggagggcaactttaacaggcaaaagtgagtgggttctgaccccccaatccctacctcagcagcaggaaagggaagtgctggtctccacctgttcccactaaggccccgtggtatcctggcagaagcctctgcatgtatctgcgctctgaggatgggggtttgaaaacaaaataagaccctacgtcctactaccttgagcttggctctaaaaccacgggaaaggaagagatatattgcaccttaaaacatctctgcactaagaactgcatttcattagaccaaggaggggttggggcgctgggaggcctgaggcctgccctcagccccccaagtctcatttaaaacctgcatctcagcgaagagactgcagctcaggtcacacagaggtggtgactgcaccgaacttcacatgcaatttcctggcctttcctgcacagaattaattcagacattatatataaatagagcagtgaaacatttacttcnnnnnnnnncacctagacctacaacatcaatacatataaataaattctagtgnnnnnnnnnnnnnnatttggggtgggggaggagaaaggaaggaaataccaggtaagagaaaagggctggagaacaggtgacc

SEQ ID NO: 187138 - DNA, 1181 bp, Homo Sapiens
  misc_feature (44)..(52): n is a, c, g, or t
  misc_feature (743)..(758): n is a, c, g, or t
cactagaatttatttatatgtattgatgttgtaggtctaggtgnnnnnnnnngaagtaaatgtttcactgctctatttatatataatgtctgaattaattctgtgcaggaaaggccaggaaattgcatgtgaagttcggtgcagtcaccacctctgtgtgacctgagctgcagtctcttcgctgagatgcaggttttaaatgagacttggggggctgagggcaggcctcaggcctcccagcgccccaacccctccttggtctaatgaaatgcagttcttagtgcagagatgttttaaggtgcaatatatctcttcctttcccgtggttttagagccaagctcaaggtagtaggacgtagggtcttattttgttttcaaacccccatcctcagagcgcagatacatgcagaggcttctgccaggataccacggggccttagtgggaacaggtggagaccagcacttccctttcctgctgctgaggtagggattggggggtcagaacccactcacttttgcctgttaaagttgccctcctgacgctggcagctctgccttggtcactggggatgcggctcgttgctcagccaccagtggccttgcggtattgtccaccatccactagagtgggatgaagtccagagtgtgggtatacatctcagatgcccatctacccactggggacttcaatgccagctgcatttggtttggttttcttaactgttggcttctccccacagcgnnnnnnnnnnnnnnnnaaacattcatattgttttcaaacttggaattcatagacactctggctctaggttccttaagggggaaaacaaaagatgactttatttcacattcaagaaaatcagttcagttccaaagctgtggtccttccagccacttctagggacactggggaaccttgttaaacgttgacatcagtgctctccagccgtgctgtcaccctcctatcttctggatctgccttcgggatggtcagtgacagcttctggaagctgagcacacacaggtgcacagccaatgctgtggtctggcctgctacggcagcatggcagctctggtggagccttctcccttgccatttggttcccctgtgccaagtagctgcaggctgcccctcaaatcttcatttgttccttttcacttcctgcagaacagccttgggt

SEQ ID NO: 187139 - DNA, 1581 bp, Homo Sapiens
gaaactgggcttcaaatgcatcttcattttgatctagagattgccattcatctttgtcatcagaaatatcaggaagtgtaggagctgaaacatattcatgatgaaactaatgcttcttttgtgtgcacggtgggtgatggctgcactttggatggcgttgttgaaccattcccagtgatgtgtttggagttgtgtgaaaagaacttgtgttggcaaccttatgtgtttcacacccttctttgatctctgctccactctgtggcttgaattcatgagtactcttattcacacatccagcatctttgctggccactgcaaacatggagtctgttactgtctgggctttcaaaggaacaggaggagcaatgctctggctggtggctggggacaccaaagctgcagaaatagcatttgccaaaggaggaacaacaggaggtgcctctcttgggttcttttccatgttcactggtgtctgctgataggttactggaagacatggcgctctcagttcctgctgggagcctacacttggccccatacgtgctggattaacctcggacctttcctgggaagcgggcagatcctcatgggatgtctccaccacctgatgcaacttcttatgaagttcatccattttctgttttaatagctgttcttcaaaagcatttgcttctttccttttcatataatgtctgtcttcatttacccattgctcatgctttctccgttgattgtatttctgggctctcaattcttcaaaggaaaattctgattccccacgaataagcttctccttgcaatacataacaacctgctcaacatcaactttggatgccaaagatgagtgcacagaatattctgatttagaaatcgtgatcactcttcgttccatatttgactctttatcacaagctgaagatatcactccagaaagctctgaaccctgattcttagaaatgcaggccatgttatttcctggatttgattttgatgttatcatttgatttaaaacctgaacattatgcagaggttctgaggttctagcttgagctggcaaatgggtttcagtgaggcgtgtctgaaataacctgtattgttgttgcaggaactctctgggttcagcctggttttgaattcctctctgaaggacagcactggcatgctgcagctctccttgggcttccagatgccccgcccaggcaatgtacagaggggatgacagggttccaatcccatggttgtacagaaactcaaaaaattgatggaggtcactgttgtactcagcaaattttaaacaataactgatgaatcttgggtcattgtggtatttcttcttatctaaaaattccttcattaaatgttctagtaaagttatcaagtattctttattctcaggaaaattctcttctacccactgtatgtatctttcccattcaccaagagggtcattgcccttgtagctctgcatgtgggcttcaagcatctgaaggacattttccggggtgtccatggccagaggacgctggccggcagcggccaaacctgaaccgcaaactagaagccaacttttttgtacaaagt

SEQ ID NO: 187140 - DNA, 1424 bp, Homo Sapiens
  misc_feature (321)..(365): n is a, c, g, or t
ttggtgcctccagctgtgatatctcagatgctgctgcttgacaatccacacaaagaacctatccgcttacggtacaagctgacattcaaccaaggtggacagcctttcagcgaagtaggagaagtgaaagacttcccagacctggctgtcttgggcgcagcctaacttttcacaagatggacccttcatttcaagcttaggctggcgttacttttgctgtctagtcaggactaatcacggtgtttcagtgcggagtgccaagagtcctatcctgacgtcaggctctgggtgtcaacctctgacttattctgcagatgctcnnnnnnnnnnnnnnnnnnnnnnnnnnnnnnnnnnnnnnnnnnnnntcggggagagggtggtagcacagggcttgggatatcggcagtgtgggaaatgcgaagcatttctcatcatcatcatctctgctacagtcatgtttctgcatgtcagcgagcgacactgtccctgcctcaggttggaggttttatcagccaaagtgtttttttcatgtatcgttcgttccattcatccactctgtgccttgtcagcctttgaaaggcttggttgctcccaggctgctgttctcagggaccttaaaagggacctggttagtcttggggcagagagtatctacttgggcactctcttccaagaaagaccttgtctccattttcattagacaatgcttcttgtgtgtgttctggaagatcttctaaatggaatgcttgttgcactgttcccaggcgagtggctgccatgagacctgaggaccacacttgggggaccaatcatgtccttcaccactgtgccttagaatcgcccctggacagagttcctgggcagaggggaaagcagctcccaggccttactcaggcctcaggtccatgggttgggcagccagtctgggcccttctcaggatcctcatctccatcctcatcctcttccttcacagcatttacttggagctctttgtgacacaccatgtcagtcatgatgaatcggccaacagccagcccttgccagctgacgtcacagtctaagatgggaaactggtacagatagacatgaagagagcttagcagtgattgaggtggtgactaaatatacagtcattgaataaataccatgtagcaagtgtactttgtggagtgttgagtaagtggaaaatggaaagccagttgcatttagagatgataggcctaaagggaactgtcttctgtcgagaagtaaaggaaacttcatgaaggatgtagaagcttagctgcctcaaagaagagagaacctgaagatctgaggcaagctggacaggagaggtagatatttgttgatggaagaattcaagtttataatcaattcccacttatcacctactgtgtgctaagaaacttgaatgtgtatgttt

SEQ ID NO: 187141 - DNA, 1944 bp, Homo Sapiens
  misc_feature (1548)..(1572): n is a, c, g, or t
actttgtacaaaaaagttggcaaggaattatacaacaagaccctaaactaccagtggatgaaaatcttacccccaccatctccctggcccaagagctccatctttgatgctgatgaagaaaagtccaagcttctgacaaggcttctaaagagcaaccaccccgaggaccttcaggctgcaaaccggttaatcaagaatttggtcaaggaggaacaagaaaaatcggagaaggtgtccaagagggtcagtgcggtggaggaagtgcgaagccatgtgaaggtgctgcaggagatgctgagcatgtaccgcaggccagggcaggccccgcccgaccaggaggccctgcaggtcgtgtatgagaggtgtgaaaagctgcggcccacgctgttccggttggcgagtgacaccactgatgacgatgatgcactcgcggaaattctccaggcaaatgacctcctcacccaaggagttctgctgtacaaacaggtgatggagggccgggtcacctttggaaacagagtgaccagctcattgggagacatccctgtctccagagtctttcagaatccagcaggctgcatgaagacctgccccctgattgacttggaggtggacaatggacctgcgcagatggggactgtggtgccatctttgcttcatcaggacctggcagccttgggaatcagtgatgctcctgttacaggcatggtttctggtcagaattgctgtgaggaaaagaggaatccctcctccagcacgctgccaggcggtggtgttcagaacccttctgcagacaggaatttgctggacctcctctcaccacagccagctccgtgccctctgaattatgtttcgcagaaaagtgtccccaaggaagtgccaccaggtactaagtcctctccaggttggtcctgggaggctggcccgttggctccttccccatcttcacagaatacacctctggctcaagtgtttgtccctttggagtctgttaagcccagcagcctgccgcctctcattgtgtatgaccggaatggattcagaattctgctccacttctcccagacgggagcccctgggcacccagaggtacaggtgctgctcttgaccatgatgagcacggctccccagcctgtctgggatatcatgtttcaagtggctgtgccaaagtcaatgagagtgaagctgcagccggcatccagctccaagcttcctgcattcagtcctttgatgcctccagctgtgatatctcagatgctgctgcttgacaatccacacaaagaacctatccgcttacggtacaagctgacattcaaccaaggtggacagcctttcagcgaagtaggagaagtgaaagacttcccagacctggctgtcttgggcgcagcctaacttttcacaagatggacccttcatttcaagcttaggctggcgttacttttgctgtctagtcaggactaatcacggtgtttcagtgcggagtgccaagagtcctatcctgacgtcaggctctgggtgtcaacctctgacttattctgcagatgctcnnnnnnnnnnnnnnnnnnnnnnnnntcggggagagggtggtagcacagggcttgggatatcggcagtgtgggaaatgcgaagcatttctcatcatcatcatctctgctacagtcatgtttctgcatgtcagcgagcgacactgtccctgcctcaggttggaggttttatcagccaaagtgtttttttcatgtatcgttcgttccattcatccactctgtgccttgtcagcctttgaaaggcttggttgctcccaggctgctgttctcagggaccttaaaagggacctggttagtcttggggcagagagtatctacttgggcactctcttccaagaaagaccttgtctccattttcattagacatgcttcttgtgtgtgttctggaagatcttctaaa

SEQ ID NO: 187142 - DNA, 1581 bp, Homo Sapiens
attgatgagcaatgcttttctctataatagccaactttgtacaaaaaagttggctcaaggcgtggttatgaggactaaaagaaataatggatgcagataactagatctagataactagatgcagtggctgccagaggtgaacactggcggcttggattgacactgtctttggtggtaccccctcaggctgccaggagatagcagaggaattccgtgcccaggaaatcgacgggcaagccctgctgctgctcaaggaggaccacctgatgagcgccatgaacatcaagctggggcccgccctgaagatctacgcccgcatcagcatgctcaaggactcctagggctggtggcagccaggattctggcccagggcgcctcctcccgactgagcagagccagacagacattcctgaggggcccagaaatggggccggttggagggcaggggctctccctaggggcatagctggtgaggaggtctgggcacctcctccatggctctcaggggcctttcatttctgtgggaggggcagagaggtaggtggcacagaagatggggctttatgcttgtaaatattgatagcactggcttcctccaaagtcccaatactctagccccgctctcttcccctctttctgtcccccattttccagggggtatatggtcagggctccccaacctgagttgggttacttcaagggcagccagcaggcctggatggaggcctagaaagcccttgccttccttcctcccacttctttctccaggcctggttaactcttccgttgtcagcttctcccccttcagcctgtttctgcagcagccagggttctcccccctacaccctctgcaggtggagagagagaagctgggcccagccgggccgtgcctgctggcacagacgccttaacgctgtgtgtatgactgtgtgactgtgtgggagcctggactgacagataggccaagggctactctctggcatctccaggtgttttgtagcaaacagccacttagtgctttgtcctggactccactcagcctcaggatggggaatagccaagaatggcagcctcagcgcagaggcaaggtcagaaagagacggcgcttcagagtttcctttccagacacccctccccgcactgtgaagttcccctgaccgccctcctggttcacaaagagcattaagaaagctgcggtggtctgagcaacatagcccaaagggctgagcctcctggcctgcctgcccgcccaccctgggagtcccagtggtgaggctcagagaactgctaaggggaaagaacagctggagtttctgttgatgtgaagaaggcagctcttggcctcccactcccacacttctttgcctataaatcttcctagcagcaatttgagctacctgaggaggaggcagggcagaaagggcgagggcctgcctctgacctgccgtgtcctttgcaggaaggaggtaggcacctttctgagcttattctattccccacccacaccctcttgcagggttggaaatgaaggacttttttaacctttgctctcttttttaaaaataaatctgtaaaatctgt

SEQ ID NO: 187143 - DNA, 245 bp, Homo Sapiens
cctttgtacaaaaaagttggtgaattctcaggtgaacttttttcagttataaaacatctattttgaatctgtaaatattttaaatgttttattaaggcatgtaataaactattctttgaaacttgttgggtagaatgaaaattaaagccataatggtaaaagatggcatactgattataaaagaagcataaaaacattgatttttttatatctttcataatataattttctaacaatgcaataaa

SEQ ID NO: 187144 - DNA, 610 bp, Homo Sapiens
aaacaggcaagcaaggcttttcctggatagtgtttgcccatgaaaacaaatgaatcacctcactaaatgattaaaaaacatttcctgttggtttcatactactaacaattataatattttaatggataggagaaattatgggtttaaaattaaattctctgttaatgcacacgtttcaataaactggttatcagactgcttatgacaatgtcagtaccatacattcaactgcttttagtccttctagtctttctcttgggcaaaattggtggttatctaatttctgttacctatcaatcacctgttttggacattaactgtcaattactggctgcaaaatatgtctgtgtatatttacatgagatgtaactatacagatgcatgttgaattgtagacatgagttccattatttcagagctatactctgaatgtgagacctttatatttacacacacatacctctccagcccaacccaacattcattcatataaaaatatatgactattgtagaatccttcatttacatatcactaaaaatatgttctttcattctaacatctttttatctagccttgccaaccaacatcataagactgggatataaaatc

SEQ ID NO: 187145 - DNA, 1031 bp, Homo Sapiens
ttgggccagggcgccctggtcctggggcagtcactgaggagacacaggctgacgaggaagctggtggtgttgatcactcctcaggtgtccagcctgctcagggtcatcctctcgaaggtgttcgatgaagtcattgaagtgaatctaatcgatagtgccgactacatccacctggcctttctgaagagacctgagctcgggctcaccctcaccaagcttcactgttggactctcactcactacagcaagtgtgtcttcctggatgcagacactctggtgctgtccaatgtcgatgagctgtttgacaggggagagttttctgcggccccggaccccggatggccggattgcttcaatagcggggtgtttgtcttccagccttctctccacacgcataaactcctgctacagcacgccatggaacacggcagctttgacggggcagaccaaggcttactgaatagtttcttcaggaactggtcgaccacagacatccacaagcacctgccgttcatctataacttgagtagtaacacgatgtacacttacagccctgccttcaagcaattcggttccagtgcaaaggtcgtccactttttggggtccatgaaaccttggaactacaagtacaatccacagagtggctcggtgttggagcaaggctcagtgtccagcagccagcaccaggcggcattccttcatctctggtggacggtctaccagaacaacgtgctgcccctttataaaagcgtccaagcgggggaagcacgcgcgtctcctggtcacacactttgccgcagtgatgtgggggggccgtgtgcggattcagcctctggtgttggagagccgtgtgaaaattcaacacccagtgcgggcgtgccgtgtgcaaattcaccactgggttctaaccagcctgctcagggccttccggagccgacccagatagtggatgagaccctgtccctacctgaaggacgccgttcagaagatatgatagcttgtcctgaaactgagactcctgccgtgataac

SEQ ID NO: 187146 - DNA, 1274 bp, Homo Sapiens
ttgggtctatgacaaggaataccttgagcagatctccactctcatcaacaccaccgacagatgcctgctcaacaactacatgatctggaacctggtgcggaaaacaagctccttccttgaccagcgctttcaggacgccgatgagaagttcatggaagtcatgtacgggaccaagaagacctgtcttcctcgctggaagttttgcgtgagtgacacagaaaacaacctgggctttgcgttgggccccatgtttgtcaaagcaaccttcgccgaggacagcaagagcatagccaccgagatcatcctggagattaagaaggcatttgaggaaagcctgagcaccctgaagtggatggatgaggaaacccgaaaatcagccaaggaaaaggccgatgccatctacaacatgataggataccccaacttcatcatggatcccaaggagctggacaaagtgtttaatgactacactgcagttccagacctctactttgaaaatgccatgcggtttttcaacttctcatggagggtcactgccgatcagctcaggaaagcccccaacagagatcagtggagcatgaccccgcccatggtgaacgcctactactcgcccaccaagaatgagattgtgtttccggccgggatcctgcaggcaccattctacacacgctcctcacccaaggccttaaactttggtggcataggtgtcgtcgtgggccatgagctgactcatgcttttgatgatcaaggacgggagtatgacaaggacgggaacctccggccatggtggaagaactcatccgtggaggccttcaagcgtcagaccgagtgcatggtagagcagtacagcaactacagcgtgaacggggagccggtgaacgggcggcacaccctgggggagaacatcgccgacaacgggggtctcaaggcggcctatcgggcttaccagaactgggtgaagaagaacggggctgagcactcgctccccaccctgggcctcaccaataaccagctcttcttcctgggctttgcacaggtctggtgctccgtccgcacacctgagagctcccacgaagcctcatcaccgatccccacagcccctctcgcttccgggtcatcggctccctctccaattccaaggagttctcagacacttccgctgcccacctggctcacccatgaacccgcctcacaagtgcgaagtctggtaaggacgaagcggagagagccagacggagagggaagggctgagacgagaccccatcagcttcagg

SEQ ID NO: 187147 - DNA, 1710 bp, Homo Sapiens
ttggtgaagaacaacatacagggagagtggagaagagaagagaacaaaaagtaacttcaggatggggaccagtgaagtacttgcggcctgtacccagaatcatgagtacagaaaaaatccaggaacatatcaccaaccagaaccccaagtttcacatgcctgaggatgtacgagaaaaaaaggaaaatcttctactcaattctgagagatctactaggctcttaacaaagaccagtcattcacaaggaggggatcaagctttaagtaagtccacagggtcaccaacagagaagttgattgaaaaacgtcaaggagctaagactgtttttaacaagttcagcaacatgaattggccagtggacattcaccctttaaacaaaagtttagtcaaagataataaatggaagaaaactgaggagacccaagagaaacgaaggtctttccttcaggagttttgcaagaaatacggtggggtgagtcatcatcagtcacatctttttcatacagtatccagaatctatgtagaagataaacacaaaatcttatattgtgaggtacctaaggctggctgttccaattggaaaagaattctgatggtactaaatggattggcttcctctgcatacaacatctcccacaatgctgtccactacgggaagcatttgaagaagctagatagctttgacctaaaagggatatatacccgcttaaatacttacaccaaagctgtgtttgttcgtgatcccatggaaagattagtatcagcctttagggacaaatttgaacaccccaatagttattaccatccagtattcggaaaggcaattatcaagaaatatcgaccaaatgcctgtgaagaagcattaattaatggatctggagtcaagttcaaagagtttatccactacttgctggattcccaccgtccagtaggaatggacattcactgggaaaaggtcagcaaactctgctatccgtgtttgatcaactatgattttgtagggaaatttgagactttggaagaagatgccaattactttttacagatgatcggtgctccaaaggagctgaaatttcccaactttaaggataggcactcttccgatgaaagaaccaatgctcaagtcgtgagacagtatttaaaggatctgactagaactgagagacaattaatctatgacttttattacttggactatttaatgtttaattatacaactccatttttgtagtttgcattcattttctaaaaccctgtatatacttaatgatgataagttcaaatcagctgtaatttttctataattctctgtatgacagaaatttaaccaagtgcagttgtcttgatttaatgtagatttttaccaaatagtatgacaccaattggcacaaagttataggaaaatcacctacaggagatgtaaacaacttgagttgctctaaaatgtttggaaaagagctgcttttgcattatgaattatattgttgaagcaataacctagccagctgttgcattatctaaagcagcctcttgcaatggtaggaaaaaaaggatctcaaatagcatgagtgtatgtctatatcctgaaatttattgtctaaatgcatgaatatatttttagcagtctgtggcatattaatcaaactgttgaattgttttcttacaccctgggaaatctttctatcaactataaatgataaatccatttt

SEQ ID NO: 187148 - DNA, 832 bp, Homo Sapiens
  misc_feature (226)..(282): n is a, c, g, or t
aaaaaagttggcacaactgcaggcagcgaggctcgggaagtcaggccggcttttcgccccggcgccttctctgctccagccggccgggtctccctgggggcccggagctcggccgggccgcgcagccccgttagaggacgagctcggcggacccccgctcctccatgggcaaacgcgggcggccgcgcaaggaggcgcgctgcgagggcgcggggctggcccccgnnnnnnnnnnnnnnnnnnnnnnnnnnnnnnnnnnnnnnnnnnnnnnnnnnnnnnnnnaggaccccgctggggccaagcccaggtgccccttctcagactttttcaacaccagcgagaactcgatggagaagcacatcaacacttttctgcagaacgtgcagattctgctcgaggccgccagctacctggagcagatcgagaaagaaaacaaaaagtgtgaacatggctacgcctcttcattcccgtccatgccgagcccccgactgcagcattcaaagcccccacggaggttgagccgggcacagaaacacagcagcgggagcagcaacaccagcactgccaacagatctacacacaatgagctggaaaagaatcgacgagctcatctgcgcctttgtttagaacgcttaaaagttctgattccactaagaccagactgcacccggcacacaacacttggtttgctcaacaaagccaaagcacacatcaagaaacttgaagaagctgaaagaaaaagccagcaccagctcgagaatttggaacgagaacagagattttaaagtggcgactggaacagctgcagggttctcaggagatggaacgaata

SEQ ID NO: 187149 - DNA, 2195 bp, Homo Sapiens
  misc_feature (771)..(798): n is a, c, g, or t
ttggctcttaaaggagaacatgatcgtgtatgtggaaaagaaagtgctagaagaccctgccatcgccagcgatgaaagctttggggcagtgaagaagaaattctgtacctttcgagaagattatgatgacatttccaatcagatagacttcatcatctgcctggggggagacgggacgctgctgtacgcttcctcgcttttccagggcagcgtccctccggtcatggccttccacctgggctccctgggcttcctgaccccattcagctttgagaactttcagtcccaagttactcaggtgatagaggggaacgcagctgttgttctccggagtcggctgaaggtcagggtggtgaaggagctccgggggaagaagacggccgtgcacaatgggctgggtgagaacggctcgcaggctgcaggcctggacatggatgtcgggaagcaggccatgcagtaccaggtcctgaatgaggtggtgattggcagaggcccctcctcctacctgtccaatgtggatgtctacctggacggacacctcatcaccacggtgcagggcgacgatcatgctgtcacctgaagcaaggaacacagcatgggtgtcctttgatggacggaagagacaagagatccgccatggagacagcatcagcatcactacctcatgctacccactcccctccatctgtgtgcgggaccccgtgagcgactggtttgagagcctcgcccagtgcctgcattggaacgtccggaagaagcaagcccacttcnnnnnnnnnnnnnnnnnnnnnnnnnnnngctaggtcaagcccctatccaggcccgaatccttccgctgccctccaagcgccctctggggacagaccaatctgcgtgtgtctgtgaccgcctgtctcagtggcacggccacttcctttctgtagctgggttagagcctgggtctgccttttgtccagatcagctgtttttttaaaatgtctgactttttttgcatttctaaagaagcgtgagaaatgggctgggagtgcttctgtcctgctgacaccccgcggtgggtccctggagcgcggcctccagctgccgcaatttccatgccaggatatttttccgcaaatcagtcggttgaaattcagaggagtcagaatgactcgacctgtccttcaatgttgataataaatgtctcagccaaaaaccttccttgagctgccatgcttttccccttgacctgcacctcttcccctaaaacttctgcagggaagcccctggcggaggcgccattgaaagcatggtcttgccagtggctggcaaggcggttttgttctgctcagtttctggagagggttggatgcgtcccctgccatccagccctccccgcttgaggccagcactgagtctgggacactcagcgggaagggggctggcatcgccagcgacccacacattcctcacgtagcttctgctcccaggaaggtagtttaaatcctgtatatactttttagagactcttttaaactttctgaagtgctgatgtacatactttctcgtacacacttttgtgaagatttcaaggggaagggagttgtctgccattcaatgtttacatttatgttctgcaagacgctgtcctcagggaccattaggggaccattctgttcagtgcgatcctgatggtccgggagatgagggtttccggggctagtgatcgtgatcccttttatttgcaacagtaatgagaatttttcacactaacacagcgagggactcaacacgctgattctcctcctgcctctcccgtgagtctccagcctgcccagcaccagcagctgtggagcacgtggatgctgcctaccccggcgcccgcgtcttccacgggcacaggtgtgtggaggccgtggtcggaccctggtgtcctggttactgctgcccgggtgtcttttttttgagtaactgctctctgagttttgcacacgaagttgccctcatctgctggagatcgataaggaaggcacaagacgttctcctctgcccgtgaggagcttcccgcagccgcctggcccagcctgggcacgttctccgaggcatgtgtctccctgctcaccctcgtctgggcacctcaacatctgtggacttgagcgtccaaaaaccctgagtgtgattctgggcagccggcctggcttgaagtccgccatgaccct

SEQ ID NO: 187150 - DNA, 642 bp, Homo Sapiens
gagcctcttgcctccaggctggttggggaagacgtcctccaggaagtagtagatatggcccaccgcaatccccagcaggtccacgaggatggagttgcccagcagcagcgagaagcccatgagcgcccaaggcaggaacggtgcctggaaagtgagcaggccgaagaagttgaccctcacccgagggctgcggcggctccacacgtacaccagcatggccatgagggcctggcccaggaagaacaggctgcccaggagtcccagcagggtcataaggacgcccccgaagagaaacatgaagacgaagtcggccgtgcggccgcggaaggagccctcttccagcatgcggcagtagcggaacacgaagagcatgttgaagaagaagctgaatcccaggggcccgaagaagaggaagttggtgacgagcctccagacctggaacttccggaacacaaggtgcgggttgaagtagagttgaaaggggctgaggagctccagctgcaccgcggcggtggtgaggacacaggctgcggtgtaagcccgcgtcaccgccggcacctgcaggaactcggccgctagtccctgccacgccattgccaacttttttgtacaaagttttcttttagggaaaagctattgttc

SEQ ID NO: 187151 - DNA, 962 bp, Homo Sapiens
actttgtacaaaaaagttggctccctctgtccctctgtccctctgaccctgcactgtcccagcaccatgggacccacctcaggtcccagcctgctgctcctgctactaacccacctccccctggctctggggagtcccatgtactctatcatcacccccaacatcttgcggctggagagcgaggagaccatggtgctggaggcccacgacgcgcaaggggatgttccagtcactgttactgtccacgacttcccaggcaaaaaactagtgctgtccagtgagaagactgtgctgacccctgccaccaaccacatgggcaacgtcaccttcacgatcccagccaacagggagttcaagtcagaaaaggggcgcaacaagttcgtgaccgtgcaggccaccttcgggacccaagtggtggagaaggtggtgctggtcagcctgcagagcgggtacctcttcatccagacagacaagaccatctacacccctggctccacagttctctatcggatcttcaccgtcaaccacaagctgctacccgtgggccggacggtcatggtcaacattgagaacccggaaggcatcccggtcaagcaggactccttgtcttctcagaaccagcttggcgtcttgcccttgtcttgggacattccggaactcgtcaacatgggccagtggaagatccgagcctactatgaaaactcaccacagcaggtcttctccactgagtttgaggtgaaggagtacgtgctgcccagtttcgaggtcatagtggagcctacagagaaattctactacatctataacgagaaggggcctggaggtcaccatcaccgccaggttcctctacgggaagaaagtggagggaactgcctttgtcatcttcgggatccaggatggcgaacagaggatttccctgcctgaatccctcaagcgcattccgattgagatggctcggggga

SEQ ID NO: 187152 - DNA, 1603 bp, Homo Sapiens
ttgttttctcaataagcgtatacaacagtgggctggcagaaaccttgaagttgctggtaccaagaaccgctttatccagattaatataagtgaaagcctttaaatgcagggacgaaaggtatccctctagccattcagtggcaccaaccgatccaaagtctccagcactccaactggcaaagataatgcttctgctgggctgaaacccatcttttaagaccatatctgagaacatctgggcaagtttcaataggagagctgtgcctacaccggattttgcagctccagggccccatgcatctctctgggccccaactacaacatagtgatctggttctacaaagcctttaataactccaaagatgttaagaatttttatctctttcagcacattgctcacagtgagcttcacattcttgctttctgaggttaccatcctacatgtagagtctgttttccagtcagagggacagtctccttccatattcccaaacagcttttctgcagcagctctggagattgtctggacaggtatattaggcaatcctgatgaccgagatggtggaaactgagtgtgattgaaggaagggaatccaggtgtgtaagggtcacctgtccccagatgagcatgtccaaagaatgaaagttctgcgttaacaatgggaaatttagtctggtccatgtatatcaacacaccaattgcatttaagctttcagcatttgcaaccttttctgcaaaggtgattttccctgctctgacaatcactatagatccattcacaggagtgtataaatcctcaaaatcttttttagtaccaaaattagcatggaccagtttaccagtaactgttgcagccttactatacgccacataacccccaggattctccaccaggtaaacaagtctaccgttcttatcaactatgatcaccgagttttgagcgctgtctttgacctgaatcttaacaaaatgttgatcacgccagactttgctgagtttaaattcacgaaattgattttcaacatacaacgcaagattttcatctttttgagatccagcctcacgagggacatatgaattttcattcagcagcttgatggtgccggtgaagtctgtgctgtccagtttctccgacaactttctcttcaggtcatcccaatataagcgacgtgctgcagggaagtcctctcctggctcctccctcactggagactcggttcctgccagtctctcacactcagtttttggttctacccctttacaatagcccaagtagccaatcataaatccaatcaagaaaaagacgatcacagcaatagtcccatagcagatacttccactacacctttttggttttgtgacattggcctttgtgttattgtcagcattttcttcttcatctacagcaagtttcatctccacatgactgttatcgccatctacttgccgagccaggctgaaccgggtatatgacaatggttctccaccaaacaagttagagaatgctgatctagcttgatccatcattctgaactgccacacagaagaacactagcgcgtcctccgtcccgagccgccacccgatatccccaacttttttgt

SEQ ID NO: 187153 - DNA, 914 bp, Homo Sapiens
ttggctggttcttcagtccccacgtgcgatccttcccggcaactttttcgagaaaaatgcccaaattcaaggcggcccgtggggtggggggtcaggaaaaacatgcgcccctggccgatcagatcctggctgggaatgcggtgcgggcgggggtccgggagaagcggcggggtcgcgggacaggagaagcggaggaagagtatgtggggccccggctgagccgacggattttgcagcaagcacggcagcaacaggaggaactcgaggccgagcatgggactggggacaagcccgcggcgccgcgggaacgcaccacgcggctgggtccaagaatgcctcaggatggatcagatgacgaggacgaggagtggcccaccctggagaaggctgccacaatgacagcagcgggccatcatgcagaggtggttgtggaccctgaggatgagcgtgccatagagatgttcatgaacaagaaccctcctgccaggcgcaccctggctgacatcatcatggagaagctgactgagaagcagacagaggttgagacagtcatgtcagaggtgtcgggcttccctatgccccagctggacccccgggtcctagaagtgtacaggggggtccgggaggtattatctaagtaccgcagtggaaaactgcccaaggcatttaagatcatccctgcactctccaactgggagcaaatcctctacgtcacagagccggaggcctggactgcagctgccatgtaccaggccaccaggatttttgcctctaacctgaaggaacgcatggcccagcgcttctacaaccttgtcctgctccctcgagtacgagatgacgttgctgaatacaaacgactcaacttccatctctacatggctctcaaaaaggccctttttcaaacctggagcctg

SEQ ID NO: 187154 - DNA, 934 bp, Homo Sapiens
ttgggatttactttaaggctcatattctccaagtctattctgctttaaaaagaagacaagaaaagaagtggtttatcaaaatcacgttataatcagattttgaccaagcattttgtaagattgccaagtatgcccacggacatggaacacacaggacattacctacatcttgcctttctgatgacaacagttttttctttgtctcctggaacaaaagcaaactatacccgtctgtgggctaacagtacttcttcctgggattcagttattcaaaacaagacaggcagaaaccaaaatgaaaacattaacacaaaccctataactcctgaagtagattataaaggtaattctacaaacatgcctgaaacatctcacatcgtagctttaacttctaaatctgaacaggagctttatataccttctgtcgtcagcaacagtccttcaacagtacagagcattgaaaacacaagcaaaagtcatggtgaaattttcaaaaaggatgtctgtgcggaaaacaacaacaacatggctatgctaatttgcttaattataattgcagtgctttttcttatctgtacctttctatttctatcaactgtggttttggcaaacaaagtctcttctctcagacgatcaaaacaagtaggcaagcgtcagcctagaagcaatggcgattttctggcaagcggtctatggcccgctgaatcagacacttggaaaagaacaaaacagctcacaggacccaacctagtgatgcaatctactggagtgctcacagctacaagggaaagaaaagatgaagaagaactgaaaaacttactaacaaacagatagttagtgaagaaaatgcaaagtagcaatgagaagcttatggagtaaaatgaaggtcagttggtatttaatcccaaagtgttgttctgattatctaaaattt

SEQ ID NO: 187155 - DNA, 810 bp, Homo Sapiens
tttgcatccagctcccgcagcagcagcaggatggcagtcagggacgttcctgcccctgtggctgctcgaggcatccctggctgagagggaaggaaactggccccgggaaggcggcttcaggccacgttcatcctgggcgccgctggttgcctcctcctcgctgtccagcgggtcccggccagtctcagcagcggagctgagggagctcagtgtgcagcatagcttggggccgccgtggcctgtgccctctctctctggggccgcagtgatctcctctccctcactcagtgcacgggacagctcctcctccgtcacagcctggttgtccagcttctgtaggcgcggcagggtgcgcagcacggtcatgcggtagcggtgggggctggtgccgcagcacgggttctcggccagccacagcacccgcagacgcggcagccccttcaggtagaagagctcagccaggctggggatgcggttcctccgcaggtacagctcactcaggcgctggcaccggctcacaggctccagggtggagatgctgttgacaatctgtgaggcggctgccccagcagttgagcttgcgcacgctgtgcagctccgaggccttggcccgggtcagaaccatcttccgcgtcagcttcatggcggccgcccaggcccgaccggcgggcgcccccggcctcctgatcccgggcgggtgacgactgcgcggcgcgtgtctccaggggcggggcccgcgtcgtcaggggcggatcctgagccgattggcggctcggtgaggagagcggggcgacgcgagcccgctgccaa

SEQ ID NO: 187156 - DNA, 1132 bp, Homo Sapiens
  misc_feature (179)..(189): n is a, c, g, or t
ttgggtagaattgtcaggagtgcacctctctacttgggaggtacaattgccatatgatttctagctgccatggtggttaggaatgtgatactgcctgtttgcaaagtcacagaccttgcctcagaaggagctgtgagccagtattcatttaagaggcaataaggcaaatgccagaattnnnnnnnnnnntcatcaaagacagaaaatgcctgaccaaattctaaaacctaatccatataagtttattcatttaggaatgttcatttaaattaatctgcagtttttaccaagagctaagccaatatatgtgcttttcaaccagtattgtcacagcatgaaagtcaagtcaggttccagactgttaagaggtgtaatctaatgaagaaatcaattagatgccccgaaatctacagtcgctgaataaccaataaacagtaacctccatcaaatgctataccaatggaccagtgttagtagctgctccctgtattatgtgaacagtcttattctatgtacacagatgtaattaaaattgtaatcctaacaaacaaaagaaatgtagttcagcttttcaatgtttcatgtttgctgtgcttttctgaattttatgttgcattcaaagactgttgtcttgttcttgtggtgtttggattcttgtggtgtgtgcttttagacacagggtagaattagagacaatattggatgtacaattcctcaggagactacagtagtatattctattccttaccagtaataaggttcttcctaataataattaagagattgaaactccaaacaagtattcattatgaacagatacacatcaaaatcataataatattttcaaaacaaggaataatttctctaatggtttattatagaataccaatgtatagcttagaaataaaactttgaatatttcaagaatatagataagtctaatttttaaatgctgtatatatggctttcactcaatcatctctcagatgttgttattaactcgctctgtgttgttgcaaaactttttggtgcagattcgtttccaaaactattgctactttgtgtgctttaaacaaaatacccttgggttgatgaaacatcaacccagtgctaggaatactgtgtatctatc

SEQ ID NO: 187157 - DNA, 1562 bp, Homo Sapiens
  misc_feature (165)..(182): n is a, c, g, or t
ttgggtgctgattactaccctgaatgtagtgttttgtttctcttcaaatagtgctggcactgagtcgggatttgtgtgtgtgtttagatgccagtctcctcgtgggtctgaattaccaccttcaccccactcccatcccacccccagttttctctactaacctannnnnnnnnnnnnnnnnnagaccaatgatgcgagctcagagtcaatagcatccttctctaaacaggaggtcatgagtagctttctgccagagggagggtgttacgagctgctcactgtgataggcaaaggatttgaggacctgatgactgtgaatctagcaaggtacaaaccaacaggagagtacgtgactgtacggaggattaacctagaagcttgttccaatgagatggtaacattcttgcagggcgagctgcatgtctccaaactcttcaaccatcccaatatcgtgccatatcgagccacttttattgcagacaatgagctgtgggttgtcacatcattcatggcatacggttctgcaaaagatctcatctgtacacacttcatggatggcatgaatgagctggcgattgcttacatcctgcagggggtgctgaaggccctcgactacatccaccacatgggatatgtacacaggagtgtcaaagccagccacatcctgatctctgtggatgggaaggtctacctgtctggtttgcgcagcaacctcagcatgataagccatgggcagcggcagcgagtggtccacgattttcccaagtacagtgtcaaggttctgccgtggctcagccccgaggtcctccagcagaatctccagggttatgatgccaagtctgacatctacagtgtgggaatcacagcctgtgaactggccaacggccatgtcccctttaaggatatgcctgccacccagatgctgctagagaaactgaacggcacagtgccctgcctgttggataccagcaccatccccgctgaggagctgaccatgagcccttcgcgctcagtggccaactctggcctgagtgacagcctgaccaccagcaccccccggccctccaacggtgactcgccctcccacccctaccaccgaaccttctccccccacttccaccactttgtggagcagtgccttcagcgcaacccggatgccaggcccagtgccagcaccctcctgaaccactctttcttcaagcagatcaagcgacgtgcctcagaggctttgcccgaattgcttcgtcctgtcacccccatcaccaattttgagggcagccagtctcaggaccacagtggaatctttggcctggtaacaaacctggaagagctggaggtggacgattgggagttctgagcctctgcaaactgtgcgcattctccagctagggatgcagaggccacctcagaggctctttcctgagggccggccacattctcgctctcctgggcagattgggtagaaaggacattcttccaggaaagttgactgctgactgattgggaaagaaaatcctggagagacacttcactgctccaaggcttttgagacacaagggaat

SEQ ID NO: 187158 - DNA, 1424 bp, Homo Sapiens
caatttctgcaccatccttcttccaagttaattctggtcttggttttccctggaaaggtataaccagattgacagcttctccaactctgcggatataggtttgcttcaggtgtcttgggatgcgaatctttggaggttctatgatttccttcacgagaatgggctgagaatagtacttgggctcgctggcaccagctgcattaacagccttcacacgcacaaagatctttgcatctgttggcagacctgtgatggtgaacttcgtcttgtcaatcagatctttgtttgcaactatccagtcctcagttccttcaaagcaatactctagcacatagccatctaaacctgctgcaccaatgtggtctggggggcgccacctcatcgtgacagtcgtgtcagtgacagagtccacagtcagaagagtaggagggcttgttacagccaaaggaacaaaaggcctggagggcatactgggcttggagatgccaatggcattgactgcaaagatgcggacctcataggccacaccttcaatcatcttcttgggctcaaaagttgtttctttgcagagatcaaaattcagcctcatccacctggagctttgtttcttcttcctctcaataaaatatcctaggattggagagcctccgtcgtaggcaggaggctcccagttcatgatacaccagtcatctcccacctctgtcacagtcggtgccactggaggatcagggaagtccacaactttaaccttgatgcttgcatgtgcctctccagcttcgtttttcagattgatgtggtaaacaccagagtcatctctttcagctatatcaatgaccagagtgctgctatcagggtaagattctgttcttatccggccactgccttccataatagccttatctccccggctccacatggctttaggaggtggttctccgctgatggggatctcaagacgaagcttgtttcctgcaatcactgtcactgtgttgtcagcatcaagaccatccaggatgatcttaggaggatcaataacatgaactttggcaggcagagtaacattgtaggcatcaggtgcaaatacataatcaccttcatcttcagtgagggcattggctatcactaacttgtggatccttcccttgtgaaccacctttagacggtcactctcctgaacaggtaggccatttttagtccattttcctggtatgttttcagagatttcacacttcaggcagatttcttttccaagatttacagtctgatcagtcagaggtgtcaaaatcttcagaggtttcaagtcaacactaagtttagcagatgattgtcctcctgttgtcattactgaatattctgcagcatcagcctttgttgctccctctatgatcaagatgtgttttttaccctcaactctaattcgccaa

SEQ ID NO: 187159 - DNA, 916 bp, Homo Sapiens
ggggggacttgcggccccatgccttggcctgtctctgcaggctccaactggatggctcggaaccggggaaaggtgggcgaatccccaggcccgacctcgaagacgtttctcctccggtcaaggccgggtgaggcctgcacggtgatgcggtgcttgaagtcgagtggcatgctgatacgctcgccgccgtcgcgcgcccggagcttgctgcgcttgaatgtcccgcggcggcggcgcacgtgcggtcgctcgcggtccacctgctgcagcagcagcgtcagctcgcgctcgaacacctctagctcccactgggccagcaggtgctcgcgccgccgcagctgctccgcctgtgaccgctgctcgcgcgccgctcgcgtcagctcctcctcgcggctcagtagttccttttccttggctcgcagctcgtcgaagagaccctggatctcgcgcttccagccttcctgcatggaatggaaggagtcccgcggcatttcccgtaggacctgtgcctccagcgcctccaactgctgcaggatggaggcgaagtcgggcctgcggtgggggtcctgcgcccagcagtcggccataagctgtgcgaagggctcggggcaggtggatgggatgggcagtgtgagcttgttaacagctacgccataggccacagcaaggcagtcaatgccacggtatggcacctccccggtcagcagttcccacagcagcaccccaaaactccagacgtcactgcccttagagaaggtggaggccttgataacctcaggagccatccaggcgtaggtgcccgcggcactcatttgtgtggttttgtgccactctcgggccaggccaaagtcggtgatcttcagggtcttgtgctccatgtcgtcactctcaatgggctgcagcagcaaaatgccaa

SEQ ID NO: 187160 - DNA, 1684 bp, Homo Sapiens
ttgggtcaggggtgagagctggaatctctgcacgggccttggaaaacgactgtcttcttctgccaaaatgtcaggaattggaaataaaagagcagctggagaacctggcacctccatgcctcctgagaagaaggcagctgttgaagattcagggaccacagtggaaacaattaagctaggaggtgtctcttcaacggaggaactagacattagaacactgcaaaccaaaaatcgcaagctggcagaaatgttggatcagcggcaggccattgaagatgaacttcgtgagcacattgaaaaactggaacgacgacaggccactgatgatgcctcactattgattgtcaaccgatactggagtcagtttgatgaaaacatccgtatcatccttaaacgttatgatctggagcagggcttgggagacctactcacagaacgaaaagcccttgttgtgcctgaaccagaaccagactctgatagcaatcaggagcgtaaagatgaccgagagagaggggaagggcaagagccagctttctctttccttgctactttggccagcagttccagtgaagagatggagtctcagctgcaggaacgtgtggagtcttcccgccgagccgtgtcccagattgtgactgtttatgataaattgcaagaaaaagtggagctcttatcccggaagctaaacagtggagataatctgatagtggaggaagcagtgcaggagctgaactctttcctcgcacaggagaatatgaggctacaggaattgacagatcttcttcaggaaaagcatcgcaccatgtctcaggagttctccaagttgcagagtaaagtggagacagccgaatcacgagtgtctgtcctggagtccatgattgatgacctgcagtgggatattgacaaaattcgaaagagggaacagcgactcaaccgacacttagcagaagtcctagaacgggtgaattccaaaggttataaggtgtatggagcggggagcagtctgtatggcggcacaatcactatcaatgctcggaagtttgaggaaatgaatgcagagcttgaggagaacaaagagttggctcagaaccgtctctgtgagctggagaaacttcggcaagactttgaggaggtcactacacaaaatgaaaagctgaaggtggaattgcggagtgcagtggagcaagtcgttaaggaaactccagaatatcgctgcatgcagtcacagttctccgtcttgtataatgagagcctacagttgaaagcacacttggatgaggctcggaccctgcttcatggcaccaaaggaacccaccagcaccaggttgagcttattgagcgagatgaggttagtcttcataagaagctgaggactgaagtaattcagctagaagatacattggcccaggtccgcaaggagtatgaaatgctgaggatagaatttgagcagacccttgctgccaatgaacaagcaggccctataaacagggagatgcgccacctcatcagtagcctccagaatcacaatcaccagctgaaaggggaggtcctgagatataagcggaaattgagagaagcccagtctgacctgaacaagacacgcctgcgtagtggtagtgccctcctgcagtcccagtctagtactgaggacccgaagatgagcctgcggagctaaaaccagatt

SEQ ID NO: 187161 - DNA, 3996 bp, Homo Sapiens
ttggctttaccatgtgtgtacagagcatcatgaagaaaagcatcttcaatgtctgtgggctgttgcaaggaattgcaggtctattccttatcctcggtttgatactctaccctgctggctggggttgccagaaggccatagactactgtggacattatgcatctgcctacaaacctggagactgctccttgggctgggccttttataccgccattgggggcacagtcctcactttcatctgtgctgtcttctctgcacaagcagaaattgcaacctctagtgacaaagtacaggaagaaattgaagaggggaaaaacctgatctgcctcctttagtttggaagagacaatgccattttctcccttgagtaatcttgtgaaacagtccacagtttcatcatttgagtcaagtggagaactaacctttacctaccaaagccacgttccacggcccgaggcttaaacaggaccaatgagaggccacatccagctacgcaaagttactggacatgcagtctgcagtgcacattataaggaatggaacatgaaaatagtatataatcctagacctggagttgccaagttctgtcagactccatctcccccaggttcaatgaaggataataatctaaatcattagggcagcagtttctctggtaacggaagagaccgtccgccagatctgcaggctgtttctgctccaacactgcttgcttgtgagcatctctgcctcagaatggggttttgggttggagttcttgttttcctctgttctttcaagttgtctccaacgaacagaaaactataaacttactggggacaggatgtgtgctaaagggcacagcaagacactgtcttttgcttagctgaccaaaggggtcagcagggatggcgtggagtcatgctgtggaacttattctaggctgaatcctagggtaaggtggatcaactgaactgtcactccagagattttagaaatttgagtaaagaaacaataaggacctatacaatcatatgagaacaaaaatatgaaatcttgctagtgaagacgtattttttcttcttcccagcagccaggctagcaccagttctggcccagtctcctcttcttctggagatcacatgtttttcttctaaggttaggattgtgctttgactgcgaaaggaaacctcactgtttcctccttccagggactgagggtctccaagctagctgtggcttatgcagatgttcactgggaggacctgccagaatctcggcacttggggggagacctttactcccagtttggtgaccatgctgtagtcagctctatttccaatcccgacagtagcagaatggcattctacaacaaaaagaagctagttatgggagttaagtttttgtagttactggtgttgatcctgaaagcagactgagataacattaaattgctgcaactgaagaactgcagccaagaccttaattccaggaaagcacagaggacaaagttaattcaaaaagaggcgctagatcaaggtcacagcactgcctacacctgtttacaaaaagaatcaaataccactatgaataaggattcaggggtttttaatctactttccataaattaccaatatcactgattcaggaagatagtatctcagaatgaccagagcagcacagaaacaagctactctgacattatgggagcttcaaaattgtatcatgatacagaaacactccttagcactttaagaaagtgagatggaactgccagatttctggaaggagaaaaagtgtaggtatttgggttcattaatctgctcacttgaggactttgttttgaaaaagtaccttctgtggacaaggtattgtgctaccagctatacaaccctgacttcagagtttgcaaccttgccctgagtgaatcatgttaaagctgtctgagtctaaagcaccgtatcttggtgcagaacagataattatacagagatggaatgggacaaccgcagttttactacattctggtgtttggcctatatgagaaaccatcttctcacagattaagggctaagggcaaaaggggtgggaggtgtggaactagccttaatgagtttcccattcctgaaccaaaattcaaagtgagtgagatgtaaatcctgtgattttggtgaagaaaaaaacgggtatcttcatagcagcctaggaaaccttaaccatatctctaacaccacacagaaagaggctggaggagccactggacaaagcttctgtctctgtgtgtacatttataatgttctaaccaagtctcaaaccttgatgaaaaacacaaaatttttccataaacttatcagaagactcacttttctttctttcttggatagagaaaccattttctgacactaggtttacaatctcagtgtccttacaagttaagtcctaagctcacaggatcctccgagcatgtccatcacctgctctttggctaaggtggcagtgtacctctagatcaacctgggaacagtcacaagggagtgtgacttcttggccataataaactcactcgatagtgtttatgttattaatctgaatgcaacagaagacaaaagcacaggcatgcacacacacacaaccccaaaccactaaaaactacctaaacactgacttagtaaatagtaaaaaggtaatgttgggacttttaaaccttgaatccattagccaggcttgggatgaaaggaccatctaaaatcatgctagtctaaaccatgctcttccacacagctgtttaaaaaccactgggtatgaggaatatgctagaaagaaatgttaaaaatagattgttggctcacacttatttttctaataaataggaccattattactaccaggaaagtcttatttattttgcctgaaattggcttaaagaaagtctcatgacgggatgggatgggctgcgcttctcaatgaactctgaggcagaaatatttgccttggattctgtggattctttaaacctgtgtgctaataattcaaacaatgttgcattaattgtataagggtttttgtatagttttcaaacatctgtggtgtaatgatctttgttaaacatatattctgtaaagtgccatagtctttttttatgtgtagcatatttaaaaatatatatgtatattatacatacacaagtttgtgtgaaagatgtgcaataacaaaggtgtatgtatgttttgttgttttgttttggaaactggacaggagtcaaaacagggatgtttgtttctgttttggcaaaggagagttccacatttttgccttcatggcttattcagtaacccataattttaatgctacacaaatcttatgtgaagaaaagactggtatgaaatcattttttcctgggtctaaaataatcgctagtgttatgtcaaagttaagcccgcacgccaggcccagttaatgctagtctttcatgtgaaatgtgaagctgccatgttgccttttctcttagtaggataactagtagctggtacataatcactgaggagctatttcttaacatgcttttatagaccatgctaatgctagaccagtatttaagggctaatctcacacctccttagctgtaagagtctggcttagaacagacctctctgtgcaataacttgtggccactggaaatccctgggccggcatttgtattggggttgcaatgactcccaagggccaaaagagttaaaggcacgactgggatttcttctgagactgtggtgaaactccttccaaggctgagggggtcagtaggtgctctggagggactcggcaccacttgatatttcaacagccacttgagccaatataaaattgtatttacaggctgatggactcaatttgagccttcaaacttgtagttatcctattatattgtaaactaatacattgtctagcattgatttggttcctgtgcatatgtattttcactatgtgctcccctccccagatcttaattaaaccagattt

SEQ ID NO: 187162 - DNA, 907 bp, Homo Sapiens
ttggcacagatccccccaaggtctcccaagcctaccgtcccacagattattgtacagagccccaaaaatcgaaacagaggaaacgaacagcagttgaacatggacgaaggaattcctcatttgcaagagagacagttactggaacatagagattttataggactggactattcctctttgtatatgtgtaaacccaaaaggagcatgaaacgagacgacaccaaggatacctacaaattaccgcacagattaatagaaaagaaaagaagagaccgaattaatgaatgcattgctcagctgaaagatttactgcctgaacatctgaaattgacaactctgggacatctggagaaagctgtagtcttggaattaactttgaaacacttaaaagctttaaccgccttaaccgagcaacagcatcagaagataattgctttacagaatggggagcgatctctgaaatcgcccattcagtccgacttggatgcgttccactcgggatttcaaacatgcgccaaagaagtcttgcaatacctctcccggtttgagagctggacacccagggagccgcggtgtgtccagctgatcaaccacttgcacgccgtggccacccagttcttgcccaccccgcagctgttgactcaacaggtccctctgagcaaaggcaccggcgctccctcggccgccgggtccgcggccgccccctgcctggagcgcgcggggcagaagctggagcccctcgcctactgcgtgcccttcatccagcggactcagcccagcgccgagctcgccgccgagaacgacacggacaccgactgcggctacggcggcgaagccgaagcccggccggactgtttgtaaggctattgcgctggggcgagacacgtcatcatcaaacaagagcctc

SEQ ID NO: 187163 - DNA, 1485 bp, Homo Sapiens
ttggccccttccccctggtgccccttctagtgtcttaagactttgtcttaacaagtataacattacattttgttgttaaaacctttcgaaactgtattcagtgattcttccaagtttatctgctctgcactatttcactaataaaccctggctaccacgtagcccttgatctccaagtagtttacctatgcaagacctgtgacactctgaattcacttctctttctttcagaaagtagtcataaatggagcttaattataaaggtaaaagcttgtctccaaccagtttcattttggccatttctttttcaaaatgtcagctgttttcctccaagatttttcaccaaaacaatgatcataagtgctggaatatataatactttgcaggcataaaataacccagacatactctcatatttctttggtgtattttggttggtaaaacttaccagcattaaatgtaaaatataatgaggagttaattccttacctagaactatttcttccttttaagattcataagtaaccttttatttttacagagctacgtataacttccacattacagtcagggacctgaggtgtaacttactaagtgaaccccaaggttattttatcttgcaaaagaaacctaaaccaaactaagggccttacagtttatggttagactgaatcaaaagctataacctcaatttttccaaaaacagcttctgactgcaaaagcaagtcatacagttgttaggtatgaaatagcactgatcaggaaatgcatcttcgcagatggtatttccttcagaaaagacttttctacttttaatataaattaagccataacagtttcatgctgtggaaagagggtgaaaaggttcattttaagagattatataatatgaactttcacatttactgtgaaatgtctaactttgccagtgcttcagcaagtttttttggggggtgatggggaggggtagtattggttttagaggtttcaaatctgtgaactttggagaggggacagttgttggctctggtatttactagttttgtagtaacgttttgctagcctgactgacttttcttactggtttttatgcccacggtccgaggggactgttcttcttgtttggggtgtctgcggaatagcgtctcgtcttgtttgtataggcagtcaatgtgtgtgacatgtgtgtcctttcagtccggaagcccactgtgtgacaatggcgtggggtgtggctgggaggtggggtgctgaagcttgaagagcatttctttgctgattcataacagtatttcccatcttttgcctgcaggcagggaaagtgtacagtatttattttgtttctgttttactttaaatttgtaagtctttaagtagcttacattgattattataggggaggacaagtgacttgtttaaagttgtatttagtattctttccaatttctgtattttaaaatattgaaattaaaattgtattacttc

SEQ ID NO: 187164 - DNA, 1860 bp, Homo Sapiens
ttggcgcagccattttctgtccaaccaaacagccgattggagacgggagccaaccagggctgcattggaggttgaaatcacaaagattagacacctttttagataggtgttcttcagcaccactgacaacacggttctgacagtatttcatgacaatggatggtgacagttctacaacagatgcttctcaactaggaatctctgcagactatattggaggaagtcattatgttatacagcctcatgatgatactgaggacagcatgaatgatcatgaagacacaaatggttcaaaagaaagtttcagagaacaagatatatatcttccaatagcaaacgtggctaggataatgaaaaatgccatacctcaaacgggaaagattgcaaaagatgccaaagaatgtgttcaagaatgtgtaagtgagttcatcagttttataacatctgaagcaagtgaaaggtgccatcaagagaaacggaaaacaatcaatggagaagatattctctttgctatgtctactttaggctttgacagttatgtggaacctctgaaattataccttcagaaattcagagaggctatgaaaggagaaaagggaattggtggagcagtcacagctacagatggactaagtgaagagcttacagaggaggcatttactaaccagttaccagctggcttaataaccacagacggtcaacaacaaaatgttatggtttacacaacatcatatcaacagatttctggtgttcagcaaattcagttttcatgatctgaagaaatgatggaatggggagtgtagagaaatgagagtctgtatgattctggaacagagacatcagaaggaaagactggtgaaaagatgtatctttgtatattaatagctgtaatgtagcttcctgatgcttgactaattgaggtgttaattctgacttgagaatctttttcatgaatgattttaaagaaaaatttggattttaaaggtattaaaatatttttgttttgtacgagagtttgttgctctgtatgactcctgtatgcattgtatattgcaatttattactgtcagagatttgtagacagtttcttattttcatattgaatcatgttacttttgtaattcaagtaagcggctgggttaattcatgatgtttgcccttttaataaaatataagggtagagttcattttgaatgcaagttgcctttattataaatttgagtttgtcttggttataccttgcatgataacctagctagatttctagcatttgctgtatttattaaaattattatttttttggtaaaacattaatagtttaagcagcatcatttttttaaaaaatgtaattgaataagtgtgaatgcagaagcaaatattgtctgccctgttaaacttggtgcccattaacagtgtttacactgttcatcgtgcctgttaatgtagttttagttactggagcttttttaagactagatttggttttgagttacatttttaagaatgtgggaatatatttaagtttaatgtagtcctagtgctcttgaaatggtgcccctttcatttggtacatgattttttttcaaatcatatcttcaagtactatagtattctcttacagaagaggagttttatagtctgatggtaaatgtcttcattttacctttttaattgaaatgtcaagtttcctgttacactatggaaaccaagaaacatcagacatcattgcgtgtacagaccttttgcatgggtgagtggatgaaatggagaacagagtgagtgctgtgaacggtgtgaaatagaagccaacttctagtatgctgtcttcatctctgcaataaactaaacgtaaataatgaa

SEQ ID NO: 187165 - DNA, 1638 bp, Homo Sapiens
ttggcccgccggcaggttccctggtcagcgtcccatcccggtcgggagttctctccaggcggcacgatgccgaggaaacagtgaccctgagcgaagccaagccgggcggcaggaacttctgcaatgtcccatcaacctctcagctgcctcactgaaaaggaggacagccccagtgaaagcacaggaaatggacccccccacctggcccacccaaacctggacacgtttaccccggaggagctgctgcagcagatgaaagagctcctgaccgagaaccaccagctgaaagaagccatgaagctaaataatcaagccatgaaagggagatttgaggagctttcggcctggacagagaaacagaaggaagaacgccagttttttgagatacagagcaaagaagcaaaagagcgtctaatggccttgagtcatgagaatgagaaattgaaggaagagcttggaaaactaaaagggaaatcagaaaggtcatctgaggaccccactgatgactccaggcttcccagggccgaagcggagcaggaaaaggaccagctcaggacccaggtggtgaggctacaagcagagaaggcagacctgttgggcatcgtgtctgaactgcagctcaagctgaactccagcggctcctcagaagattcctttgttgaaattaggatggctgaaggagaagcagaagggtcagtaaaagaaatcaagcatagtcctgggcccacgagaacagtctccactggcacggcattgtctaaatataggagcagatctgcagatggggccaagaattacttcgaacatgaggagttaactgtgagccagctcctgctgtgcctaagggaagggaatcagaaggtggagagacttgaagttgcactcaaggaggccaaagaaagagtttcagattttgaaaagaaaacaagtaatcgttctgagattgaaacccagacagaggggagcacagagaaagagaatgatgaagagaaaggcccggagactgttggaagcgaagtggaagcactgaacctccaggtgacatctctgtttaaggagcttcaagaggctcatacaaaactcagcgaagctgagctaatgaagaagagacttcaagaaaagtgtcaggcccttgaaaggaaaaattctgcaattccatcagagttgaatgaaaagcaagagcttgtttatactaacaaaaagttagagctacaagtggaaagcatgctatcagaaatcaaaatggaacaggctaaaacagaggatgaaaagtccaaattaactgtgctacagatgacacacaacaagcttcttcaagaacataataatgcattgaaaacaattgaggaactaacaagaaaagagtcagaaaaagtggacagggcagtgctgaaggaactgagtgaaaaactggaactggcagagaagctctggcttccaaacagctgcaaatggatgaaatgaagcaaaccattgccaagcaggaagaggacctggaaaccatgaccatcctcagggctcagatggaagtttactgttctgattttcatgctgaaagagcagcgagagagaaaattcatgaggaaaaggagcaactggcattgcagctggcagatctgctgaaagagaatgatgctt

SEQ ID NO: 187166 - DNA, 1537 bp, Homo Sapiens
ttggctcacttttcccagggcggatgcgcctgcgctcagctgcctgggcgggctgggaggcgcgggttgaaaagtctcgttccaagtttggagagagagagaagagcgcctcagacctcggtacccgcgagcggggaggaggcaggaaagaaggacgcggcgtctggggagcacccaggcagcaagacggggcccgggctttcgacagtggggagtgtgacgcgcttgggaaaggcaggagcgccagcggtcgggctgctcttggctaacgagaggagtccgaggcggcggcgaggggcgaacgacccgacgcaagatggcgagtaaagagatgtttgaagatactgtggaggagcgtgtcatcaatgaagaatataaaatctggaagaagaatacaccgtttctatatgacctggttatgacccatgctcttcagtggcccagtcttaccgttcagtggcttcctgaagtgactaaacctgaaggaaaagattatgcccttcattggctagtgctggggactcatacgtctgatgagcagaatcatctggtggttgctcgagtacatattcccaatgatgatgcacagtttgatgcttcccattgtgacagtgacaagggtgaatttggtggctttggttctgtaacaggaaaaattgaatgtgaaattaaaatcaatcacgaaggagaagtaaaccgtgctcgttacatgccgcagaatcctcacatcattgctacaaaaacaccatcttctgatgtgttggtttttgactatacaaaacaccctgctaaaccagacccaagtggagaatgtaatcctgatctcagattaagaggtcaccagaaggaaggctatggtctctcctggaattcaaatttgagtggacatctcctaagtgcatctgatgaccatactgtttgtctgtgggatataaacgcaggaccaaaagaaggcaaaattgtggatgctaaagccatctttactggccactcagctgttgtagaggatgtggcctggcacctgctgcacgagtcattgtttggatctgttgctgatgatcagaaacttatgatatgggacaccaggtccaataccacctccaagccgagtcacttggtggatgcgcacactgccgaagtcaactgcctctcattcaatccctacagcgaatttattctagccaccggctctgcggataagaccgtagctttatgggatctgcgtaacttaaaattaaaactccataccttcgaatctcataaagatgaaattttccaggtccactggtctccacataatgaaactattctggcttcagtggtactgaccgccgcctgaatgtgtgggatttaagtaaaattggggaagatcaatcagcagaagatgcagaagatgggcctccagaactccctgtttattcatggaggacacactgctaagatttcagattttagctggaaccccaatgagccttgggtcatttgctcagtgtctgaggataacatcatgcagatatggcaaatggctgaaaatatt

SEQ ID NO: 187167 - DNA, 1635 bp, Homo Sapiens
ttggcttcctgttgtggctcaaaggagggagcaagaagatttgcctttatatcaacaccaagcgacacgagttatttccaaggcctcagcatacacaggaatgttgtcttctagatatgccactgatacatgtgagttacctgagagagaagaaggcgaaggagaagaaactccaaattttagccactggggtccaccgagaattgttgagatttttagagaacccaatgtgtctcttgggatcagtattgttggtggacaaactgttataaaacgtctaaagaatggagaggagcttaaaggtatattcatcaaacaagttttagaagacagtccagcagggaagacgaacgcacttaaaactggagataaaatacttgaggtgtctggagtagatttgcagaatgcctcacacagcgaaacagttgaggccattaagaatgcaggaaaccctgtggtgttcattgttcagagtttgtcatccactccacgagtcattcctaatgtacataacaaggccaacaaaatcaccagtaaccagaaccaggacacccaagaaaagaaagaaaagaggcaaggaactgctccaccgccaatgaaacttcctcctccttataaagctctgactgatgacagtgatgaaaatgaagaagaagatgcctttaccgaccaaaaaatcagacaaagatatgcagatctgcctgggaactgcacattattgaacttgaaaaagataagaatggacttggactcagccttgctggtaataaagaccgatcacgcatgagcatatttgtggtgggaattaacccggaaggacctgctgccgcagatggacgaatgcgtattggagatgaactcttagagataaacaatcagattctgtatggaagaagtcaccaaaatgcatctgccattattaagactgccccatcaaaggtcaagctggttttcatcagaaacgaggatgcagtcaatcagatggccgttactccctttccagtgccatcaagttctccatcttctattgaggatcagagcggcaccgaacctattagtagtgaggaagatggcagcctcgaagttggtattaaacaattgcctgaaagtgaaagcttcaaactggctgtcagccagatgaaacagcaaaaatatccaacaaaagtctccttcagttcacaagagataccattagcaccagcttcatcataccattcaacagatgcagacttcacaggctatggtggtttccaggctcctctgtcagtggaccccgcaacgtgtcccattgtccctggacaggaaatgattatagaaatatccaagggacgttcagggcttggtctcagcattgtgggaggaaaagacacacccttgaatgctatagttatccatgaagtctatgaagaaggggcagcagccagagatggaagactttgggctggtgaccagatattagaggttaatggggttgacctgaggaactccagccacgaagaagccatcacagccctgaggcagaccccccagaaggtgcggctggtggtgtatagagatgaagcacactaccgggatgaggagaacttgcagattttccctgtggatctgcagaagaaagctggccagggcctgggg

SEQ ID NO: 187168 - DNA, 934 bp, Homo Sapiens
ttggcccagccccagcctcatctacaccccaggagccctggcctggccctaccgcccccagccctaccagccgcccgccctgggctgtggaccctgcgtttgccgagcgctatgccccggacaaaacgagcacagtgctgacccggcacagccagccggccacgcccacgccgctgcagagccgcacctccattgtgcaggcagctgccggaggggtgccaggagggggcagcaacaacggcaagactcccgtgtgtcaccagtgccacaaggtcatccggggccgctacctggtggcgctgggccacgcgtaccacccggaggagtttgtgtgtagccagtgtgggaaggtcctggaagagggtggcttctttgaggagaagggcgccatcttctgcccaccatgctatgacgtgcgctatgcacccagctgtgccaagtgcaagaagaagattacaggcgagatcatgcacgccctgaagatgacctggcacgtgcactgctttacctgtgctgcctgcaagacgcccatccggaacagggccttctacatggaggagggcgtgccctattgcgagcgagactatgagaagatgtttggcacgaaatgccatggctgtgacttcaagatcgacgctggggaccgcttcctggaggccctgggcttcagctggcatgacacctgcttcgtctgtgcgatatgtcagatcaacctggaaggaaagaccttctactccaagaaggacaggcctctctgcaagagccatgccttctctcatgtgtgagccccttctgcccacagctgccgcggtggcccctagcctgaggggcctggagtcgtggccctgcatttctgggtagggctggcaatggttgccttaaccctggctcctggcccgagcctggggctccctgggccctgccccacccacct

SEQ ID NO: 187169 - DNA, 1582 bp, Homo Sapiens
  misc_feature (46)..(68): n is a, c, g, or t
  misc_feature (1079)..(1156): n is a, c, g, or t
  misc_feature (1454)..(1470): n is a, c, g, or t
ttggctcaactcatatgtttaattgaattgaaaatatcccttaggnnnnnnnnnnnnnnnnnnnnnnnccacaagagccccagccagtttactccaggtagatttccacaatatgcaaagtggtggtggggtcaagacagatgacaccagcactttaaactctttgtgtgggtatgcgtgggtgtatgtttgggaagaaaaacaaaggtgcagactatcttcctttttttcttcttcagcctccatccctggcctcctcccctcacacacactggacttggtacaaaatgtcggtgtggtcctagatgaagcattggggtgggggagggagagggagctttgtgttaagtgcctactggaaatgcactgtgggtttttttcctgtatgggaaaccatttatgccaagcttttccccatttcccatatttatctcatctggttagctgcctctgcttccagctttgtgtaattctctttgccagctgcacaaagctgattttttccaaagtctaaagactgagctcacctggctagattgttgtgtgttttgttgaattttttcataatgtaatgccgtatttattgtttttaaaatgaaaggaatactaataagtcttaaaagttccttcatgcataagatttttttccagttactgggcttaactggtgtacattaattagatgtccatactgtattttgtttgcattaagtaattttctttttgacttagtatccggcacacaaagtgggttagtactacagtatttgcgttactttaagtactaagtatgcaggtttcctggtaccattgagttgctgctattaaagctcacacacgaaatggctaaaagttacaagtgtgcaaattatgactgcgtgagccttaaaaataaaatgtataaagggcaacacatgagctgtcaaacagtgttaggagtgtgtttatatgtacagagttgtgcatagcaatcgttttatttaagttgatatgtagtctactcacattttcattatttagcaattttgtacaaaaatagcaattaatttgtaaacactgccagaatactttctagctgnnnnnnnnnnnnnnnnnnnnnnnnnnnnnnnnnnnnnnnnnnnnnnnnnnnnnnnnnnnnnnnnnnnnnnnnnnnnnnacgtgtagatctgtaaataaaattgcagtatttaaagcttaagctttcaggaaaaagaaaataagaattcagtgtgtgcatgacaactcgtgtgtatgagaaggagggatatgaaggaagatggcttgcagagtaagtcgggtggcaattgtcagggtgtgggaatttcttttcctacggggtacgtgattttgtaaaaaggaagtatttctcccaaaattgggagtaggcaaactactaatcagtttagctttgtgttgtatgctagtttaaaaaagaaaatatgtaatataatgtnnnnnnnnnnnnnnnnngcttttatgatggattttgtaaatagatttgttacagggtgacctgttctctagctgtgatcttaccacttcaaatgggtgtgatttgaataaatattgtatggtgaaggat

SEQ ID NO: 187170 - DNA, 975 bp, Homo Sapiens
ttgggtgatgagctcatgggcggcgggggcttgcacaccatggggacctacattgtggacctgctgacccacctgaccggccggagagccgagaaggtgcacgggctgctcaagacattcgtgaggcagaacgctgccatccgtggcatccggcacgtcactagcgatgacttctgtttcttccagatgctcatgggtgggggtgtgtgtagcacagtgacactcaacttcaacatgccaggcgcctttgtgcatgaagtcatggtggtaggctctgcaggacgcctcgtcgcccggggagccgacctctatgggcagaagaactctgccacgcaagaggagctgctcttgagggactcgctggcagtgggcgcaggactgcctgagcaggggccccaggatgtcccgctgctgtacctgaagggcatggtctacatggtgcaggccttgcgccagtccttccaggggcagggcgaccgccgcacctgggaccgcacccctgtctccatggccgcctccttcgaggatgggctgtacatgcagagcgtggtggatgccatcaagaggtcgagccgatccggggagtgggaggctgtggaggtgctgacggaggagcccgacaccaaccagaacctgtgtgaggcacttcagcggaacaacctatgagcctgcacctgggctccttgccacagggcagagggaccagggaggggaacaggagccatgacatgacagggacttggccctagcagagacagtgtctttcatttaatgagtctgggtgaagccagaggtggctctgggacttcgccccctccagtggctcatctgctcctcagacttgcagggtggcaaatgttcctgttgccaagttaccacggtgggcacagggcagagctgccgccaggcctcctcatggtgatgccagtgagtcggaccaggaaaggctcaccctgtggagcccttcaacctgat

SEQ ID NO: 187171 - DNA, 1367 bp, Homo Sapiens
ttggggcagtggcgcttgagttggtcgggggcagcggcagatttgaggcttaagcaacttcttccggggaagagtgccagtgcagccactgttacaattcaagatcttgatctatatccatagattggaatattggtgggccagcaatcctcagacgcctcacttaggacaagctgtaaaaattaaaatgaacaaattacggcaaagttttaggagaaagaaggatgtttatgttccagaggccagtcgtccacatcagtggcagacagatgaagaaggcgttcgcaccggaaaatgtagcttcccggttaagtaccttggccatgtagaagttgatgaatcaagaggaatgcacatctgtgaagatgctgtaaaaagattgaaagctgaaaggaagttcttcaaaggcttctttggaaaaactggaaagaaagcagttaaagcagttctgtgggtctcagcagatggctcagagttgtggatgaaaaaactaaggacctcatagttgaccagacgatagagaaagtttctttctgtgccccagacaggaactttgatagagccttttcttacatatgccgtgatggcaccactcgtcgctggatctgtcactgcttcatggctgtcaaggacacaggtgaaaggttgagccatgcagtaggctgtgcttttgcagcctgtttagagcgcaagcagaagcgggagaaggaatgtggagtgactgctacttttgatgctagtcggaccacttttacaagagaaggatcattccgtgtcacaacagccactgaacaagcagaaagagaggagatcatgaaacaaatgcaagatgccaagaaagctgaaacagataagatagtcgttggttcatcagttgcccctggcaacactgccccatccccatcctctcccacctctcctacttctgatgccacgacctctctggagatgaacaatcctcatgccatcccacgccggcatgctccaattgaacagcttgctcgccaaggctctttccgaggttttcctgctcttagccagaagatgtcaccctttaaacgccaactatccctacgcatcaatgagttgccttccactatgcagaggaagactgatttccccattaaaaatgcagtgccagaagtagaaggggaggcagagagcatcagctctctgtgctcacagatcaccaatgccttcagcacacctgaggaccccttctcatctgctccgatgaccaaaccagtgacagtggtggcaccacaatctcctaccttccaagctaatggcactgactcagccttccatgtgcttgctaagccagcccatactgctctagcacccgtagcaatgcctgtgcgtgaaac

SEQ ID NO: 187172 - DNA, 1003 bp, Homo Sapiens
ttgggttgtcatgggggaggtggtggcgcttggtggccactggcggccgaggtagaggcagtggcgcttgagttggtcgggggcagcggcagatttgaggcttaagcaacttcttccggggaagagtgccagtgcagccactgttacaattcaagatcttgatctatatccatagattggaatattggtgggccagcaatcctcagacgcctcacttaggacaaatgaggaaactgaggcttggtgaagttacgaaacttgtccaaaatcacacaacttgtaaagggcacagccaagattcagagccaggctgtaaaaattaaaatgaacaaattacggcaaagttttaggagaaagaaggatgtttatgttccagaggccagtcgtccacatcagtggcagacagatgaagaaggcgttcgcaccggaaaatgtagcttcccggttaagtaccttggccatgtagaagttgatgaatcaagaggaatgcacatctgtgaagatgctgtaaaaagattgaaagctactggaaagaaagcagttaaagcagttctgtgggtctcagcagatggactcagagttgtggatgaaaaaactaaggacctcatagttgaccagacgatagagaaagtttctttctgtgccccagacaggaactttgatagagccttttcttacatatgccgtgatggcaccactcgtcgctggatctgtcactgcttcatggctgtcaaggacacaggtgaaaggttgagccatgcagtagctgtgcttttgcagcctgtttagagcgcaagcagaaacgggagaaggaatgtggagtgactgctacttttgatgctagtcggaccacttttacagagaaggatcattccgtgtcacaacagctcactgaacaagcagaaagagaggagatcatgaaacaaatgctagatgccaagaaagctgaaaccgaatagataatccgttggttcatcagttggcccctggccacactggcccc

SEQ ID NO: 187173 - DNA, 1589 bp, Homo Sapiens
ttggcttcctgcttcccagaggccgggatccggagccgcccgaagccggtgccgcagccccctgcgcccccggtgcccccgacatgtccttccgcaaagtggtccggcagagcaaattccggcatgtgttcgggcagccggtcaagaacgaccagtgctatgaggacattcgcgtgtcccgtgttacctgggacagcaccttctgcgccgtcaaccccaagttcctggcggtgattgtggaggccagtggagggggtgcctttctggtgctccccctaagcaagacgggccgcattgacaaggcctacccgacggtgtgtgggcacacgggacctgtcctggacatcgactggtgtcctcacaacgacgaagtcatagccagcggctcggaggactgcacggtcatggtgtggcagatcccagagaacgggctgacctccccgctgacagagccggtggtggtactggaggggcacaccaagcgagtgggcatcatcgcctggcaccccacggcccgaaacgtgctgctcagtgcaggctgcgacaacgtggtactcatctggaatgtgggcacagcggaggagctgtaccgcctggacagcctgcaccctgacctcatctacaatgtcagctggaaccacaatggcagcctgttttgctcagcatgcaaggacaagagcgtgcgcatcatcgacccccgtcggggcaccctggtggcagagcgggagaaggctcatgagggggcccggcccatgcgggccatcttcctggcagatggcaaggtgttcaccacaggcttcagccgaatgagcgagcggcagctggcgctctgggacccagaaaacctcgaggaacccatggccctgcaggaactggactcgagcaacggggccctgctgcccttctacgaccccgacaccagtgtggtctacgtctgcggcaagggtgactccagcatccggtactttgagatcacagaggagcctccctacatccacttcctgaacacgttcaccagcaaggagccgcagcggggtatgggcagcatgcccaagcggggcctggaggtcagcaagtgcgagatcgcccggttctacaaactgcatgagcgcaagtgtgagcccatcgtcatgactgtgccaagaaagtcggacctcttccaggatgatctgtaccccgacacagccgggcccgaggcagccctggaggctgaggagtgggtgagcgggcgggatgccgacccgatcctcatctcactgcgggaggcctacgtgcccagcaagcagcgggacctgaagatcagccggcgcaacgtgttgtctgacagccggcccgccatggccccgggctcctcccacctaggggcccccgcctccaccaccactgctgctgatgccacccccagcggcagcctggccagaaccggggaggctgggaagctggaggaggtgatgcaggagctgcgggccctgagggcgctggtcaaggagcagggcgaccgcatctgccgcctggaggagcagctgggccgcatggagaacggggatgcgtagggtcacagccacacgccaccttcatctcctccgccg

SEQ ID NO: 187174 - DNA, 1755 bp, Homo Sapiens
  misc_feature (1396)..(1407): n is a, c, g, or t
ttggtgctcggcgcgtcggcgcaggtttccgcagctgagggggcagctccgcggcggcgtccggggtctccagtagggctgacgctccggtgctcgcacaatcccccgcctcggctggcaacgggcgtccctccactccccgagtccccggcagccgccgccaccccagcgcgccccgatctggccccctgccccgcgaagatggctgccgtacgccgggcccgcagttattgccgctgcctggtgcgcttctccgaccgagaactctgctaagctccgctgcagagacaggcaggagtagacacccggacacccagcacccctcctccggggggcggtgcagagggggcacggagagcccctcgagcgcagcaggccgccccgccagcatggcagaagctgaggaagattgtcattctgatactgtcagagcagatgatgatgaagaaaatgaaagtcctgctgaaacagatctgcaggcacaactccagatgttccgagctcagtggatgtttgaacttgctccaggtgtaagctctagcaatttagaaaatcgaccttgcagagcagcaagaggctctctccagaaaacatcggcagataccaaaggaaaacaagaacaggcaaaagaagaaaaggctcgagaactcttcctaaaagcagtagaagaagaacaaaatggagctctctatgaagccatcaagttttatcgtagggctatgcaacttgtacctgatatagagttcaagattacttatacccggtctccagatggtgatggcgttggaaacagctacattgaagataatgatgatgacagcaaaatggcagatctcttgtcctacttccagcagcaactcacatttcaggagtctgtgcttaaactgtgtcagcctgagcttgagagcagtcagattcacatatcagtgctgccaatggaggtcctgatgtacatcttccgatgggtggtgtctagtgacttggacctcagatcattggagcagttgtcgctggtgtgcagaggattctacatctgtgccagagaccctgaaatatggcgtctggcctgcttgaaagtttggggcagaagctgtattaaacttgttccgtacacgtcctggagagagatgtttttagaacggcctcgtgttcggtttgatggcgtgtatatcagtaaaaccacatatattcgtcaaggggaacagtctcttgatggtttctatagagcctggcaccaagtggaatattacaggtacaactgtagtacactgagtgagtggaaaattctctctctccatgtattagttaaatggacatctgttctttgttgcttttgattgacccgcaaaatggccctcagtatttttatctagtactcaatgtaggaattgcactnnnnnnnnnnnntaggctaatataaattacagaatttcttctggcctcttttagatttcttcttgtcttttgccctgggtgtatttacttgccttttcaaatagcttgtgcttttattccaccttattgcttgccaaatattattgtcatttagaaaaaaatagacatgttaaccgttgtgtgtggctctcactttgtttgaaattgttgctttgggaaaaacacagaactttaataaaacaatatttgacttttattcagtgagtaaaacttaaaagttcaacagtttctcctgaggaagataaaaatatctttggttctttgttgctggactaacaggtagtcagtaatatttgtttt

SEQ ID NO: 187175 - DNA, 1032 bp, Homo Sapiens
ttggggcaacagtggactcagacttctgaggaatttgggtttgttcccctttgtagactaatgtgtaggttgctgttgtgcgaagatcgtgtaactttagcagacatgtatttcttgcacagctaatagaagacaaagttgaaaaaaaggatgcaaaataaaaagctgcctaaggtgaaagttagaaattgtagacttttttttaccataatagtatgtgttcattaaagatgatttgggtttattttacagctatataaaacataatttgatgatgtacttctaacctttcaagcattttctgttattgactatataatatagcctccataaatgtttttaatgacaatattctgttgaacggttgtaccatactcagccatgccctttcattttgacgatagtgtttctaatattttgtatttttattcccctccccccatttttgtattacttaagatagattatcagaaagacagttactttgtcaaagagtatgggcacttgatacataatgccaaattattcttcataagagctgttgccaaatcagtgataatgttcatttaattgtattcttgccagccatgtttactggggtgatagttgttattgtggttgttattgttctttaggggtaggttcccaatatgtggtctttaaataattatctaatggtgtttaaaaagatgtttattctgtttgtcaggtacaaagatatttatgatacatgtatgacttgtctaagttattaacattttctctagccttaggtaatgcatgaaagcacatgtttcagtgccactcacataagaagtgcccggtaagtgttagctattattgtctacttgagttactactttctaaaagtatgttgaagtctttttctgtaattgcagatttgttgattttgcatttgagtattttctatattttgaagctgttagatgcgtagtcatgatttttggtggaatgttttatcaatttttgaaaattgcctttgtctcatataatgcttttcatattgaacta

SEQ ID NO: 187176 - DNA, 891 bp, Homo Sapiens
  misc_feature (620)..(642): n is a, c, g, or t
ttgggttataggagcagcagaaataatgatatgaatgacagttatggggtcaataataaaaataatgctggctgtcacttaattgggtgtttgatgttttagtacatcctttgtaacccttaggtgttccttgctggattttcttgtgataactcttccttttaaagcaacgattccaacctcccaaccttggctgcacttaaagaatcaccgctcccagcccaagcttcccttagttgagcaagttctgttaattttgttttgccaggctgcactttgcccatacatatggcaagggatgtttaaacgtttatctttgagcatgtacgttttactatttttctttagattgggatgcttggaaggtgtgtctacgacttcgagataatggacttctggccaagccaacccatggcgacattatcaggtttgcgcctccgctggtgatcaaggaggatgagcttcgagagtccattgaaattattaacaagaccatcttgtctttctgagggtagccagctgttttcagtggtccctgggagccagctggagacaggtggtcctgtaaaagctttattcctaatgtgggcacattccactcccatgagtcttcaaaaacnnnnnnnnnnnnnnnnnnnnnnncagttgatacataatagaacaacgtttatgaacctgccgtttgctttgtaacgtaactaaataatgtaatggcatctatattcagttgaagtgttttgatgtgcatgtgtacttcctaaggtgaaatgcatctatatacagacagcctctaaatcaagtccttcagtataattgatatatgtttttataatttcctcactggtataagtgtttcatatttgaaaaagttatctctgggtattgcataaa

SEQ ID NO: 187177 - DNA, 1898 bp, Homo Sapiens
  misc_feature (1533)..(1555): n is a, c, g, or t
gagcaatgctttactataaaggccaactttgtacaaaaaagttgggtacccggttgtcctcaggcgctgtcagatctgtggtttttctacttgaaggacacaatgttttccaaactagcacatttgcagaggtttgctgtacttagtcgcggagttcattcttcagtggcttctgctacatctgttgcaactaaaaaaacagtccaaggccctccaacctctgatgacatttttgaaagggaatataagtatggtgcacacaactaccatcctttacctgtagccctggagagaggaaaaggtatttacttatgggatgtagaaggcagaaaatattttgacttcctgagttcttacagtgctgtcaaccaagggcattgtcaccccaagattgtgaatgctctgaagagtcaagtggacaaattgaccttaacatctagagctttctataataacgtacttggtgaatatgaggagtatattactaaacttttcaactaccacaaagttcttcctatgaatacaggagtggaggctggagagactgcctgtaaactagctcgtaagtggggctataccgtgaagggcattcagaaatacaaagcaaagattgtttttgcagctgggaacttctggggtaggacgttgtctgctatctccagttccacagacccaaccagttacgatggttttggaccatttatgccgggattcgacatcattccctataatgatctgcccgcactggagcgtgctcttcaggatccaaatgtggctgcgttcatggtagaaccaattcagggtgaagcaggcgttgttgttccggatccaggttacctaatgggagtgcgagagctctgcaccaggcaccaggttctctttattgctgatgaaatacagacaggattggccagaactggtagatggctggctgttgattatgaaaatgtcagacctgatatagtcctccttggaaaggccctttctgggggcttataccctgtgtctgcagtgctgtgtgatgatgacatcatgctgaccattaagccaggggagcatgggtccacatacggtggcaatccactaggctgccgagtggccatcgcagcccttgaggttttagaagaagaaaaccttgctgaaaatgcagacaaattgggcattatcttgagaaatgaactcatgaagctaccttctgatgttgtaactgccgtaagaggaaaaggattattaaacgctattgtcattaaagaaaccaaagattgggatgcttggaaggtgtgtctacgacttcgagataatggacttctggccaagccaacccatggcgacattatcaggtttgcgcctccgctggtgatcaaggaggatgagcttcgagagtccattgaaattattaacaagaccatcttgtctttctgagggtagccagctgttttcagtggtccctgggagccagctggagacaggtggtcctgtaaaagctttattcctaatgtgggcacattccactcccatgagtcttcaaaaacnnnnnnnnnnnnnnnnnnnnnnncagttgatacataatagaacaacgtttatgaacctgccgtttgctttgtaacgtaactaaataatgtaatggcatctatattcagttgaagtgttttgatgtgcatgtgtacttcctaaggtgaaatgcatctatatacagacagcctctaaatcaagtccttcagtataattgatatatgtttttataatttcctcactggtataagtgtttcatatttgaaaaagtttatctctgggtattgcataaaaaggcttcatcttataaagtgaaatcattgttattggaattttaaggaaggattaatggttaagtgtatataaaatactaatattaagtaaac

SEQ ID NO: 187178 - DNA, 2281 bp, Homo Sapiens
acaaaaaagttggcaaggaatcgacaatgacagcaaagaacccatgataattggagagcagttctgaatctttgatcctttatttgaacatcatattctgccttataccttaggctcaaggacttttactgatatgactcagactaccccagaaagatatgtgccattactagggcatgcctcttaatggaggcctttggaacaacctaaaagcttatattctttttactatttggccattggaacttaattgataacataccttttgagtaggcactatgcatctagaattatggaaatacagaaaacatataccatggttcttcctctcataaaacataacgtctggttgtatgaatatacattccataaatatatatttcatgatgttataaaactataggggagattttttaattaacttataaaccaaaataatgaacatttataaaaattatatctcatccacatacatttttcagtaggcttaattcacataaaactaacacttatcaagttattaattgacacttgattatttgattagactttttaacctttagaaaaatgtacgtttggaagaaaatgaaaaacaactcagactttaaaatcagaggtgttaaatttggagagacagtttgtcataaatgtacgttctcaatgtgatactttttttctttctttaagcaacctgtcacataataggcgtgtgccaaaaattggtccttatccagattattcttcctcctcatacattgaagactctatccatcatactgacagcatcgtgaagaatatttcctctgagcattctatgtccagcacacctttgactataggggaaaaaaaccgaaattcaattaactatgaacgacagcaagcacaagctcgaatccccagccctgaaacaagtgtcaccagcctctccaccaacacaacaaccacaaacaccacaggactcacgccaagtactggcatgactactatatctgagatgccatacccagatgaaacaaatctgcataccacaaatgttgcacagtcaattgggccaacccctgtctgcttacagctgacagaagaagacttggaaaccaacaagctagacccaaaagaagttgataagaacctcaaggaaagctctgatgagaatctcatggagcactctcttaaacagttcagtggcccagacccactgagcagtactagttctagcttgctttacccactcataaaacttgcagtagaagcaactggacagcaggacttcacacagactgcaaatggccaagcatgtttgattcctgatgttctgcctactcagatctatcctctccccaagcagcagaaccttcccaagagacctactagtttgcctttgaacaccaaaaattcaacaaaagagccccggctaaaatttggcagcaagcacaaatcaaacttgaaacaagtcgaaactggagttgccaagatgaatacaatcaatgcagcagaacctcatgtggtgacagtcaccatgaatggtgtggcaggtagaaaccacagtgttaactcccatgctgccacaacccaatatgccaatgggacagtactatctggccaaacaaccaacatagtgacacatagggcccaagaaatgttgcagaatcagtttattggtgaggacacccggctgaatattaattccagtcctgatgagcatgagcctttactgagacgagagcaacaagctggccatgatgaaggtgttctggatcgtcttgtggacaggagggaacggccactagaaggtggccgaactaattccaataacaacaacagcaatccatgttcagaacaagatgttcttgcacagggtgttccaagcacagcagcagatcctgggccatcaaagcccagaagagcacagagacctaattctctggatctttcagccacaaatgtcctggatggcagcagtatacagataggtgagtcaacacaagatggcaaatcaggatcaggtgaaaagatcaagaaacgtgtgaaaactccctattctcttaagcggtggcgcccctccacctgggtcatctccactgaatcgctggactgtgaagtcaacaataatggcagtaacagggcagttcattccaaatccagcactgctgtttaccttgcagaaggaggcactgctacaaccatggtgtctaaagatataggaatgaactgtctgtgaaatgttttcaagcctatggagtgaaattattttttgcatcatttaaacatgcagaagatgttt

SEQ ID NO: 187179 - DNA, 1138 bp, Homo Sapiens
ttggctcagggacccaggctctgtgatcgtggccttcaaggagggggaacagaaggagaaggagggtatcctgcagctgcgtcgcaccaattcggccaagcccagtccactggcatcatcgagcacggcctcctctacaacctctatctgtgtgtgtgggcaggtgctggctggggcgggagctctgcagtgtgacctgtgtcaggactggttccatgggcggtgtgtgtcagtgcctcgcctcctcagctctccgaggcccaatcccacctcatccccactgctggcctggtgggaatgggacaccaaattcctgtgtccactgtgtatgcgctcaaggcgcccgcgcctggagaccatcctggcactgctggtagccctgcagagactgcctgtgcggctgcccgagggcgaggccctgcagtgcctcacagagagggccatcagctggcaaggccgcgccaggcaggctctggcctctgaagatgtgactgctcttttgggacggctggctgagctccgccaacggctacaggctgaacctagacctgaggagcctcctaactaccctgcagcccctgcttctgaccccctcagagagggcagtggcaaggatatgcctaaggtccagggcttactggagaatggagacagtgtgaccagtcctgagaaggtagccccggaggagggctcaggtaagagagatctggagctgctgtcctcgctgttgccacagttgactggccctgtgttggaactgcctgaggcaacccgggcccccttggaggagctcatgatggagggggacctgctcgaggtgaccctggatgagaaccacagcatatggcagctgctgcaggctggacagcccccagacctggagaggatccgcacacttctggagctggagaaggcagagcgtcacgggagtcgggctcggggccgggccctggagaggcggcggcggcggaaggtggatcggggtggggagggcgatgacccagcccgagaggagctagagccaaagagggtacggagctcacggccagaggctgaggaggtccaggaggaggaagagctggaggaggagactgggggtgagggcccccctgcacccatccccaccactggcagcccc

SEQ ID NO: 187180 - DNA, 1372 bp, Homo Sapiens
ttgggtcagtgcaatattgccagcacttacaagagttatttggcttttcatattttttgaggagactcttgacccaccgatgcaggctttggtgaagtgtgtggcttgggcgtccccaccgtgctgtcactgcagaggctggtccctggcgtctgtctgaggccacacacgtcttccctgcacaggttacttcttgctgcagattctgcgcaggatcggagctgtgggccaggctgtgtccaggacggcgtggtcggccctttggctggccgtggttgctccagggaaggcagcctctggagtgttctggtggctggggattggatggtaccagtttgttactttgatttcttggctgaatgtgtttcttcttaccaggtgccttcgaaacatctgcaagtttttagtcttgctcatcccactcttccttttactagcaggtctctccttacggggccagggcaatttcttttcgttcttgcccgtgttgaactgggcaagcatgcatagaacacagcgggtggatgacccccaggacgtgtttaaacccacgacttctcgcctgaagcagcctctgcagggtgacagtgaggcttttccgtggcattggatgagtggcgtggagcagcaggtggcctctctgtctggacagtgccaccaccatggtgagaatctccgagagctgaccactttgctacagaagctgcaggctcgggtggaccagatggaaggcggcgctgccgggccgtcagcttcggtcagagacgctgtgggacagcccccgagggagactgactttatggcctttcaccaagaacatgaagtgcgtatgtcacacttggaagatattctgggaaaactgagagaaaaatctgaggccatccagaaggaactagaacagaccaagcaaaaaacaatcagtgcggttggtgagcagctcctgcccacagtcaagcacctccagctggagctggatcagctaaagtcagagctgtccagctggcgacacgtgaagaccggctgtgagacagtggatgccgtacaagaaagagtggacgtgcaagtcagaaaaatggtgaaactcctgttttccgaagatcagcaaggcggttctctggaacagctgctgcagaggttctcatcacagtttgtgagcaaaggcgacttgcaaacgatgctgcgagacctgcatctgcagatcctgcggaacgtcacccaccacgtttccgtgacaaagcagctcccaacctcagaagccgtggtgtctgctgtgagcgaggcgggggcgtctggaataacagaggcgcaagcacgtgccatcgtgaacagcgccttgaagctgtattcccaagataagacccgggatggtgga

SEQ ID NO: 187181 - DNA, 1633 bp, Homo Sapiens
ttggcggtaagatggcggctgccgcggagtgcgatgtggtaatggcggcgaccgagccggagctgctcgacgaccaagaggcgaagagggaagcagagactttcaaggaacaaggaaatgcatactatgccaagaaagattacaatgaagcttataattattatacaaaagccatagatatgtgtcctaaaaatgctagctattatggtaatcgagcagccaccttgatgatgcttggaaggttccgggaagctcttggagatgcacaacagtcagtgaggttggatgacagttttgtccggggacatctacgagagggcaagtgccacctctctctggggaatgccatggcagcatgtcgcagcttccagagagccctagaactggatcataaaaatgctcaggcacaacaagagttcaagaatgctaatgcagtcatggaatatgagaaaatagcagaaacagattttgagaagcgagattttcggaaggttgttttctgcatggaccgtgccctagaatttgcccctgcctgccatcgcttcaaaatcctcaaggcagaatgtttagcaatgctgggtcgttatccggaagcacagtctgtggctagtgacattctacgaatggattccaccaatgcagatgctctgtatgtacgaggtctttgcctttattacgaagattgtattgagaaggcagttcagtttttcgtacaggctctcaggatggctcctgaccacgagaaggcctgcattgcctgcagaaatgccaaagcactcaaagcaaagaaagaagatgggaataaagcatttaaggaaggaaattacaaactagcatatgaactgtacacagaagccctggggatagaccccaacaatataaaaacaaatgctaaactctactgtaatcggggtacggttaattccaagcttaggaaactagatgatgcaatagaagactgcacaaatgcagtgaagcttgatgacacttacataaaagcctacttgagaagagctcagtggtgggattgttccagccctagactatctttatagacctccagcggaggagattgcacaagctccctcagtctcccatgcctgtgtctaacgcccctcacgttacatggacacagaacagtatgaagaagcagtacgagactatgaaaaagtataccagacagagaaaacaaaagaacacaaacagctcctaaaaaatgcgcagctggaactgaagaagagtaagaggaaagattactacaagattctaggagtggacaagaatgcctctgaggacgagatcaagaaagcttatcggaaacgggccttgatgcaccatccagatcggcatagtggagccagtgctgaggttcagaaggaggaggagaagaagttcaaggaagttggagaggcctttactatcctctctgatcccaagaaaaagactcgctatgacagtggacaggacctagatgaggagggcatgaatatgggtgattttgatccaaacaatatcttcaaggcattctttggcggtcctggcggcttcagctttgaagcatctggtccagggaatttcttttttcaatttggctaatgaaggcaaccacccagaacccagaaaatgcagattc

SEQ ID NO: 187182 - DNA, 1560 bp, Homo Sapiens
gccaactttgtacaaaaaagttggctattatggcctttcgagcagccaccttgatgatgcttggaaggttccgggaagctcttggagatgcacaacagtcagtgaggttggatgacagttttgtccggggacatctacgagagggcaagtgccacctctctctggggaatgccatggcagcatgtcgcagcttccagagagccctagaactggatcataaaaatgctcaggcacaacaagagttcaagaatgctaatgcagtcatggaatatgagaaaatagcagaaacagattttgagaagcgagattttcggaaggttgttttctgcatggaccgtgccctagaatttgcccctgcctgccatcgcttcaaaatcctcaaggcagaatgtttagcaatgctgggtcgttatccagaagcacagtctgtggctagtgacattctacgaatggattccaccaatgcagatgctctgtatgtacgaggtctttgcctttattacgaagattgtattgagaaggcagttcagtttttcgtacaggctctcaggatggctcctgaccacgagaaggcctgcattgcctgcagaaatgccaaagcactcaaagcaaagaaagaagatgggaataaagcatttaaggaaggaaattacaaactagcatatgaactgtacacagaagccctggggatagaccccaacaatataaaaacaaatgctaaactctactgtaatcggggtacggttaattccaagcttaggaaactagatgatgcaatagaagactgcacaaatgcagtgaagcttgatgacacttacataaaagcctacttgagaagagctcagtgttacatggacacagaacagtatgaagaagcagtacgagactatgaaaaagtataccagacagagaaaacaaaagaacacaaacagctcctaaaaaatgcgcagctcggactgaagaagagtaagaggaaagattactacaagattctaggagtggacaagaatgcctctgaggacgagatcaagaaagcttatcggaaacgggccttgatgcaccatccagatcggcatagtggagccagtgctgaggttcagaaggaggaggagaagaagttcaaggaagttggagaggcctttactatcctctctgatcccaagaaaaagactcgctatgacagtggacaggacctagatgaggagggcatgaatatgggtgattttgatccaaacaatatcttcaaggcattctttggcggtcctggcggcttcagctttgaagcatctggtccagggaatttcttttttcaatttggctaatgaagggcaaccacccagaacccagaaaatgcagattcactcagtttaatcttgaatgtggaaacagttcacctcctcccttcatcacgtctccgtgtgcttagagcagtttcgttttctcagttggatgccctgtgtctctgtgagtggggtggagcaaagggaaccaatgccgaagaccgagggcagggagggagcgggggtggacagggaggcagcttgtgaattttgtttactg

SEQ ID NO: 187183 - DNA, 943 bp, Homo Sapiens
tgggtcatattctcccctctatcatagaagttgacaatgaattgcaataaaactaagaaataactgaatgctgaaaaataccatgaattaatgttatggcttctttatttttgtatatccattcccacaaaattgaatttaagattattaatgaaaattctatattaagtaataatgcttgtattagtaatgggcaaagaagtctttctttgttacattaaccgttagtaaaagatgtactttgacatttctgatgtaaaacctatatgtaaatattgtaatttaaatatgattggacagctgttaagttttggggagggaagcagatgccagcgttctctgctgaaaagacaagatggcgcttgacggaccacagcagatggagctggaggaggaaaaggcaggcagtggactctgccagtattatctgtccaagattgaagaactccagggtcaactgcaatataaattggatgggggaaagccacaaggaacagttctgaactccaggtgcatttgcagctgattttgaatgataagacccaaaacctctggaggcggcaggtgcacgggaatgaactaaatgttaaagtgtgcctattacaggaggagctacagctgctgcaggaataggactcctgtgtcagggaagtagtccaggccatgggtaagaagaaagtgttggtcaaggtgcatctcaaggacaagtttgtcatagatgtggacaaaaatatcagcatcagtgatgtgacacccagttccttggtggttctaagaaatgacagctacactttgcacaagatcctacccaacaaggtggactcattggtgtcactgatgatggtgaagaaagtaccagattcagcttatgaaatgattggtagactggataggcagatcaagaaggatcaaagaagtgatcgacctgcctgctaagcatccc

SEQ ID NO: 187184 - DNA, 1067 bp, Homo Sapiens
actttgtacaaaaaagttggctctgagctctctttagttttaaaaggatgaaaagcttatgcaacatgctcagcaggagcttcatcaacgatatatgtcagatctaaaggtatattttcattctgtaattatgttacataaaagcaatgtaaatcagaataaatatgttagaccagaataaaattaattatattctggtcttcaaaggacacacagaacagatatcagcagaatcacttaatacttcatagaacaaaaatcactcaaaacctgtttataaccaaagaattcatgaaaaagaaagcctttgccatttgtcttagaaagttatttttttaaaaaaaatcatacttactattagtatctatggaagtatatgtaacaatttttatgtaaaggtcatctttctgtgatagtgaaaaaatatgtctttactaagttgaaatgaatactttctgcctttgctcatgatagttattctacaatctccacaagaaaaatataccttttatccggaaatattggtttaaggcaaataaataaaactgtgcttgctctaaagctctgcactacaaaagcaaattttccagtctttattccactcataaccactgctttccccaccaggctaaagtgcttcttagtcttaaatagggtttttaacttcataaggtacaccattgtttatgttttagggtgcaggtccatatagtcgtaatacttaaaacactgctacactgatgcttttgtggctcatggtttcctggttctttgatttaacacctggcttcctggtatctatggctggttaaatatctaaacctgcattattagtgctttacaataataattcccttgactgaagtccagaaatactaaagcacttcttttttattgctgtgaatgccttagacttatcttccaaaatagatacttcgtttctattgcatatataactgaaatattttataaactcactgtaatcaaatcttataaaatctgaatcaacatgaaaagttgtcaatgcttgaatgaatactaaatcataccacaagatactagataac

SEQ ID NO: 187185 - DNA, 1697 bp, Homo Sapiens
ttggctccatttttccaggagagagcgggataccaagagaaccggaccagctgctggcagggaaactgtcttccttttctccaagatgtacagaaccaaagtgggcttgaaggaccgccagcagctctacaagctgatcattagccagctgctatatgacggctacatcagcatcgccaatggcctcatcaatgaaatcaagcctcagtctgtgtgtgcaccctcggagcagctcctgcatctcatcaaactcggaatggaaaacgatgacaccgcagttcagtatgcaattggtcgttcagatactgttgcccctggcacagggattgacctggaatttgatgcagatgttcagactatgtccccagaggcttctgagtacgaaacatgctatgtcacatcacataaaggaccatgccgtgtagctacctatagtagagatggacagttaatagctactgggtctgctgatgcttcgataaagatacttgacacagagaggatgttggccaaaagtgccatgccaatagaggtcatgatgaatgagaccgcacaacaaaatatggaaaaccacccagtgattcgaactctttatgaccatgtggatgaagtcacgtgccttgctttccacccaacagaacagatcctggcttctggttcaagggattatactcttaaattatttgattattccaaaccatcagcaaaaagagccttcaaatacattcaggaagctgaaatgttacgttccatctcttttcatccttctggagactttatacttgtcggaactcagcatcctactcttcgcctttatgatatcaacacctttcaatgttttgtctcttgcaatcctcaagatcaacacaccgatgctatatgttccgttaattacaattctagtgccaatatgtacgtaactggaagcaaggacggctgcatcaaattatgggatggtgtttcaaatcgatgcatcacaacttttgagaaagcacatgacggtgctgaagtttgttctgccattttttccaaaaattctaaatacattctctcaagtggaaaagactctgtagctaaactttgggaaatatcaacgggacgaacactggtcagatacacgggcgcgggtttaagtggacgccaggtgcaccggacacaggctgtgtttaaccacaccgaggactatgtgttgctgcccgacgagaggacgatcagtctttgctgctgggactcgaggacagccgagcggagaaacctgctgtcgttggggcacaacaatattgtacgctgcatagtgcactcccccaccaaccccgggttcatgacgtgcagcgatgacttcagagcgcggttttggtaccggagatcgaccactgactgagccaccctctccgtagggttctttctcgaggactctaccctcctcccccacgtcctgtctcagctgcagtcgtaagtccgtgcaccatccttgacgttttgctgccacctctgtccacattcttcttggatttgtataaaagaatctttttttaccttgatgtagaatcatggtggaaaaagttggaaacacagatctgtgcagttctacattcactgattattacaagtgtgattttcatcggttttgtaagtacaggacttgcccgtttcttttgatctcttgattgaaggagatagggcattaaagtgctttt

SEQ ID NO: 187186 - DNA, 1667 bp, Homo Sapiens
  misc_feature (297)..(353): n is a, c, g, or t
accaaagcagggagatgggcccaggctggggagtgagaggaggtgtggggcagggctgctgctgccccgggcacgcaaagcaggagggaaggcgagcctagcgggctgcccagcacggcgcccaagcgctcactggtctagtggacagcccgggaaagggggccaaggacccgggagcccgagttggggccgccagggaagtgtggggggcgggagacaatgtcggccccgtggtcggtgcgggccctggcatttgcccggaacgtcagcctgtaggtctcaatctgcagtgacatnnnnnnnnnnnnnnnnnnnnnnnnnnnnnnnnnnnnnnnnnnnnnnnnnnnnnnnnngaagacgagaccagaatgtcatcattagatgcttgtctcctggatctggctgtccaaggtctgggcctccctttggtcaccaccccctgacagggtggggtggccattgaggccactggctgaagtgggggcgccagcttcaggcgctgcctcagagatggccggctcctccccagcagggggacccggacacagaggagcctcgctgccaccgccctcagtcttcacagcacctcctgcaggtaggtggcccacattatcgagggatcccaccttggcctgggccttctccttgaagttcaacttctgactttcaatcttgacatctcctccaccaggcttgtgcttgatgttagccttagacccacacttggaggagaccttagagatgtccactttcttgttctgaatctgaacattaccacctccagggacatgcttaatattgtccttggaaccacacttggactgaatatggctgtagctcacttttttggagactatctggactttccccgcaggttgtttctgtgcacttgcaattgggccggctgttttagtgactgcattagattcaggctttcgggttgtagcagctgcctctgtttttttctctactttggcccggcctcctccaggctgatgcttgatgttttccgtggagccaaccttggagcggacattcttcagatcaggagcagaagtattggtggccaggcggctgagccggggggtggtggagctgggtttggccgaggtgggcttcttgtctatgaaaggagttgtggagggccgggagggcatgggtgtggccttgactcggctgggaaccacccctgcagcgggggctgtcccactgagagtggtggttttcttcatggaactggtggaggtgctctttgggcgactcaagtcagctggtacagactttgcagtcatcttcttgacttctgcaggttttccctcagtcttaatggcagtgggcttcttgggcaggagcgtggaggggctcctactgcttgggccagttgaggcaacagcagcagctgttgtggtttttgcaacagtctgagtgctcttggacccagatctggaggctggggcagaagctggcttggatggtgaggcccgcttctcaggagcctttgcatctgcaatgggctttggcttcacgtcttttgaaggtaagatggaaggcctggcagaggcgacggcagggcgtttgggtggggcagctggcactaagcctgaagcaaggctcatgggttttttattcaacccaccaatggtgccaacttttttgtacaaagttgg

SEQ ID NO: 187187 - DNA, 1617 bp, Homo Sapiens
ctttgtacaaaaaagttggcttcaaaagacctgaagccaaagcccattgcagatgcaaaggctcctgagaagcgggcctcaccatccaagccagcttctgccccagcctccagatctgggtccaagagcactcagactgttgcaaaaaccacaacagctgctgctgttgcctcaactggcccaagcagtaggagcccctccacgctcctgcccaagaagcccactgccattaagactgagggaaaacctgcagaagtcaagaagatgactgcaaagtctgtaccagctgacttgagtcgcccaaagagcacctccaccagttccatgaagaaaaccaccactctcagtgggacagcccccgctgcaggggtggttcccagccgagtcaaggccacacccatgccctcccggccctccacaactcctttcatagacaagaagcccacctcggccaaacccagctccaccaccccccggctcagccgcctggccaccaatacttctgctcctgatctgaagaatgtccgctccaaggttggctccacggaaaacatcaagcatcagcctggaggaggccgggccaaagtagagaaaaaaacagaggcagctgctacaacccgaaagcctgaatctaatgcagtcactaaaacagccggcccaattgcaagtgcacagaaacaacctgcggggaaagtccagatagtctccaaaaaagtgagctacagccatattcagtccaagtgtggttccaaggacaatattaagcatgtccctggaggtggtaatgttcagattcagaacaagaaagtggacatctctaaggtctcctccaagtgtgggtctaaggctaacatcaagcacaagcctggtggaggagatgtcaagattgaaagtcagaagttgaacttcaaggagaaggcccaggccaaggtgggatccctcgataatgtgggccacctacctgcaggaggtgctgtgaagactgagggcggtggcagcgaggctcctctgtgtccgggtccccctgctggggaggagccggccatctctgaggcagcgcctgaagctggcgcccccacttcagccagtggcctcaatggccaccccaccctgtcagggggtggtgaccaaagggaggcccagaccttggacagccagatccaggagacaagcatctaatgatgacattctggtctcgtcttccgtctcccccgtgttcccctcttgtctcccctgttcccctctcccttccctcctcccatgtcactgcagattgagacctacaggctgacgttccgggcaaatgccagggcccgcaccgaccacggggccgacattgtctcccgccccccacacttccctggcggccccaactcgggctcccgggtccttggccccctttcccgggctgtccactagaccagtgagcgcttgggcgccgtgctgggcagcccgctaggctcgccttccctcctgctttgcgtgcccggggcagcagcagccctgccccacacctcctctcactccccagcctgggcccatctccctgctttggtcttgccccatcactgcgccactgctccgtggaggaggttgggagggggttggggtggttga

SEQ ID NO: 187188 - DNA, 2443 bp, Homo Sapiens
  misc_feature (138)..(170): n is a, c, g, or t
  misc_feature (2013)..(2025): n is a, c, g, or t
  misc_feature (2187)..(2217): n is a, c, g, or t
ttggagatattatcctacttaagggtgatgttgaagaagacgaaacgattcctgatagtgaacaggatatacggccacgttttcaccgatcgaggacggtggctcagcagcatgatgaagatggaattgaagaggaannnnnnnnnnnnnnnnnnnnnnnnnnnnnnnnnacaatttctgactggaatctaagaaaatgttctgctgctgccctggatgttcttgcaaatgtgtatcgtgatgaactgctgccacatattttgccccttttgaaagaattactttttcatcatgaatgggttgttaaagaatcaggcattttggttttaggagcaattgctgaaggttgcatgcagggcatgattccatacttgcctgagcttattcctcaccttattcagtgcctctctgataaaaaggctcttgtgcgttccataacatgctggactcttagccgctatgcacactgggtggtcagccagccgccagacacgtacctgaagccattaatgacagaattgctaaagcgcatcctggacagcaacaagagagtacaagaagctgcctgcagtgcctttgctaccctagaagaggaggcttgtacagaacttgttccttaccttgcttatatacttgataccctggtctttgcatttagtaaataccagcataagaacctgctcattctttacgatgccataagaacattagcagattcagtaggacatcatttaaacaaaccagaatatattcagatgctaatgcctccactgatccagaaatggaacatgttaaaggatgaagataaagatctcttccctttacttgagtgcctatcttcagttgccacagcactgcagtctggattccttccgtactgtgaacctgtgtatcagcgttgtgtaaacctagtacagaagactcttgcacaagccatgctaaacaatgctcaaccagatcaatatgaagctccagataaagattttatgatagtggctcttgatttactgagtggcctggctgaaggacttggaggcaacattgaacagctggtagcccgaagtaacatcctgacactaatgtatcagtgcatgcaggataaaatgccagaagttcgacagagttcttttgccctgttaggtgacctcacaaaagcttgctttcagcatgttaagccttgtatagctgatttcatgccaatattgggaaccaacctaaatccagaattcatttcagtctgcaacaatgccacatgggcaattggagaaatctccattcaaatgggtatagagatgcagccttatattcctatggtgttgcaccagcttgtagaaatcattaacagacccaacacaccaaagacgttgttagagaatacagcaataacaattggtcgtcttggttacgtttgtcctcaagaggtggcccccatgctacagcagtttataagaccctggtgcacctctctgagaaacataagagacaatgaggaaaaggattcagcattccgtggaatttgtaccatgatcagtgtgaatcccagtggcgtaatccaagattttatatttttttgtgatgccgttgcatcatggattaacccaaaagatgatctcagagacatgttctgtaagatccttcatggatttaaaaatcaagttggcgatgaaaattggaggcgtttctctgaccagtttcctcttcccttaaaagagcgtcttgcagctttttatggtgtttaatctaatacacttaagctgcagtcccaaaattaggggtccttcagtcttggagactataagggagcctctgcacccagggaaaatgttaccctttacaggggggaagggtaaaccagtagggaatacagtacaatcccaaccctactgggaggggcgggagggaggtgttgccgtcactgtattaagtcgatgttgggaaacgttttaacatctggagcctttgtgggtggaaatatgtctccagttacaactccgcagtggatgtgaagaagcnnnnnnnnnnnnntctattcagtctactcacaaaacagtacattgtggaatattatggggaattgtaccaaaacaagaaccatataaatgatgcctagggacaagaaagaggaacaattctatagcgcacaataaaggaaacctaagaatgggagttacaaatagtaaagaagcnnnnnnnnnnnnnnnnnnnnnnnnnnnnnnnatgtaagttttcccacatgatgggggccttgttttgcatgttgatgaagaactacacaaagaaaactaatatagttaaaagtcagcttgcccttcccgtagtagaagcaggttcttggaagttacaatttaaggtaccccaaaaaagttggaaataaaacaaaacaaacataaacaatgaagcaccctgtgaaaatgccaaatgagtcactccttttacctttttt

SEQ ID NO: 187189 - DNA, 961 bp, Homo Sapiens
ttggcgaaaaccttccccgcttctggatatgaaattcgagctgcttgctgagtcctattgccggctgctgggagccaggagagccctgaggagtagtcactcagtagcagctgacgcgtgggtccaccatgaactggagtatctttgagggactcctgagtggggtcaacaagtactccacagcctttgggcgcatctggctgtctctggtcttcatcttccgcgtgctggtgtacctggtgacggccgagcgtgtgtggagtgatgaccacaaggacttcgactgcaatactcgccagcccggctgctccaacgtctgctttgatgagttcttccctgtgtcccatgtgcgcctctgggccctgcagcttatcctggtgacatgcccctcactgctcgtggtcatgcacgtggcctaccgggaggttcaggagaagaggcaccgagaagcccatggggagaacagtgggcgcctctacctgaaccccggcaagaagcggggtgggctctggtggacatatgtctgcagcctagtgttcaaggcgagcgtggacatcgcctttctctatgtgttccactcattctaccccaaatatatcctccctcctgtggtcaagtgccacgcagatccatgtcccaatatagtggactgcttcatctccaagccctcagagaagaacattttcaccctcttcatggtggccacagctgccatctgcatcctgctcaacctcgtggagctcatctacctggtgagcaagagatgccacgagtgcctggcagcaaggaaagctcaagccatgtgcacaggtcatcacccccacggtaacacctcttcctgcaaacaagacgacctcctttcgggtgacctcatctttctgggctcagacagtcatcctcctctcttaccagaccgcccccgagaccatgtgaagaaaaccatcttgtgaggggctgcctg

SEQ ID NO: 187190 - DNA, 1754 bp, Homo Sapiens
  misc_feature (1269)..(1281): n is a, c, g, or t
  misc_feature (1294)..(1356): n is a, c, g, or t
  misc_feature (1421)..(1491): n is a, c, g, or t
tgagcaccgggcctagcaccagcctagacagaatgattttaatctctgtgaataacacactccctctgctattcagggcattaattagacattgttaggaaaatgaaagtgaaagagtagtatgagcaagcagtatagtgaagagttcaggccctggagtcatacatggattcaaatctctgccctgctccatactacctgatctgggcacttgccagaatatgcttttaaggctattaaccagggtggccttacatcagtagctgtcagagggaaagactgtgcagtaattgtcacacagaagaaagtacctgacaaattattggattccagcacagtgactcacttattcaagataactgaaaacattggttgtgtgatgaccggaatgacagctgacagcagatcccaggtacagagggcacgctatgaggcagctaactggaaatacaagtatggctatgagattcctgtggacatgctgtgtaaaagaattgccgatatttctcaggtctacacacagaatgctgaaatgaggcctcttggttgttgtatgattttaattggtatagatgaagagcaaggccctcaggtatataagtgtgatcctgcaggttactactgtgggtttaaagccactgcagcgggagttaaacaaactgagtcaaccagcttccttgaaaaaaaagtgaagaagaaatttgattggacatttgaacagacagtggaaactgcaattacatgcctgtctactgttctatcaattgatttcaaaccttcagaaatagaagttggagtagtgacagttgaaaatcctaaattcaggattcttacagaagcagagattgatgctcaccttgttgctctagcagagagagactaaacattgtcgttagtttaccagatccgtgatgccacttacctgtgtgtttggtaacaacaaaccaacatcatggaggtccctggattgaaaaaggagcctctcccactcctcctaccaccgaagtggttaggactctatataaataaaaacaaggcttttggaaaataattgcatcctgttgttttcacctcctattttaaaatttatttttgacacctaatgtacatatttatggggtgcaatgtgatgtttcgatacatgtatacattataatgatcaaattagggtgattagcatatccatcacctgaaacacggtgtttttgtggtgagaacatttaaaatcctctcctctagctattttgaggtacacaataccttattagnnnnnnnnnnnnnaaaacaagatctnnnnnnnnnnnnnnnnnnnnnnnnnnnnnnnnnnnnnnnnnnnnnnnnnnnnnnnnnnnnnnnttgttaagtaatcctctcacctcagcctccttagtagctggtactacaggtgtacaccattgtannnnnnnnnnnnnnnnnnnnnnnnnnnnnnnnnnnnnnnnnnnnnnnnnnnnnnnnnnnnnnnnnnnnnnnggctagcattaagcgatccttctgcctcggtctcccaacatgctggggttacaggcatgagccacagtgcctgggtccacagtaccttactgttgactgtagtcactctgctgtgcaataggataccaaatcttactccttttttctcttttttgagacgggtacttgatctcacccaggctggagtgcattggcgggcgtgttcataactcactgcagccttaaatacatggggttaagcggtcctcccaccttggcccccc

SEQ ID NO: 187191 - DNA, 2139 bp, Homo Sapiens
  misc_feature (1255)..(1283): n is a, c, g, or t
  misc_feature (1392)..(1400): n is a, c, g, or t
  misc_feature (1762)..(1773): n is a, c, g, or t
  misc_feature (2056)..(2066): n is a, c, g, or t
tacaaaaaagttggacaattcctactaatagtcactgagtctgtatcccaggtgtctgacctcctaacacaagagcaagcaaacctaactcaccagaaaaagaaactggagggacagatctcagcccggcaacaagcagaagaagcttcacaggagtcagaaaacgaactcaaggaaatgatagaaacccttgctcggaagctgaatgagaaatccaaagagcaaatggaacttcaccaccagaatctgaatctccaagaaacactgaagagagtagcaaattgttcagctccttgtccgcaagactggatctggcatggagaaaactgttacctattttcctcgggctcatttaactgggaaaagagccaagagaagtgcttgtctttggatgccaagttgctgaaaattaatagcacagctgatctggacttcatccagcaagcaatttcctattccagttttccattctggatggggctgtctcggaggaaccccagctacccatggctctgggaggacggttctcctttgatgccccacttatttagagtccgaggcgctgtctcccagacatacccttcaggtacctgtgcatatatacaacgaggagctgtttatgcggaaaactgcattttagctgccttcagtatatgtcagaagaaggcaaacctaagagcacagtgaatttgaaggctctggaagaaaagaaaaaagtctttgagttttattctggaatttaagctattctttgtcacttgggtgccaaacatgagagcccagaaaactgtcatttagctggctgcagaactcctttgcagaaactggggttccaggtgcctggcacctttatgtcaacatttttgattctagctacctgtattatttcacctagcttgtcccaagcttccctgccagcctgaagtccattttcccctttttattttaaaatttgactcctcttcaagcttgaaaaccctctgaactcagtcttctttacctcattatcaccttcccctcacactcctaaaattgcatgaaagacagaacatggagaacttgctcaagtgcaggcagagagcaaaaaggggaaatatgtctgggaaaaagtgcacgtgaagaaacaaagaaggacagaggccattccgaaatcaagaaactcatgttcttaactttaaaaaaggtatcaatccttggtttttaaactgtggtccatctccagactctaccacttacggacagacagacagacagnnnnnnnnnnnnnnnnnnnnnnnnnnnnnttttgggacaagtggggagcccaagaaagtaattagtaagtgagtggtcttttctgtaagctaatccacaacctgttaccacttcctgaatcagttattatttcttcannnnnnnnnctaccagaggacagattaatagatttaacccttcacaacagttcttgttagaatcatgggatgtgtggcccagaggtaagaatagaatttctttccctaaagaacataccttttgtagatgaactcttctcaactctgttttgctatgctataattccgaaacatacaagacaaaaaaaatgaagacactcaatctagaacaaactaagccaggtatgcaaatatcgctgaatagaaacagatggaattagaaatatatcttctatttttaggcttctatttcctttccacccactcttcacaggctattctactttaaaggaagcctttttattttgctgcacacaatctagcaggaatcnnnnnnnnnnnnaagagctgtgtcatccttatgtaggcaagagatgtttgcttttgttaaaagctttattgagatataattaacataaaataaactgaacatatttaaagtgtactatttgataagttttcacaccttgtggagaacatgcatactacaattaagagagtgaacatatccatcatccctcaaagtgtcacaatgctcctcctgatgactcctccccagaaaaccaccaatcagctttcattttgcattttgtagttttatgtgaatggaatcatatagtatgtcnnnnnnnnnnngtctggcttctttcactttgcataattattttgagattcatatgtctccatcttgatgctcgtatgaattcat

SEQ ID NO: 187192 - DNA, 1940 bp, Homo Sapiens
  misc_feature (61)..(70): n is a, c, g, or t
  misc_feature (1623)..(1658): n is a, c, g, or t
gccagccaagctttaaattatgtgaccataatgtactgatttcagtaagtctcataggttnnnnnnnnnngtcaccaaatagtgtgaaatatattacttaactgtccgtaagcagtatattagtattatcttgttcaggaaaaggttgaataatatatgccttgtataatattgaaaattgaaaagtacaactaacgcaaccaagtgtgctaaaaatgagcttgattaaatcaaccacctatttttgacatggaaatgaagcagggtttcttttcttcactcaaattttggcgaatctcaaaattagatcctaagatgtgttcttatttttataacatctttattgaaattctatttataatacagaatcttgttttgaaaataacctaattaatatattaaaattccaaattcatggcatgcttaaattttaactaaattttaaagccattctgattattgagttccagttgaagttagtggaaatctgaacattctcctgtggaaggcagagaaatctaagctgtgtctgcccaatgaataatggaaaatgccatgaattacctggatgttctttttacgaggtgacaagagttggggacagaactcccattacaactgaccaagtttctcttctagatgattttttgaaagttaacattaatgcctgctttttggaaagtcagaatcagaagatagtcttggaagctgtttggaaaagacagtggagatgaggtcagttgtgttttttaagatggcaattactttggtagctgggaaagcataaagctcaaatgaaatgtatgcattcacatttagaaaagtgaattgaagtttcaagttttaaagttcattgcaattaaacttccaaagaaagttctacagtgtcctaagtgctaagtgcttattacattttattaagctttttggaatctttgtaccaaaattttaaaaaagggagtttttgatagttgtgtgtatgtgtgtgtggggtggggggatggtaagagaaaagagagaaacactgaaaagaaggaaagatggttaaacattttcccactcattctgaattaattaatttggagcacaaaattcaaagcatggacatttagaagaaagatgtttggcgtagcagagttaaatctcaaataggctattaaaaaagtctacaacatagcagatctgttttgtggtttggaatattaaaaaacttcatgtaattttattttaaaatttcatagctgtacttcttgaatataaaaaatcatgccagtatttttaaaggcattagagtcaactacacaaagcaggcttgcccagtacatttaaattttttggcacttgccattccaaaatattatgccccaccaaggctgagacagtgaatttgggctgctgtagcctatttttttagattgagaaatgtgtagctgcaaaaataatcatgaaccaatctggatgcctcattatgtcaaccaggtccagatgtgctataatctgtttttacgtatgtaggcccagtcgtcatcagatgcttgcggcaaaaggaaagctgtgtttatatggaagaaagtaaggtgcttggagtttacctggcttttttaatatgcttataacctagtnnnnnnnnnnnnnnnnnnnnnnnnnnnnnnnnnnnntaactgaatttggaggctggagtaatcagattactgctttaatcagaaaccctcattgtgtttctaccggagagagaatgtatttgctgacaaccattaaagtcagaagttttactccaggttattgcaataaagtataatgtttattaaatgcttcatttgtatgtcaaagctttgactctataagcaaattgcttttttccaaaacaaaaagatgtctcagtttgttttgtgaattttctaaaagctttcatgtcccagaacttagcctttacctgtgaa

SEQ ID NO: 187193 - DNA, 824 bp, Homo Sapiens
gtacaaaaaagttgggtttccctgatcccctctcccaaattttccggcaggggattgatcgaggcgacatttaggactggggtgggcgagggagtggcggttctcgtcccaagttacaggtgaggacgttcaggccaaggcgtagccaagatcgcgccgccctgtagcttgaggaggcgccgggattcgaaccaaggctgtgcccaatcctaagccctgcgaggtcttgtggaaccgacatgacccactctttggtttgtccagagacagtgagcagggtgagttcagtgctgaatcgcaacactcggcagtttggaaaaaaacatcttttcgaccaggatgaggagacatgttggaactcagaccaggttcacagggcactcaggctctccacaagattgtagatttctaccctgaggacaacaactcgcttcagtttccccataccagctgctgaagtggaccggctgaaggtgacgtttgaggatgccactgacttttttggccgtgtggtcatctaccacctgcgggtgcttggggagaaggggtgagacctctaggggctgtctcctccaggaagccctccgggaagcacagcaaagtccctcattctgcacagaaggtttattggttcctcttgggaagggtcccctcccaccacctgtccagaagctgcctttgaagtcagttctgggtttccccagctctggctgaccattttgttccctgagtgtctgagtccccggcaggcggccttcactcaaggtcagcgggcaccaggttgctctggaagagcttgaggatgtggttctcgatcacctgtt

SEQ ID NO: 187194 - DNA, 901 bp, Homo Sapiens
ttggctcgcgaggggggagctcttctagtagtgctcggcgtcagacatggcggaggcgatggatttgggcaaagaccccaacgggcccacccattcctcgactctgttcgtgagggacgacggcagctccatgtccttctacgtgcggcccagcccggccaagcgtcggctgtcgacgctcatcctgcacggcggcggcaccgtgtgccgagtgcaggagcccggggccgtgctgctggcccagcccggggaggcgctggccgaggcctcgggtgatttcatctccacgcagtacatcctggactgcgtggagcgcaacgagaggctggagctggaggcctatcggctgggccccgcctcggcggcggacaccggctcggaagcaaagcccggggccctggccgagggcgccgcggagccggagccgcagcggcacgccgggcggatcgccttcacggatgcggacgacgtagccatccttacctacgtgaaggaaaatgcccgctcgcccagctccgtcaccggtaacgccttgtggaaagcgatggagaagagctcgctcacgcagcactcgtggcagtccctgaaggaccgctacctcaagcacctgcggggccaggagcataagtacctgctgggggacgcgccggtgagcccctcctcccagaagctcaagcggaaggcggaggaggacccggaggccgcggatagcggggaaccacagaataagagaactccagatttgcctgaagaagagtatgtgaaggaagaaatccaggagaatgaagaagcagtcaaaaagatgcttgtggaagccacccgggagtttgaggaggttgtggtggatgagagccctcctgattttgaaatacatataactatgtgtgatgatgatccaccc

SEQ ID NO: 187195 - DNA, 1903 bp, Homo Sapiens
ttgggaggagaacatccgcgtggttcgttgtggcggcagcgagttgaactttaggagagctgtgttctctgcagattctaagtatatcttctgtgtctctggagactttgttaaagtttacagcacagttacagaagagtgtgtacacatactgcatggacacagaaatctggtgactggaatccagcttaaccccaacaaccatctacagctgtattcttgttcccttgatggcacaattaaactgtgggactatatagatggcatcttaataaagactttcatagttggatgtaaacttcatgccctctttactcttgcccaagctgaggattctgtctttgttatagtgaataaagaaaaaccagatatatttcagctggtttcagtgaaactgccaaaatcctcaagccaggaagtagaagccaaggagctgtcctttgttttggattacataaaccagtcacccaagtgcattgcctttggaaacgagggagtatatgttgctgcagtacgggaattttacttgtctgtttattttttcaaaaagaaaacaacatcaaggtttactttatcatcatcaagaaataagaagcatgctaaaaacaattttacgtgtgtagcatgtcacccaacggaagactgcatcgcatctggtcacatggatggcaaaattcgtctttggaggaatttttatgatgataagaaatatacgtacacatgtttacattggcaccatgatatggttatggatttggctttttcagtgacaggcaccagtctgctgagtggcggtcgtgaatctgtacttgtagagtggcgcgatgcaacagagaagaataaggagtttctcccgcgtttaggagctactattgaacatatctcagtctcgcctgcaggagatttattctgcacttctcactctgataataagataataattattcaccgaaaccttgaagcatccgcagtaattcaaggcctagtgaaagataggagtatcttcactggtttgatgattgatccaagaactaaagctttggttttgaatggaaaacctggccacctgcagttttattctctccagagtgataaacagttatacaatttagatattatacagcaagaatatattaatgattatggtctgatccaaattgaactaacaaaggctgcatttggctgctttggtaactggcttgcaacagtggaacagcggcaagaaaaggaaactgagcttgaattgcaaatgaaactgtggatgtataataagaaaacacaagggtttattcttaacactaaaattaacatgccacacgaagactgcattacagctctctgtttctgtaatgcagaaaaatctgaacagcccaccttggttacagctagcaaagatggttacttcaaagtatggatattaacagatgactctgacatatacaaaaaagctgttggctggacctgtgactttgttggtagttatcacaagtatcaagcaactaactgttgtttctccgaagatggttctttactagcagttagttttgaggaaatagtcacaatatgggattctgtaacatgggaacttaaatgtacattttgccaacgagctgggaaaataaggcacctttgctttgggagattgacgtgttcaaagtatctacttggtgctactgaaaatggcattctttgctgttggaatctgctgagctgtgcattggagtggaatgcaaaattaaatgttagagttatggaacccgatcctaattcagagaatattgctgcaatctctcagtcttcagtgggttcagacttgtttgtatttaaacctagtgagccaaggccattgtatattcaaaagggtatctccagagagaaagtccagtgggggagtgtttgttcc

SEQ ID NO: 187196 - DNA, 2658 bp, Homo Sapiens
ttggatagctaagacgtcgcgcttgcgcaggcgctcggcgcagaggcctgcgggaagccaagatggcgcataggggttctccaggctgcagttggcgccttatcagtatctaagcggagtgttttggaaggagttaaggggctgtggcaaacgccctctccgccgtcatggcccggcatcggaatgttcgaggctataactacgatgaagattttgaagatgatgatctctacggccagtctgtagaggatgattattgtatttcgccgtcaacagctgctcagtttatttattcacggcgtgacaaaccttccgttgagcctgtggaagaatatgattatgaagatctgaaagaatcttccaattctgtttcaaaccatcagctcagtggatttgatcaagctcgtctttattcatgccttgatcacatgagagaggtacttggagatgctgtgccagatgaaatattaattgaagcagttctgaagaacaagtttgatgtgcagaaggctttgtcaggggttctggaacaagatagagtgcagagtttgaaggacaagaatgaggcaacagtatctacaggaaagatagcaaaaggaaaaccagtagattcccagacatcgcgaagtgaatctgaaattgtgccaaaagttgctaaaatgactgtatctggaaagaagcaaactatgggatttgaagtgcctggagtatcttctgaagaaaatggtcatagtttccacacacctcaaaaaggaccgcccattgaagatgccattgcttcttccgatgttcttgagactgcttctaaatctgctaatccaccccacacgattcaagcatcagaagagcagagttcaaccccagcaccggtgaaaaagtctggcaagctgaggcagcaaatagatgtgaaggcggaactggagaagcggcaaggagggaagcagctactcaacttagtggtcattggtcatgttgatgctgggaaaagtactctgatgggccatatgctttatcttctgggtaatataaacaaaagaactatgcataagtatgaacaggagtctaaaaaggctggcaaagcttcgtttgcatatgcatgggtcttggatgaaactggcgaagaaagggaaaggggagtaaccatggatgttggtatgacaaagtttgaaaccacaaccaaagttattacattaatggatgctccaggccataaggacttcattccaaatatgattacaggagcagcccaggcggatgtagctgttttagttgtagatgccagcaggggagagtttgaagctggatttgagactggaggacaaacacgagagcatggactcttggtccgttctctgggagtgacgcagcttgcagttgcagttaataaaatggatcaggttaattggcaacaagaaaggtttcaagagattactggaaaacttgggcactttcttaagcaagcaggttttaaggagagtgatgtaggttttattcctacaagtggtctcagtggtgaaaatctaatcacaagatctcagtcaagtgaactcacaaaatggtataaaggactatgtttattagaacaaattgattcctttaagcctccccagcgatctattgacaaaccttttagattatgtgtgtccgatgttttcaaagatcaaggatctggattttgcataactggtaaaatagaagctggttatatccaaactggtgaccgactactggcaatgcctcctaatgaaacttgtaccgtgaaaggaatcactctgcatgatgaacctgtcgactgggcggcagcaggcgatcatgttagtcttactttggttgggatggatatcatcaaaatcaatgttggctgcatattttgtggccccaaagtacccattaaagcttgcactcgtttcagagcccgaatcctcatctttaatattgaaattcctatcactaaaggatttcctgtgctgttacactaccaaactgtcagtgaacccgccgttattaaacgattgattagtgtcttaaacaaaagcacgggtgaagtcacaaagaaaaagcctaagtttttgactaaaggccagaatgcattggtagagctacagacacaaagaccaatagctcttgagctatataaagactttaaagagctggggaggttcatgctacgttacggtggttctacaatagctgctggtgttgtcactgagataaaagaatgatgggtcagaatttctaccacgtttctggatacagtgaaatagctaacctctgtttcaagaatgcagttattaagtcaaaggaacaatgtgcaattgatatgtttttagatgagagagaaaaattaaagctaaaattagctgcaaagaagtattaataatcacctctgcaaaaattctaagttgccagctggcaaagaaagtctaatgttaaaaacaactttgcctttgaaacgttaataaatggatttactttgctaagatttatggcaagtgtcaaaaatagtatctgaagatactgaatcatcatgaaatgaactctacttctggccaaagcacaatgtatttgcagttttctcttttgattcaattatactgcacatgttttaaggaaaagtaacttaattgggtttttcagcagttgatatttgacctaagc

SEQ ID NO: 187197 - DNA, 1567 bp, Homo Sapiens
aaatcttgaccaacagaaaccttttatttttatttctgactcttattttttaaaaaatttgcgcctcggtatctggcttccctggaagctctccgagctctggtgctttagttaggtcatttttttagaaatgtgaagaggtctgattggctgcttaaactggaaagggactgtgattggctggttaatgggaaacggtttttttctttggctgcaggtgttctgctgatatcaacagcttccctattttgaatgcagaaaacagggtctgggacattagtcgttatatttgacttgaaaagaaagaaaccaagtgcgctttgcaatatttattacacaaagaacttgctgctgccttcacatttggggtttgtgtttgattggctttcgatgcgtgtgtttggtttcccattggttcacctgtgactcctgttgccatggattcacccccctctgctgccggctctgggcctgagggtccacctggagagtacatttgctttaatgagtgcacctgcctccaccagcaaggggaccccgagaaccctgagcagggtccacagctggaaagttgggcccctgaggagctttgtgtcgtcttgaacgagcagcccagggcctagaggtaaccgttaggcgggatttatgtgcactgcctgcatgagctggcaaccagccagcgtcccttggtgagaaagggattgctgaggcaccgtccaggccccaccggccaggccgcgcccagcagaggcgtactacccagctctgtcctcttggccatccttctgtgtaccacttcctgaggcctcattttgggggtcatcttggaaaggggaggagcttctcccagtgtgagaccccaaagactctggaggtcatctggcggaggtctctgggagcccagaacccacataaagccccagcttggctcacaaggcccaggagacctccagctaaacaccaacccctgacctaccccagccaggctcctacctgtctgctgccagcacagtaggtcccggccagctctggagttctctcatcggaggcccatgccctccactccactgcctttggaagggtctctctccaggtcagcctggaagggacagtatcgtttgtttatgaaatgccactgggacagctggctgggccttcaccaagcaagtcccttcagactggcccttaagccaaactcaggcccagaattgcagttcagaatggcagtcctggaggcagggggtgaggggcaggtctagtgttcctgcaccaaacctaagtccttccacctgccacccccttccctgggagggaggtggtcctcctatctccctggctcactggcaggtgtgggatctggggagagcggctggagaaagatgcagtcctcaggaagggggccgccaccctcccctatgctggtagatgctgaggcccctaggtgcccagggccagtgggaccctctcagaaccaaatctttcccctttctcggggcttgggactcgggccgtataggctcctgagtgtcatgaagtgcacaggaaccaaatgaccgagcccctggaa

SEQ ID NO: 187198 - DNA, 804 bp, Homo Sapiens
aacttatctggcctactttgtggtgactgacacaatattgataaaactgccttcttgaccttccccttgctctccaaaagaagtggtttaaacaattaacaaattttacaagagcttctgccagggctcaggcaccacaatgcagggtcactaccttaggtaacatctgctccccagagtctttaggcattaagtggctcagtgagggcttcagccctagtggtattttcaggttttctcagctgggactcctgtcgtttttcatacagcatagtgataaagtcaagtaggaacataaaacttgctataaatccaaacacaattgcagcaatctcagctgaagtcctgtcatgtgtggaaacaaaaatgatggatgccaacaaaaacacacatcctgttcccaaagtaatataaaaatccgatgattttacttttgtggtatcaactctctcataaaatggagtgcaatacacaatcagtataaggagactcagaagaaaggcactgcagcttacaaactcaaaaaaataaagtcctccacataaagtacattgtgatacaacttcttcacagatgaaggccagcagagacagcaacagctgcaagcccttgagaacgcgccggagcaatgggagccggcccatgaaaaagtaggcagcgaggccgctccgggggcctctggcggggcccgggtcctcctccgtagtggggctgtacaccgctccgttctccatcgcctcgggccggggagcgcggcggccgcagcaaccgcgccgttgacttctcggactccagaagtcccaa

SEQ ID NO: 187199 - DNA, 913 bp, Homo Sapiens
  misc_feature (839)..(847): n is a, c, g, or t
agcaatgctttttcatttatagccaactttgtacaaaaaagttgggaagtcaacggcgcggttgctgcggccgccgcgctccccggcccgaggcgatggagaacggagcggtgtacagccccactacggaggaggacccgggccccgccagaggcccccggagcggcctcgctgcctactttttcatgggccggctcccattgctccggcgcgttctcaagggcttgcagctgttgctgtctctgctggccttcatctgtgaagaagttgtatcacaatgtactttatgtggaggactttatttttttgagtttgtaagctgcagtgcctttcttctgagtctccttatactgattgtgtattgcactccattttatgagagagttgataccacaaaagtaaaatcatcggatttttatattactttgggaacaggatgtgtgtttttgttggcatccatcatttttgtttccacacatgacaggacttcagctgagattgctgcaattgtgtttggatttatagcaagttttatgttcctacttgactttatcactatgctgtatgaaaaacgacaggagtcccagctgagaaaacctgaaaataccactagggctgaagccctcactgagccacttaatgcctaaagactctggggagcagatgttacctaaggtagtgaccctgcattgtggtgcctgagccctggcagaagctcttgtaaaatttgttaattgtttaaaccacttcttttggagagcaaggggaaggtcaagaaggcagttttatcaatattgtgtcagtcaccacaaagtaaggccagataagttaaaaaaaannnnnnnnnaaataataattgaaacttatctcaaatggaggattttggtgggaaggaggaaaaaacaattgtttt

SEQ ID NO: 187200 - DNA, 832 bp, Homo Sapiens
  misc_feature (73)..(90): n is a, c, g, or t
ttgggttggacttttcgttaacattgaccaagaactgcatggacctaacattcgatctcattcagtattaaannnnnnnnnnnnnnnnnnttacaaactgcaatagagactgtagattgcttctgtagtactccttaagaacacaaagcggggggagggttggggaggggcggcaggagggaggtttgtgagagcgaggctgagcctacagatgaactctttctggcctgccttcgttaactgtgtatgtacatatatatattttttaatttgatgaaagctgattactgtcaataaacagcttcatgcctttgtaagttatttcttgtttgtttgtttgggtatcctgcccagtgttgtttgtaaataagagatttggagcactctgagtttaccatttgtaataaagtatataatttttttatgttttgtttctgaaaattccagaaaggatatttaagaaaatacaataaactattggaaagtactcccctaacctcttttctgcatcatctgtagatactagctatctaggtggagttgaaagagttaagaatgtcgattaaaatcactctcagtgcttcttactattaagcagtaaaaactgttctctattagactttagaaataaatgtacctgatgtacctgatgctatggtcaggttatactcctcctcccccagctatctatatggaattgcttaccaaaggatagtgcgatgtttcagaggctggagaaggggggttgcagtggagagggacagcccactgagaagtcaaacatttcaaagtttggattgtatcaagtggcatgtgctgtgaccatttataa

SEQ ID NO: 187201 - DNA, 2646 bp, Homo Sapiens
  misc_feature (2326)..(2343): n is a, c, g, or t
ttggggataagggctcagagttgcactgagtgtggctgaagcagcgaggcgggagtggaggtgcgcggagtcaggcagacagacagacacagccagccagccaggtcggcagtatagtccgaactgcaaatcttattttcttttcaccttctctctaactgcccagagctagcgcctgtggctcccgggctggtgtttcgggagtgtccagagagcctggtctccagccgcccccgggaggagagccctgctgcccaggcgctgttgacagcggcggaaagcagcggtacccacgcgcccgccgggggaagtcggcgagcggctgcagcagcaaagaactttcccggctgggaggaccggagacaagtggcagagtcccggagcgaacttttgcaagcctttcctgcgtcttaggcttctccacggcggtaaagaccagaaggcggcggagagccacgcaagagaagaaggacgtgcgctcagcttcgctcgcaccggttgttgaacttgggcgagcgcgagccgcggctgccgggcgccccctccccctagcagcggaggaggggacaagtcgtcggagtccgggcggccaagacccgccgccggccggccactgcagggtccgcactgatccgctccgcggggagagccgctgctctgggaagtgagttcgcctgcggactccgaggaaccgctgcgcccgaagagcgctcagtgagtgaccgcgacttttcaaagccgggtagcgcgcgcgagtcgacaagtaagagtgcgggaggcatcttaattaaccctgcgctccctggagcgagctggtgaggagggcgcagcggggacgacagccagcgggtgcgtgcgctcttagagaaactttccctgtcaaaggctccggggggcgcgggtgtcccccgcttgccagagccctgttgcggccccgaaacttgtgcgcgcagcccaaactaacctcacgtgaagtgacggactgttctatgactgcaaagatggaaacgaccttctatgacgatgccctcaacgcctcgttcctcccgtccgagagcggaccttatggctacagtaaccccaagatcctgaaacagagcatgaccctgaacctggccgacccagtggggagcctgaagccgcacctccgcgccaagaactcggacctcctcacctcgcccgacgtggggctgctcaagctggcgtcgcccgagctggagcgcctgataatccagtccagcaacgggcacatcaccaccacgccgacccccacccagttcctgtgccccaagaacgtgacagatgagcaggagggcttcgccgagggcttcgtgcgcgccctggccgaactgcacagccagaacacgctgcccagcgtcacgtcggcggcgcagccggtcaacggggcaggcatggtggctcccgcggtagcctcggtggcagggggcagcggcagcggcggcttcagcgccagcctgcacagcgagccgccggtctacgcaaacctcagcaacttcaacccaggcgcgctgagcagcggcggcggggcgccctcctacggcgcggccggcctggcctttcccgcgcaaccccagcagcagcagcagccgccgcaccacctgccccagcagatgcccgtgcagcacccgcggctgcaggccctgaaggaggagcctcagacagtgcccgagatgcccggcgagacaccgcccctgtcccccatcgacatggagtcccaggagcggatcaaggcggagaggaagcgcatgaggaaccgcatcgctgcctccaagtgccgaaaaaggaagctggagagaatcgcccggctggaggaaaaagtgaaaaccttgaaagctcagaactcggagctggcgtccacggccaacatgctcagggaacaggtggcacagcttaaacagaaagtcatgaaccacgttaacagtgggtgccaactcatgctaacgcagcagttgcaaacattttgaagagagaccgtcgggggctgaggggcaacgaagaaaaaaaataacacagagagacagacttgagaacttgacaagttgcgacggagagaaaaaagaagtgtccgagaactaaagccaagggtatccaagttggactgggttgcgtcctgacggcgcccccagtgtgcacgagtgggaaggacttggcgcgccctcccttggcgtggagccagggagcggccgcctgcgggctgccccgctttgcggacgggctgtccccgcgcgaacggaacgttggacttttcgttaacattgaccaagaactgcatggacctaacattcgatctcattcagtattaaannnnnnnnnnnnnnnnnnttacaaactgcaatagagactgtagattgcttctgtagtactccttaagaacacaaagcggggggagggttggggaggggcggcaggagggaggtttgtgagagcgaggctgagcctacagatgaactctttctggcctgccttcgttaactgtgtatgtacatatatatattttttaatttgatgaaagctgattactgtcaataaaacagcttcatgcctttgtaagttatttcttgtttgtttgtttgggtatccctgcccagtgttgtttgtaaataagagatttggagcactctgagt

SEQ ID NO: 187202 - DNA, 1234 bp, Homo Sapiens
  misc_feature (264)..(306): n is a, c, g, or t
  misc_feature (315)..(568): n is a, c, g, or t
  misc_feature (684)..(766): n is a, c, g, or t
ttggcttgtttatcaatatggatgcagggattcctgttttactcagagttgcaagccattgctttgattttatcttgattctcaaattgtcccagatttatagcagcctcttgtgtgtttgtagcttgctcccatcatgttttgagtactttcttaccttctggcataacaagatgttccaggctcatcttgaatgttccctaccctagccctggaatcagccatttctccagggagtcttggttccttataatggagaatggnnnnnnnnnnnnnnnnnnnnnnnnnnnnnnnnnnnnnnnnnnngagacagannnnnnnnnnnnnnnnnnnnnnnnnnnnnnnnnnnnnnnnnnnnnnnnnnnnnnnnnnnnnnnnnnnnnnnnnnnnnnnnnnnnnnnnnnnnnnnnnnnnnnnnnnnnnnnnnnnnnnnnnnnnnnnnnnnnnnnnnnnnnnnnnnnnnnnnnnnnnnnnnnnnnnnnnnnnnnnnnnnnnnnnnnnnnnnnnnnnnnnnnnnnnnnnnnnnnnnnnnnnnnnnnnnnnnnnnnnnnnnnnnnnnnnnnnnnnngtgtgagccaccatacccagccagagaatgttatttagaaaccaagatctgggtgccaaatgtgctgcttgttactggaatgtcattgcctctaggctctcaccatacagtgcaannnnnnnnnnnnnnnnnnnnnnnnnnnnnnnnnnnnnnnnnnnnnnnnnnnnnnnnnnnnnnnnnnnnnnnnnnnnnnnnnnntgattgatttgtagaaacaagataggttagagatacctgacataaatagatactaaaaatcatgaattcacactgatgctttgagaccagccctgtaggtttattccagtctgcccccttttccatgttgttaactctttcctccagagagacaaagatttcaggttgctttgttaagttccatctaatgatcattctgacgtaagtctgtttttcttatttccttggaatgatgtctcctctggtttcagaacttcctcctctgcttcctgtatcctgaggctggcggggccagttgtctttaaggcttgtgcatttttgtaaagagcttgcacgtgtggaaatcagtaaccagtagtgggttaggggtactgagcccagaagcctctacagaataacaggagcacaaggaagaagtggtattccagctggggacccaggaggagactttgtggagaacctgatgct

SEQ ID NO: 187203 - DNA, 1710 bp, Homo Sapiens
  misc_feature (1642)..(1667): n is a, c, g, or t
cttttctatgatagccacttgcttcttggccagcttctccagctcgatggacgagttgtttggcatgcgtctccacctccttctgtagcttgaggcggtgctcgtccatctcagccttcagcttgttctccagggcgatcagctgcttctggtgctggcgccgcatccgcttataacctgacatctgttcccgcaactcgttctcctgctcatgctcatggatctgtcgtgtaactttcttatgcacgacggaggagctggaattgattgtgctttcgtcatcgtgcatcatgacaagttcggaactgctctcgtccatgacttcctgcatgctgttcacactgctgctctggctgcctgtgctcacggacatgcttggaatggaatggttgctgcccaggctgtccatttccctgttcaggctggttccatgttcactgtcttcctcatcctcctgtgactcattcaagggtccattccgtgtctcttggaaaagtatttttttcatttttcggtactgtaggttatctagctcacgaactgcatcttttgtcctctgtatgaggtcaatgaggacacgtagtggccggtctcgtcgaacaaagtcatgccttaatagttctgctgatgttggcctttcctgaggtattttctgcaagcagtaatcaacaaatctcctaaaggagtctgtccattcattagactgtaacgttggggagtcattctgggcaatgtgatataaggcactcattgcattcatgttgaaaaggggcggcttccgttccgccaattcaatacaagtgatgccaagtgaccaaatatcaactttcccatcatactgtccttcatccatagctaagatcacctctggagccatccagtaaggtgtgcccacgaaggagttggcaggagaagccattgaagcagatccaaaatcagctagttttacctgacctggctctgttagaagaatatttcctgctttaatatccctatgaatcaatgcatgagaatgtaggtaggctagtccatgcaaggctccatgagtaatggcagcgatctccacttcctgaagtggttttttatgaacttctaataaatcagaggctgagcctaagcaatattccatcaccaaccaagcagtgtgttctttcaagtaacagcctttgtactcaatagtattaggatgcttcaattgtcgtaaaaatttaacttccttaagaatatcttgccatttctcatgggtctgcttcccactataggacatcttcttaattgccaccacctcattggtgtgagcatttgtagcaaaataaactgctccaaaacttccatgtccaatttcatgcaaaccaataaaaagttcctcaggatcatctttgtagaatagatcggcaatctctgggtccttcagcacccctttacgcatgatggccagtagagcaggctctgctttttgatatcagttagctttatttctcattgacaattttttttggggggtaaatcttcagtacctttttgtgtgtggcacaaaatattccatattgctcagattcattttagcagcaaacttctcttttctcttttataacttcagtcctttgtatttatgatgcaacctcagacctgctgtcagtannnnnnnnnnnnnnnnnnnnnnnnnncaacgcccgttaaaatggggaatgtggttttgcagggtctgaa

SEQ ID NO: 187204 - DNA, 1586 bp, Homo Sapiens
ttggcaactatttttttaagccactttttcctctctccaattttgcaacgacgggcgcggaggaggaggttcccggaagccacgcgcagctggagcagcggcgaccgcagctggaggcccggagcgcctgcggggctggcagaggcgagggaggttgcgggtaggaagggcggactgcgcgcgccccctgcgtcccgcgcacctcggggccggtccatgctcccgacggctgcgggcttcagcatctggggccaggttggggcggcggggtccagggcgcaggtggtgcggccgatgcgccgggccggaggctgaggccgcgctgcggggctgggacagcactggcatctccagagcaggcccggggcagcaagggaggcgccgcgatgccagacgaaaatatcttcctgttcgtgcccaacctcatcggttatgcccggattgtcttcgccatcatttctttctacttcatgccctgctgccccctcacggcctcctccttctacctgctcagcggcctgctggacgctttcgatggacacgctgctcgcgctcttaatcaaggaacccggtttggggccatgctggacatgctgacggaccgctgctccaccatgtgcctgttggtcaacctggccctgctgtaccctggagccacgctgttcttccaaatcagcatgagtttggatgtggccagtcactggctgcacctccacagttctgtggtccgaggcagtgagagtcacaagatgatcgacttgtccgggaatccggtgcttcggatctactacacctcgaggcctgctctgttcaccttgtgtgctgggaatgagctcttctactgcctcctctacctgttccatttctctgagggacctttagttggctctgtgggactgttccggatgggcctctgggtcactgcccccatcgccttgctgaagtcgctcatcagcgtcatccacctgatcacggccgcccgcaacatggctgccctggacgcagcagaccgcgccaagaagaagtgacgctggagccccgggtcctggctgcccacctgccctgggagtcttgctgtgccacacagctccccaccccctgctaggaggtcccagtctcacgccttcctcatgtgttgttctacctgctgggatgggggtcagcctctctttggtgacgtcacgttctctgggatcctgaggacccgggcctcaaatcagggaggatacgcgggaggccccctccatccaggcggtgctcctggggtgccgggaccgggcagtgtcacaccctgcctgctcagtcctggggtccgagatgctagggacgcttgagtgagggaggtggtgtgagggccaggtttcctgaaaggcgggagtcagacctccgcccccagccagagcaagcttggggcaccatgcccaggagggaagaagccatccacagccttccctgtcaccggctcctctgtcctgcctactctggtcctggcgggacttcactatttgacttggtttcctttcagatattcttggctcacgcctgggttgagggagcttacgaaagacgtccgtctgggtgctttt

SEQ ID NO: 187205 - DNA, 1349 bp, Homo Sapiens
ttggatcagtgttcaatttcacatttaagctgctttgcaattcccaggggtactgggaagaaagcacctgttctgtatcagtcctaccacctgccattaaccctttctctcctaagatcattttgagaatttgcctgcctgggcaggaaagggactatttctgtggaggaaaaaagtgaagattgattctctttactagttgctgctgatggatctctgtgacggacaaatcaccttatctcaaactaatggggtgtgatgtgactagtcacatggcttttcattcttctctacgagaatacagcctatcaaaatgatgtctgttggaaatgtatgaaccaatcaaacagataatttatgtatgtaatgtaatgagagcacttttcattgactgtgaactttttatttttgaatctgcactcaagccaatcttcttagaggcagcccggcaccttcatccataggcagagagagaactgggtgttggagacttattcgagggtataggaagggccctgtgaagttgatttaacttttggatgtcagactgtgaaagctcctgagaaacttggggtaataggatcttcttttggggatgaaaatggggaaggcgtgaggacctagactacttctccctagatcagaaaaagagaattaccccttgacaaatatgatacctgctaggtatttcccagggaaatttagggattggcctctttccctagcatgtggaggaattggcagacagcttcctaagggcggggagcgggggcccaaggccgacactgcttgcatccacgtgaccttaagttatggcagatgactctgaaacggactgaggccaatgagaacagatggatggagcactcaggttagacttgttccttctcctatgctggaggagagggatggttctctagaatgttggaggtgagttgagagctcgcctcttgaatgttgaacagtgtactcttctgaaaactgcatattcactttatgtggtttcagaatactgggctcaatactaacataagaaagacacttcattgagaaattcttaagcttacagaaaacctatactctttgcacattccacataaccctagcaaaatgcagtttcttcatacttctgtcactttttccattggaagatttgcttaagaaaattaattcctatttattcccacaaaatgttggcattgcttgattttacccaatggggaatgtgctttgaatttttggaacacttttacaattaaaaataaagtagggccatttttaatttgtttcatcagacactatgttaaagagagggttaaatataaatatattttcgtgtgtatttttgg

SEQ ID NO: 187206 - DNA, 1169 bp, Homo Sapiens
  misc_feature (314)..(355): n is a, c, g, or t
  misc_feature (965)..(973): n is a, c, g, or t
aaactgtggggtgcaaggagggaggctgaggaggaagctgcagaggagctgccatcttgtgcagtgctgtatctgctgccatcttgtgcagtgcgtgagtgctgagacaatcatcaccaccccccagcaagacacacacaaactaaaactcacccagtgccgcaaaagccaagtttccattctgcaatccactaacttggagttcagcaaaggcaaccaagcctcggagttcaagaaagctgatccttgaacactatgtagctacttgtgctaaagctcccttccttcctctctgcatgcacgcgcgcgcgcgnnnnnnnnnnnnnnnnnnnnnnnnnnnnnnnnnnnnnnnnnngaggggaagtgggagaggaaagggaggggaagaagattagcttcatttgtgtcttggaaggatttgggtcatgagttataaacaccaaaaccttccacgcatccactgatccactgagtcatcccagactcagctacatgtgacaaggttgtagaaattgattagctttattaaaataaaaatttaaaaatcacaaggtgactcattcattctaaagtgaggccccttttcccttctccctatctgcttaatccttacagaaaagcgaaacaccaaaaacaagacccagggcgctcataccaggccttgctcccagcaggaatttaaaaccaaggataagagatgcctttgtcaaatcttggttccatgaaaaacttaccaacgcagctttttaatactcctatttcatccccctttctggaactctccctgctcccttctcatcctggggtttccatcctgtgtcccctcgggctgtggagctacgatgcctgcctgtggctttattaaaaagaaaacagtcccggggctttgttcttggttgttgctgcccaggcaggagagcacttttatgtggatttctgatttgttgcaacagttcaatgggacnnnnnnnnnccttctcaatcaacagagtttaccaatgtttccaacctctctaataataataacctgagaaaacttacaatgctgacttgcacccatgtggtaatggagcacaggtttccccctaagtttggtaagactagttaggaaaaagccaaatggataacttacatcataatttgtaagaatctaagcactctttgtccaa

SEQ ID NO: 187207 - DNA, 988 bp, Homo Sapiens
attcccatctttgtatttggcgaccacctgactgcccacatacagcttgtcagcaggagggtggtaatcataggcaatatggttccccgacagtagactctttcctttgttgtcaaatttcacttgtatttcttccctggcccaactgtctggatggcaataagggtgcctttgtgccaagtcttagttctcttcttgcccagaattcgcatgctgactatcaggtcaccatctttgcttagttctccagacatctgactcaaggttcctttatgcagatcctgggaactgctcttcttgttgacagcatccatgaacttctgaacatcttgagctgactttcttaaggcagccatagcttcacggagcttctggtcttttggagttctgctcccagcatcacctgaatcaatactgaggacatcatcatcttcatcaggaatctcaattatttctgtaggccgggaagattcgtcctcagagctactgtcccggtattgtagtcccagcttggagtagaagtccttcaccaaagactcacaattagtcactgccctggatgcatcatcaaagagttggtcaacgtgagccacctcagattctttctgtattacccatgtctctaactctgctagctgcttcttgcgttgctgtacacaatccatcttctccagttcctcatcgatgaaatgccgaagttcctccatagagatacccagttcctcaaccactgcctgttgcagctctgcaatctcttcagactccactgtagctgttgctgcatccaaaccaatgcacccaggaagggaagacatgcttttgtcctctcccgtcttccagcttcaagggctctttttcaccaaccagaccccagactcacaactcaggggtcggcctcgacggaaaagagcgaaagcgaagggataagggaggagggggaggggaggaagcgtgaaagagggaaggggaagcaaaagaaacgccccaa

SEQ ID NO: 187208 - DNA, 1917 bp, Homo Sapiens
ttggcatggattacatgcctttatcgtacctattcgtgaaatcgggacccataagcctttgccaggaattaccgttggtgacatcggccccaaatttggttatgatgagatagacaatggctacctcaaaatggacaaccatcgtattcccagagaaaacatgctgatgaagtatgcccaggtgaagcctgatggcacatacgtgaaaccgctgagtaacaagctgacttacgggaccatggtgtttgtcaggtccttccttgtgggagaagctgctcgggctctgtctaaggcgtgcaccattgccatccgatacagcgctgtgaggcaccagtctgaaatcaagccaggtgaaccagaaccacagattttggattttcaaacccagcagtataaactctttccactcctggccactgcctatgccttccagtttgtgggcgcatacatgaaggagacctatcaccggattaacgaaggcattggtcaaggggacctgagtgaactgcctgagcttcatgccctcaccgctggactgaaggctttcacctcctggactgcaaacactggcattgaagcatgtcggatggcttgtggtgggcatggctattctcattgcagtggtcttccaaatatttatgtcaatttcaccccaagctgtacctttgagggagaaaacactgtcatgatgctccagacggctaggttcctgatgaaaagttatgatcaggtgcactcaggaaagttggtgtgtggcatggtgtcctatttgaacgacctgcccagtcagcgcatccagccacagcaggtagcagtctggccaaccatggtggatatcaacagccccgaaagcctaaccgaagcatataaactccgtgcagccagattagtagaaattgctgcaaaaaaccttcaaaaagaagtgattcacagaaaaagcaaggaggtagcttggaacctaacttctgttgaccttgttcgagcaagtgaggcacattgccactatgtggtagttaagctcttttcagaaaaactcctcaaaattcaagataaagccattcaagctgtcttaaggagtttatgtctgctgtattctctgtatggaatcagtcagaacgcgggggatttccttcaggggagcatcatgacagagcctcagattacacaagtaaaccagcgtgtaaaggagttactcactctgattcgctcagatgctgttgctttggttgatgcatttgattttcaggatgtgacacttggctctgtgcttggccgctatgatgggaatgtgtatgaaaacttgtttgagtgggctaagaactccccactgaacaaagcagaggtccacgaatcttacaagcacctgaagtcactgcagtccaagctctgaagtgtcacaaggacaagtttaatctgcttcagaaagcgcctgtgtgcaactcaaattttgtggaatctttttcgaattcaaatagctatagagcaaatgataaattgacccctttttataaatggagggaaaaaatgaacagatttcagagattaaatgaaaaaaagcagatgttttaagtgcaattaacactgaaagagacctgttaaaccattcagaaaaagcttaagaaatgcgatatgacttccttttgtaatgctgctgatcccagtagactatgacttttgataattagcagaatttaactactgagtagttgattattttcacattttaattgctaatcactggctatataagtgtttttaagcaaaggtatttttgaagtggtgtagaacccttccaagctttcctgctcagtgttctaccagacttaccctggggcctggcttaaaagcagattgaagaaaagggactgggggaaggaaacttattggaaaacttgatgcgaatgagtttctgcttgg

SEQ ID NO: 187209 - DNA, 1375 bp, Homo Sapiens
  misc_feature (253)..(267): n is a, c, g, or t
ttgggttatttacctgaaattaatcttccttcacacatggaccgtaaacggttcccagttgtctgagagcctcatgagggtttctaggatttatgaccttatgaccagtttttttcatttaccaagattttattttcctacatgaaaatttaattgagtaataattattcacatgtgcattttctttttagctgttaaatgtactatgccatcatccaccatttagtaaaatgtagctggcccaggacatgtnnnnnnnnnnnnnnncaacaacaataaatagggcatgtgaaatgttaagttacagcaatagatattttatttgtatttcatgttagtacttttttgttttatatcacttataaaggtacagtgtactctttgtcacagctcagttggtaaccgcattccattgaaaagttggccttgtaaaatacaactctcatttaatattcatgcttttgtgcctttaagaaaatattttttgtcattttttgtgttacagaactataatgtgattcaaggtgtttataggcttgtcataaaaggggcatttctgtgtgttactttctttttatatagctatagtatatttaaacaataatactatcttttataggggtttgtctatttacctattctttactcagacattgatgtagacttgtcagattattctgagtattgttaacagtgccttttcgatggaatcacactttttggctgtcaccttgtgccatatacacacaaaattttgtggaaggcagttttaactttctgaagaatatctgtcaaaatttaagaaaacaaatgtataaaattccattttttccagtgtttagcatttctagtaagcagtgaggttgtttgacatacagtgatgatggcattattgataagccatacatgagactgcagattatattgaatcatattaaatgtacagaaataaaatattagatttatatcaaattttccaatttgaaccagtggggaaaatcccacagaaatcagtaagtttacatttcaatttctatcttatttgactaagtggaaagagattctttaaaatgtataacctgccattatgtaatttggtttcattttattctacctgttgtgtgagtttagtatatttaatttactttttgttactctttacatactgtttatttttgttagtttttaattgaagatggactgttgaaattgtataggaccagtgtcttattaatatgattaatatatttagaagagccacgtgaaacccatgacaaaatgaatgtgaatattctttctaaaaatttagaaaatgttatctttttgcatttattatgtaaaactgttttacagtatcaaaatttttcacttaaag

SEQ ID NO: 187210 - DNA, 1487 bp, Homo Sapiens
ctttgtacaaaaaagttgggttagtgtggggccgtgtctcagtccacccaaggtctcctcggatcgcctggagaggcactcggacctggagcagtgaggagaatgaataccttccaagaccagagtggcagctccagtaatagagaaccccttttgaggtgtagtgatgcacggagggacttggagcttgctattggtggagttctccgggctgaacagcaaattaaagataacttgcgagaggtcaaagctcagattcacagttgcataagccgtcacctggaatgtcttagaagccgtgaggtatggctgtatgaacaggtggaccttatttatcagcttaaagaggagacacttcaacagcaggctcagcagctctactcgttattgggccagttcaattgtcttactcatcaactggagtgtacccaaaacaaagatctagccaatcaagtctctgtgtgcctggagagactgggcagtttgacccttaagcctgaagattcaactgtcctgctctttgaagctgacacaattactctgcgccagaccatcaccacatttgggtctctcaaaaccattcaaattcctgagcacttgatggctcatgctagttcagcaaatattgggcccttcctggagaagagaggctgtatctccatgccagagcagaagtcagcatccggtattgtagctgtccctttcagcgaatggctccttggaagcaaacctgccagtggttatcaagctccttacatacccagcaccgacccccaggactggcttacccaaaagcagaccttggagaacagtcagacttcttccagagcctgcaatttcttcaataatgtcgggggaaacctaaagggcttagaaaactggctcctcaagagtgaaaaatcaagttatcaaaagtgtaacagccattccactactagttctttctccattgaaatggaaaaggttggagatcaagagcttcctgatcaagatgagatggacctatcagattggctagtgactccccaggaatcccataagctgcggaagcctgagaatggcagtcgtgaaaccagtgagaagtttaagctcttattccagtcctataatgtgaatgattggcttgtcaagactgactcctgtaccaactgtcagggaaaccagcccaaaggtgtggagattgaaaacctgggcaatctgaagtgcctgaatgaccacttggaggccaagaaaccattgtccacccccagcatggttacagaggattggcttgtccagaaccatcatgacccatgtaaggtagaggaggtgtgcagagccaatgagccctgcacaagctttgcagagtgtgtgtgtgatgagaattgtgagaaggaggctctgtataagtggcttctgaagaaagaagaaaggataaaaatgggatgcctgtggaacccaaacctgagcctgagaagcataagattccctgatatgtggctctgtcc

SEQ ID NO: 187211 - DNA, 1258 bp, Homo Sapiens
ttggagagaagcaacattgatagcaatgagcatcaccaccacggaattaccaccatccgcgtcaccccagtagagggcagcgaaattggctcagagacgctgtccatttcttcttcccgcgactccaccctgcggagaaagggcaatatcattctaatccctgaaagaagcaacagccccgaaaacactagaaatatcttctacaaaggaacctcccccacacgggcttataaggattgagtgatgtccattccatcattagggctactcgcaaaagaccatatgttgattctacctgtgttctgttccagcgaattgggaagtctcaccaagctagattgtctaccatcagcccagaactctgtaacttttcagaactgctatactcaaacttgcagatctcacatcaaggagagggaaaagcacaatgcaagaacctaactaacgtgatgatatgaagagttttcttaagacctgtcgtcaaacttaaaaggttttgcagagggcagtatcaaaagaaagtggttttcttcaaatgtatactattttacttcctgaatgtgccaactttggggatttttctttatagtgagctgtgggaacccagaacacacacgttttccctacagcagaggccatgcagtattatatattcattttgcagaatctgcacctacagctcaatacgggtggtgctgattattatagtacatataccatgtaaactctcaaactctatttagctgtgaaatagtggtgtgcaattccttgttaaagaaatgctactttattaagaagatgctggctgctttgtgttagaataggacaccccgcagcttctctgtagtggctctgtcacagtcaaaaaatgaaaaggtttttgtgcgtttcttcaaaattctgctttcttcaacatcaaaaattgtgtagaaatattttcagtgaaagggaataactagtacttttctgcatagtttttcttctgcttactttttatttaagtataggtactgctaatgaatctgttttcttagtgagtaaatttgcataattttataaatattattttagagaatcttttgaaattgttgtgatcatattttgctttctatggcttctccttaacttattgattaattttttgaagttatagatatgttctcctattttaaaagcaaaaataacaattgacattccttgagcaaaatatactgctgtgaatttgcaaacaagaaatctgagccaaaacttgacattg

SEQ ID NO: 187212 - DNA, 1654 bp, Homo Sapiens
ttgggtttcactgtttgccagcacagacctttgatgggtgtgggcttttctgcgtattaatcagccatttttgtgagagtttgaccctggaaagggtgctttgtatatgttcttttcacatagtgcccagcttgcatgaaatgtacagagaaatgtgtggtcgtattttttacttttgtcttgtatatgtatgtatattgggtcctctgggcagtagaggcaaagctcacctcccatgtagcacatgaaatgcttgtgagttgttgacattggacaggtgaacagtagggcattacatttgtgtgaattaaatgtgaacttctgtattacgttgcggcgtcggcagtcctgcgttccctggagtaactgtacgtatctgcctttgctgggaagactgtggggctgcctgtgttggctggcgaccagcaggattgctccaggattttgtgtttacctcgcgtgaagttcagcacgtgctgtcgtgtagtcagcttctactctaatttctgttacagttctgcaaaggtaacctggagtttagaagttaaaaaaaagcatgggatgttggatttgcaccatttggagtttctttaggaaagaaaagttttctgcttttttatagaaaatcatttcagtctcctgaggtctcatgctagcaaattttgaaataggattctaatcactgatttcaaatattaagcaaaatgtaaagcactttaatttatagctatggttataaacaggttttagatgtttcaaatgacttgtccactgaatgtcacttgaccttgataagaggccgcctgcacacagagcccagttaattctccgcacctcggttgtgtgcttccgaatgggctcactcccgtggtggtgtttgagagccaacaacactacctcagagacgggtctttgggaaactttgggtctcactgttgcctggctggagcactttggtttatagctggaatactgagttcagttcagaaggcaggaaagacagtcacaccgacgtgtcctgaaggtgtaggctctccacttaggcgcacaagctgacggctgcagccagcaggccccggtgacgagacacttccaggtcttgtggtggggacgcctctcagtgccagtcccgccactgctgagtgagcctggtgttcttgccttcttggaaattactgctcacctggtatctgtacgttaatgtttcttgctgagttacagttttgataaagaggctctcatttcctgtgtcttgtatattcagtcctttcaatacgtccacctggaggctcaccacttggagagacacaggaaggtaatatttacagctgtcatgtgacatccccaggtctttgtgttttgccctgttttacggtgaggtaggagggaacccatctggggaccggtaggtgcaggtgcagtaggacgtgggacttttggacccgtcctttggtgcagctcgccagggatgagaggcacctccctacttgggtcttcaggagctggtccaaggagcttcgaatctaagtcatctagaatgaccctgaaatgactgacagccccgggcccaagaaaaacccataaccacctcagatgggatctgacgtggctaaaggacaaacagcaaatatttcagtcattttgattttacaaa

SEQ ID NO: 187213 - DNA, 1225 bp, Homo Sapiens
ttggcggcttgtctctctgtcagtggcggctgctgcctgctctggaggcaggctgggcggtggcggccgagactggcgggggtggacgcccgggccgggctgcgcccgcttcttgcagctgtgaattcctttggacaattgatgatatttatcattgtgcccagtttctacaaataaaagatgggtggattattttctcgatggagggttgaaccatatgaaattgccagtattcaactgcttggacttagcaaaatgtcagtttcatatggttaaccctaatgttaacaactcttatggaaactacaatgaactgatattcattaccctcttggattgttgaacaaaaccttcaactgtagaagttctagaaagtatagataaggaaattcaagcattggaagaatttagggaaaaaaatcagagattacaaaaattatgggttggaagattaattctgtattcctcagttctctatctgtttacatgcttaattgtatatttgtggtatcttcctgatgaatttacagcaagacttgccatgacactcccattttttgcttttccattgatcatctggagcataagaacagtaattattttcttcttttccaagagaacagaaagaaataatgaagcattggatgatttaaaatcccagaggaaaaaaatacttgaagaagtcatggaaaaagaaacttacaagacggctaaattaattcttgaaaggtttgatccggactcaaagaaagcaaaggagtgtgagccgccatctgctggagcagctgtaactgcaagacctggacaagagattcgtcagcgaactgcagctcaaagaaacctttctccaacaccagcaagccctaaccagggccctcctccacaagttccagtatctcctggaccaccaaaggacagttctgcccctggtggacccccagaaaggactgttactccagccctatcatcaaatgtgttaccaagacatcttggatcccctgctacttcagtgcctggaatgggtcttcatcctccaggtccacctttagcaagacctattctcccccgagaacgaggtgctttggatagaattgttgaatatttggttggtgatggtccacaaaacaggtatgcacttatatgtcagcagtgtttttctcataatggcatggctttgaaggaagaatttgaatacattgcttttcgatgtgcctactgttttttc

SEQ ID NO: 187214 - DNA, 1244 bp, Homo Sapiens
ccccagtgtggctccatcagcccacctgggcccacgtgaggaaggctgggatgtcccgtacaggaacattccttgtgagcgccttcacacgcaggttccggtcatccgtcaacagcaccacctcccgcagtagccggattggctcctctttgctggcgggcatgaagttttagccttgtctttgcagtagtggaggcagcaggacaggatgagatcatcgttgttacccagctggccagtgatgtcctcactgcggaaggcgatggattcgagttcattgccacggctggtcagggctcgcaggcaagagtcccgactctcgaatcgctgctcgaggaactcgatggacttgcgggccttctcttgtaccacacgggcgtagcccccagcccggtggtctgtctcctgccccttggccaggccgtccagctcattgatcacgatgaggggcaccaccaggatgtacttcctgctctccagcagccgcgccagactggccaggtggtcaatgaagccgttggtgtctggtacgaggaacaaaggtctgatttcgagctccatctgcctcatctgactgtggtcctccaggacagcctggatcttttcctggcgacgctgctgctcagctatcttcctggccagagccagcttcttggcccgaagctccctgatgtcatcctcgcctccgctgccttcagcctctgaatcttcctcaaagtcttcaatcaccacatcctcctcctcatcttccagtcgtgttccctcttggcttcccatttcctttcccatggtgtctgggacgggtgccactgacacatactttccacccttgaatgccagcagaggctcttcttgtccacaaagggcttccagaaaatacttcagcactgtgacccttttgcagtcagctgcaataaccttatccgaggttttctccacgtagcaggggtcctgaggggcagccagcaaggggacaaagcccgagagaagccgatcctcttccaggataagaagggtgaggtcatcatccgggtccttgtacagtggcacctcagactgattcactgcagtcagtatgttacagaaatcagccagcgtcgaccatacatccacagcaacatgcgagggcagatccagggatgtgggaggaggattccaggtgtccgggtagccgagcatccaatctgaccagactttgacactggggagcagctccttcaggtccgggacaaaggaagacccaa

SEQ ID NO: 187215 - DNA, 1142 bp, Homo Sapiens
  misc_feature (103)..(142): n is a, c, g, or t
agcaaatcctagcacattattaacaaaaaaatctgtacatttgccatgatacacttgaaagtgaaacaaataagatataaatacagatatggatgtaacatgnnnnnnnnnnnnnnnnnnnnnnnnnnnnnnnnnnnnnnnncccacccaacctgggggtgtggggaccatgcgtgtgaacacagtgccaacataactattttggtggctgatattttttcaaagcacttctttatttccaaacattattgttagcaaagtcctggtgggattctacaaagttcttatttgctgtcctttaaagtgtaacattacgcttgataaataaagggtggcagggaaagaaaaagactgatgagacaaagtcagttgcattacctgcacagggtggtaagctagtgaggcgcatagaaaaggcaggcccgtggcatcgccgcaggtccgggaagcacacacagtgtacttgaaggaagctgcgtgccccgaggaccggctgcaccctgcccagaccctggctgcaggggaggcagcagcttggaggaagcagggagtcagcccgcccagccccgcagtggagcagcgggggtcttgggccctggccagtccggtagacagggaggcagagacaggcttaggtgctctgctcttttgtgttctgtttttcattggaacaggggccctgcagggaggcggcggcaaggcaaggcagctgcagctgtcagggtctagggggcgacggtgggctcggcgccctcccagtgaggtggtggcggcatgcgagtctcctcggcgcggcggcagcagttttcagattgaggccaagagacctgtgacgtgattgtatctctaagtcaggagactgaagactgggcgagtgacattcaaggctagccctttgtgagtactatgaggacgtccagcaatgttcgagatcctttctaagtacactggggactggggtaccttctgggagtcaaagagctcaaggagaaaggtctttctaactgcattaggaataaagaaactcatggataacctagcccgacgcacattcctgcaacaaaggggtcaacaagagactccctaattcacttgtagagtgtaaaaaagaaataccattaatccaacttttttgtacaaag

SEQ ID NO: 187216 - DNA, 1108 bp, Homo Sapiens
  misc_feature (798)..(820): n is a, c, g, or t
ttggcccagaaagaggatcgtgttccagtgcttgaggagtacagagagtacaagaaaattaaagccaagcttaggcttcttgaagttcttataagcaaacaagattcttcaaaatccatataagatacgttccttgaaaattcatatcataaagtcagttgtattccttgaagctatcatcgtgtgtacttggctggtacttaaattcgttttgtcaggcactcagagaatctcattttgtacttggttgtggtgccactaaacaaaacaaatgatgggagagtaagtaggccctctcaagggagcgtaagtgatgttccatattaaccacagactgtcctctccacctttagcaaacatatggtttacttcattgttttgtactacagatacatccttttagcaaaagactggaattttatcctttcaacttcaagaactttggaaatgcaagctttttgttattaccaactttttgtttctcattactgaagaaaattggaggaaaatcttcatactgaattcttctgttgcctttttcttacagaatgactgaaaatttgaaagaaaagcctataaaagtgcacatacgcaactgtgttctctgttttcctagaaaaccaaaatcaaactgagatttcaagtcgtactatggaacacctttctgtttaattcccaaagtgacatcttctcacaggtagtatgttagtaaaattttgcaattcgctggtcacacagctcccggatgaagataacagttggtagaccaaaaggtgacctcgcttagtatattgaaannnnnnnnnnnnnnnnnnnnnnngaactgaatcataccacgtgctgcctatgggacttcagttactgtttcctgagttactgtttatccgctggcaatggtgtgatttgtctggatcagatccgtgctattccccaacccacctccagataatgtgagaaaatagccatgtcagtatgtagaactctgatggtgctcagatttgtgtgttcaatcaatgggcttaatcagcaaatattatgcctaaagtaaatctgttcttaacaagggctctaccactgcattttcacatgtaccttcaagggagttatc

SEQ ID NO: 187217 - DNA, 924 bp, Homo Sapiens
ctttgtacaaaaaagttggaaaagattttcctacctgcttatacttggtaaccgagggaatttctaagacttcttgctcatttctgagtattgtctttatatcctgacactatgaatgctacttggatgcctcttaagggtctcttctgcagggtccccatgaattgtggctgaagttgtgcacaaacaagtatctccagtgacaggagtgccttctgaggcagccattgcatcttcatctgctgacactctgctaggctgacttctgtagttttcaccactgatcttcagtccacctcacagagctctataaaacgcttaaatcctctttacatcatagactttcagctacttgaagatagccatcagccgctacgtgactcttttctccaggatctccctaatactatgaacgcggcagagataacggacaagctcggcctccattccctccgctacagaaactggcacattcaggctacttgtgccactactggacatgggctttacgaaggcctgaactggctcgccaaccagttccagaaccagaactgatcagaaggatctattctttgtgccttgtggccacatcagctagcctctgctgtgtgcacgtgtacgtgtgtgctgggagtggaggcagctttctcacagtgccttatccatgccataagaaaagcagtgttacattttaagaaacccagtgttaagttttaaacaccaccttccatttcagtagctttgatgatcatttttgcaattgatggagaagtccagagggcttgctggtgctcgaagccagagcgggcttcatggaggcgagttggagcggggactgagttcagctgttgcaatcctggtctggcgtctggagtcctgttagtctttggcatcctttcgtaaaaaggaagggaattgtcattc

SEQ ID NO: 187218 - DNA, 1275 bp, Homo Sapiens
ctttgtacaaaaaagttgggtgaatgtgtacgtgcttggaaagacgtttcttctcttggcaagagagctctgcatcaatgcgccggccatagacccgtgcctgtatattccacgctttgcgcacctgctggaattcggggagaagaaccacgaggtgtccatgactgccctgaggctcctacggaggatgaagcgggactggatgcacacaggccggcgcccctcgggcctctgcggagcagcgctcctggttgcagccagaatgcatgacttcaggaggactgtgaaggaggtcatcagtgtggtcaaagtgtgtgagtccacgctgcggaagaggctcacggaatttgaagacacccccaccagtcagttgaccattgatgagttcatgaagatcgacctggaggaggagtgcgaccccccctcgtacacagctgggcagaggaagctgcggatgaagcagcttgaacaagtcctgtcaaaaaaactggaggaggttgaaggtgaaatatccagttaccaggatgcaattgagattgaactagaaaacagccggccaaaggccaaggggggcctggccagcctggcaaaagatggctccaccgaggacaccgcgtccagcttgtgtggcgaggaggacacagaggacgaggagctggaagccgcggccagccacctgaacaaagacttataccgggagctccttggtggtgcccccggcagctcggaagcagcaggaagccccgagtggggcggcagacctccggccctggggtccctgctggaccccctccccactgcagccagcctgggcatctcagactccatccgcgaatgcatctcctctcatagcagcgaccccaaagatgcttcaggagacggtgagctggacctcagtggcattgatgacctggagattgacaggtacatcctgaatgagtcggaagcccgcgtgaaggccgagctgtggatgagggagaacgccgagtacctgcgggaacagagggaaaaagaagcaagaatagcgaaagagaatgagctcggcatctacaaggaacacaagcccaagaagtcttgcaagcgacgggagccaattcaggccagtaccgccagggaggccatcgagaagatgctggagcagaagaagatctccagcaagatcaattatagcgtgctccggggcctcagcagcgccggcgggggcagtctgcacagggaggatgcacagcccgagcatagcgccagtgccaggaagctgtcacgaaagacgacgcc

SEQ ID NO: 187219 - DNA, 1791 bp, Homo Sapiens
  misc_feature (378)..(402): n is a, c, g, or t
ttgtacaaaaaagttggctcccatgaacgtagaaaagattcattgggtgatgagtgttggggttttctatactcatgttgccatcttgagatgttcaaaaaacttggggttagagcaactgttagcgtctctatgagcaatcagtagaacttacacatcctaggaaatctttctttgtaagtaattcttttggtctcaagtgattctcttcatgttgtctcttgatgtacatacccccaagcaagttgggactgtgatgacaattaaatcaccttctctgaagttctggctctgcagagaccaaaccttactgacttgtacagacttgtacaagtaaagacttatacagatagatttttgttttaacttacaatccgnnnnnnnnnnnnnnnnnnnnnnnnnctggtgttggagtcttatttagaaaacaggataaatgacgctgttatcaaaagttgcctggggttctgtatttcttctctgccctccaatccccgactgctatgatgtttactacagtgaacccagcccatggtaaacacaggcttcacctgttcttgtttgttagccttgactgtgaggcaggacttccctcgcttgaactgttacacatacgatgtgtgtgtcacatcacatattgtgcagctgttggttttcatgtagtgccctgcgatggaaattagatatatttcatgtatttttccattgaaggtggagtttttcaatgatcatgtgttttgtcctcctaaacagtataccaaagtttgtttttatagttgaggattgtattgataaccactggggttccgcattgaagcaggaacaaattgcctctttttctggccttctctgtgggacctctgcttttgtgaagcaactatttatttgaagaccagggtatgggcacttttgccttctctcctctctgacttttgagggtattgagggcgcccttagtcatagtctcgactccgccattgccttctcctcggcgtcctcacaactcttaattgggcctagtgaaaatgggggcaggtgagaagtccattttgagaatcagcatagtaaattacatttctaatcccagaggacttaatattttcttttgtcaccccagaggtgaaaaatcagcagttgaagcctgacaggcctcagtggtgaccaggaacagaagcagccttcctgttagtagatgggggtacttctgtggtgggcagaagccttactaaaggggaagacagactttgaagtttctagacgagaaggaggctagcttctagcctgggtggccattattccaaaaggtcattgtttctcactagaccccagggcaccagatgaatttccaagtttaaactctttcctgcaggtgattactttgaaaaaggttggtccagaccattttgatcaagaacctgtatatgtgttgtgttagaggcatctgcctcaagtctatgtacagtgtttgctgcgggtgtgttccaatattcattttacctctgcttgggggttttgtgtgttcccctccccccatgccctgcctacccccttttccctgaaccacgtccttttgaataatttccagatggatttctgtagccataccaaagccagggtgttttcattcatgcggatactagtatttatagatgtctgactacctaacttaatttttgtttttgaacttctaattggggccagtgtaaggtcgatcccagaggctgatctgcaatcaagctacatgtatttgtgtatagaccctgtgttcaggactgggtgacttttctagaa

SEQ ID NO: 187220 - DNA, 903 bp, Homo Sapiens
ttgggctcctccgagctcgctgttcgtccgggttttttacgttttaatttccaggacttgaactgccatgtcctctgaagaaggaaagctcttcgtgggagggctcaactttaacaccgacgagcaggcactggaagaccacttcagcagtttcggacctatctctgaggtggtcgttgtcaaggaccgggagactcagcggtccaggggttttggtttcatcaccttcaccaacccagagcatgcttcagttgccatgagagccatgaacggagaggtggggcctcctatctgcagagggaccttgtccccatctgcggcttccttcattctttttgtttttccctctgtgtctgctcggggcagcgtggccaccaagccccgcagtgcccactcacaggagcatgactgccttttgttctagggggtggagggcagcggcagacagagcctggccgcctgggaggcgacgactggtcctgcatgaggccgagaagccacctgtggatggttgacctgccttgggcttaggtagtagagtctgcagacctgtgggcctggcccggagaggacctcgtgagtcttctgacatggactctgaagcctcaaaccaagagaggtgtctgtctagccctgatagtcgggcagcttagaggagtggggaggagaactcagcctgagttcagtcaagatgtaagtagtagcaaggggaacatggtgcattcaggtcattttgtgtgggattctatagctcctgatgaagccattctggggtaaaggagcttattctggaacatggcacccagaaccctggtgcccagcagaatttttgggcctcttttgcccacttacccttgcctgctcttccctcaccattgccctgactgactgccaacccatcat

SEQ ID NO: 187221 - DNA, 1585 bp, Homo Sapiens
  misc_feature (1121)..(1170): n is a, c, g, or t
  misc_feature (1289)..(1297): n is a, c, g, or t
ttggctccggtcccgccgctcccgcagcagccatgtcgttcttcccggagctttactttaacgtggacaatggctacttggagggactggtgcgcggcctgaaggccggggtgctcagccaggccgactacctcaacctggtgcagtgcgagacgctagaggacttgaaactgcatctgcagagcactgattatggtaacttcctggccaacgaggcatcacctctgacggtgtcagtcatcgatgaccggctcaaggagaagatggtggtggagttccgccacatgaggaaccatgcctatgagccactcgccagcttcctagacttcattacttacagttacatgatcgacaacgtgatcctgctcatcacaggcacgctgcaccagcgctccatcgctgagctcgtgcccaagtgccacccactaggcagcttcgagcagatggaggccgtgaacattgctcagacacctgctgagctctacaatgccattctggtggacacgcctcttgcggcttttttccaggactgcatttcagagcaggaccttgacgagatgaacatcgagatcatccgcaacaccctctacaaggcctacctggagtccttctacaagttctgcaccctactgggcgggactacggctgatgccatgtgccccatcctggagtttgaagcagaccgccgcgccttcatcatcaccatcaattctttcggcacagagctgtccaaagaggaccgtgccaagctctttccacactgtgggcggctctaccctgagggcctggcgcagctggctcgggctgacgactatgaacaggtcaagaacgtggccgattactacccggagtacaagctgctcttcgagggtgcaggtagcaaccctggagacaagacgctggaggaccgattctttgagcacgaggtaaagctgaacaagttggccttcctgaaccagttccactttggtgtcttctatgccttcgtgaagctcaaggagcaggagtgtcgcaacatcgtgtggatcgctgaatgtatcgcccagcgccaccgcgccaaaatcgacaactacatccctatcttctagcgtcctggcccaaggctctcaattgcactcttnnnnnnnnnnnnnnnnnnnnnnnnnnnnnnnnnnnnnnnnnnnnnnnnnngtctgtgacaagcctgtggctcacctgcctgtccggggtgtagtacgctgtcctagcggctgcccagttctcctgaccctcttagagactgttcttaggcctgaaaaggggctgggcannnnnnnnnaccaaggatggacgaagaccccctccagagcaaggaggccccctcagccctgtggttacagccgctgatgtatctaagaatcatgtcactttcatgttcctccctaactccctgacctgagaaccctggggcctgggggcagtttgagcctcctctcccttctgtgggtcgctcccagagccatggcccatgggaaggacagagtgtgtgtgtccttggggcctggggggatgttgctcctcagctccctccctcagccctgcccctctgagacaataaaactgccct

SEQ ID NO: 187222 - DNA, 1882 bp, Homo Sapiens
  misc_feature (522)..(550): n is a, c, g, or t
  misc_feature (927)..(943): n is a, c, g, or t
  misc_feature (969)..(987): n is a, c, g, or t
  misc_feature (1063)..(1117): n is a, c, g, or t
gcataggctgtcacaactatattacatccacgttagcatccatgtgaaactaggtatcaggggcttgaccaaatgagatggtaacatccagggcgtaaagacacctcttgttaactaatatggagaaaaaagagtgcctttccacactctcccacagaatggaggctccctaactaacactcaaatttggggttcagcaaatgaaactaaatatcaactgacaccacaatagcactagcctgccctagagtcaagactctgggtgggcagctcttcaataaagacagcaaggaggccatcctgaagaggtatatccacgtctaacaggttacaagaatactgccactagaatcctaaagagcagagtggtcactggggggtaaaaagaaaaaggaaaatccttgaagaaaggcaaaggagacaaccagtctcaagaccacaaggtattataagtcttctgtcaaagtaagatgtataagatttgtaaacactattgtgcaaaataagttcaataaggaatgnnnnnnnnnnnnnnnnnnnnnnnnnnnnntcaaggcagctagtacctacagaagggagaggagaggatttactattttaatttgtcctttcaataggattcttctcctgctccatcctacttataatgtcctggattgccaactttaaaatactgacaggtattcagaggattcaaataaaaaagtaagaggggttgttaaaagtaacttatatccattcacaagttatctaacactggctcacagcctggtaaagaatctcttccttatggaagattgaacaatgatttctttgaggtaccagaaagtagactttgcctctgcagagaggtgggtcttttgcttgaacctgggtgttctggcttaatgctggctttcaggaggcagctaccttcaatttaaattnnnnnnnnnnnnnnnnnctataccaaccgaacgcttgcttaannnnnnnnnnnnnnnnnnnaaatcaggagggacttcatacaaaaaaattcaagtcggcaatgggcatttccaaaaggtgacgagttttttaaatnnnnnnnnnnnnnnnnnnnnnnnnnnnnnnnnnnnnnnnnnnnnnnnnnnnnnnnacatgaaatgctgctccaagcaggaccctggatagggaccttcattgctgatgggatgacacaaattaactgtacgagaagtctgggagacgctggaaccgatggtggcttcgcatgttcctgtcaacccactgagtcagactgtatctttgcagatgtttctgtcggcgggcgtagtttcgcgtggtgaggtccgaaggatgctgccattttgagtgctgcatatgatgaacttgatccatcaaggcacaaagctcccccgagataccttggttagtgtcctctgggtcttctatatgagcaatgacactcctgagataaagctgcttctgctgttctagatttgactgtgaaaacgtcggaacattagtcctggtcttagtttgtagaacaggaatgactttgcctagtcttctctcatggcctttcatcttcccagaatccttgttaagaacatcctgtttgtttgatgaggtggaaacaaccagagatctcatttcacaacttgacttgtgtgaaccaccatttctgcaggataactccatattaggagtctctgaatggtctgagatccgagagaatacagacgtagggttctcactgtcaggcatatttttatcagagacagtctgttgaaagttattgtttgaagaagagagctggggcccattccaggcagagttattggggctgatcccttcagattcagtacaaagtttgctttcatttgggctaagaccatcttctctcatctcttctccccaa

SEQ ID NO: 187223 - DNA, 868 bp, Homo Sapiens
  misc_feature (495)..(503): n is a, c, g, or t
ttgggtatacatacatgtgtagagatcataatttagttcccttcttaatgttacaatttcttagtttacttttcctaaagggccatagcataattcttgattcctggtggaaatcttttctgaggtgtgggggtgggcaaggtgtggattgctgtttacgatagtgccttcattagttttagttctgtctgttttcattcattattgactcaaaggtattagaacaggcccttatctttttcctattagatttatttttgttttttactttatgtaagttcagaatccttttttaagtgatgactactgatgaaataatgttactagtagctgaattttagacttgatgctatgttgattaatatttaaatggtgaaagtaattaggcaaaataagcaattctgcttttctgttgctttcagaatttttaggctgtaaaattgtctcaggcaggaagtcagtctatatctctctcaagttcttattgtaggtcannnnnnnnncagcacagctctaatttttaaatatttggtataacagcttctggcatgtgacctagttaatgttgaaaattaactgatgaaaacccttgtagatctgctaaacttctctataaattgctagaaatatacagagcaatgagatatagaaaacaccttagcttgttggttattaatagagctctaattttaactgtgaaatcatggagtttctttaaatgttttcctagagtgtttgttatcatgaacattagaaatagcattattctttttcttctaccacatgtcttgaacattcacatggggttaaagaagatgggaaactgatactactgacaatcaagctgctttctgacttttctaatttt

SEQ ID NO: 187224 - DNA, 1467 bp, Homo Sapiens
acaaaaaagttggagggtggccacttagatgccaggcacatcaaggacctgctctaaattgtttactggacatggctggaaggttttggaggaaaagaggttgaaatgaaccgaagcaggggaggtacagcatgtgtactgaccgggcagccctttgacacaatgaaagtgaagatgcagacgttccctgacctgtaccggggcctcaccgactgctgcctgaagacttactcccaggtgggcttccgtggcttctacaagggtaccagtccagcactaatcgccaacatcgctgagaactcagtcctcttcatgtgctacggcttctgccagcaggtggtgcggaaagtggctggattggacaagcaggcaaagctgagtgatctgcagaatgcagccgccggttccttcgcctctgcctttgctgcactggtgctctgccccacggagctcgtgaagtgccggctgcagaccatgtatgagatggagacatcagggaagatagccaagagccagaatacagtgtggtctgtcatcaaaagtattcttaggaaagatggccccttggggttctaccatggactctcaagcactttacttcgagaagtaccaggctatttcttcttcttcggtggctatgaactgagccggtccttttttgcatcagggagatcaaaagatgaattaggccctgtacctttgatgttaagtggtggagttggtgggatttgcctctggcttgcggtatacccagtggattgtatcaaatccagaattcaagttctttccatgtctggaaaacaggcaggatttatcagaacctttttaaatgttgtgaaaaatgaaggaataacggccttatattctggactgaaacctactatgattcgagcattccctgccaatggagcactctttttggcctacgaatatagcaggaagttgatgatgaaccagttggaagcatactgaagtgtcttggtgggcctgagccaagcacaggtgtttgaggactacagttcatctcagggtttcttggagtacaagaccagtgtgaagttattctgatttcttgggaattttgctttttgtcttcccttctaccctacatcttaaactttatggaagaacctctattttgcatcatatcatttctgtccataattgtactgaaatagaaaagtgaccgctcttgctcttggtaaaatatagagtggtcagtagccttatgcacctaattcaaaaggtggaatatagttctgtcagggcttttacgtaaacctccacttgtacatgcaatttggacagttatgtgttgagggaagtacagtttggtaccttgtttatttcaaatatcagaaaaacccagaggtgatcatttctcatgaagatgcttataaatggttgcttaacccattctagatgtacggtctgcttaatgtgtgtacttttctaagtggttgatta

SEQ ID NO: 187225 - DNA, 1390 bp, Homo Sapiens
  misc_feature (714)..(734): n is a, c, g, or t
ttggagcaacaatccctgtttctcactaagcaatttttagctttccgtttttatatgtctccggtgtattttctttactgcatttccaattatgtactcatacctgtgccatccattcatcaagagcaggagtttttatcacagggtctgttagcccctagaacggtgctccctgggagattcagactccagcatccctagatatgctaatggattgagtgagacccagatacttatgtttttgacaagtaccccagataattcctctgataacaagaaaattggggaactaagagattcatggacaagtttcagagggctggtgactgtcctcaccctttactcaatttaagcatgattttatgagtacattttttgaggtgtgtagcctttttttctttaaagcatctctgatgtagaaaagttaaaaatcactgaattaggatgtctagggtagggtagatccagacttgggactagttaactctatttgcctttatttcagaatacaaagtggcctgcataattatgtcatttgtctttcagaaccaagaaattgaagaactgacaaaaatctgtgatgagctgattgcaaagctgggaaagactgactgagacactccccctgttagctcaacagatctgcatttggctgcttctcttgtgaccacaattatcttgccttatccaggaataattgcccctttgcagagnnnnnnnnnnnnnnnnnnnnngcacatgcctactgctgcctgtcccgctttgctgccaatgcaacagccctggaagaaaccctagagggttgcatagtctagaaaggagtgtgacctgacagtgctggagcctcctagtttccccctatgaaggttcccttaggctgctgagtttgggtttgtgatttatctttagtttgttttaaagtcatctttactttcccaaatgtgttaaatttgtaactcctctttggggtcttctccaccacctgtctgatttttttgtgatctgtttaatcttttaattttttagtatcagtggttttatttaaggagacagtttggcctattgttacttccaatttataatcaagaaggggctctggatccccttttaaattacacacactctcacacacatacatgtatgtttatagatgctgctgctcttttccctgaagcatagtcaagtaagaactgctctacagaaggacatatttccttggatgtgagaccctattttgaaatagagtcctgactcagaacaccaacttaagaatttgggggattaaagatgtgatgaccacagtcttgggttttcatatctggagaagactatttgccatgacgttttgttgccctggtatttggacactcctcagctttaatgggtgtgg

SEQ ID NO: 187226 - DNA, 952 bp, Homo Sapiens
  misc_feature (112)..(174): n is a, c, g, or t
ttgggtgtgtgtgagcgcgggtgtgaggcggtgcgcaggggcgggcggaggcgctgtccggccccggccaggcgccgggcggggagcatgggaaggggctagaactgctcgnnnnnnnnnnnnnnnnnnnnnnnnnnnnnnnnnnnnnnnnnnnnnnnnnnnnnnnnnnnnnnngacggacatgggctcctgaagttgcgccgctgccggtcgggggaagagacctgacaggtaattaaatgtgtattttgtggacctgggcttggctggaatgctcaggggtcctgaagatcctattatagcttccttctgttgaaccattaagaaaagatggcgaaagtcaacataactagagacctcatccgtaggcagatcaaggagcggggtgccctgagctttgagcggcgctaccatgtcactgacccctttatccggcggctgggcctggaagcagagctgcagggtcactcaggatgtgtcaactgtctggagtggaatgagaaaggagacttgctggcctctggttccgatgaccagcacacgattgtgtgggacccgctgcaccacaagaagctgctctccatgcacacgggacacaccgcaaatatcttctctgtcaagttcctgcctcacgctggggaccgcatcttgatcacgggggcagccgactctaaggtgcatgtgcacgacctgacagtaaaggagaccatccacatgtttggagaccacacaaaccgggtgaagcgcatcgccacagcgcccatgtggcccaacacattctggagtgctgctgaggatgggcttatccgccagtatgaccttcgagagaacagcaaacactcggaggtgctgattgacctgacagagtactgtggccagctggtggaggccaagtgcctcactgtcaacccccaaggacaacaactgcctggcagttggggccagcgggccc

SEQ ID NO: 187227 - DNA, 1261 bp, Homo Sapiens
  misc_feature (968)..(981): n is a, c, g, or t
  misc_feature (1038)..(1047): n is a, c, g, or t
ttgtacaaaaaagttggcaaaagagtcagggtacatgagactccaggctccagcacgtggaggatggggtgctctccatgcaggtggcttctgcgcgccagaccgagagcctggagtccctcctgtccaagagccaggagcacgagcagcgcctggccgccctgcaggggcgcctggaaggcctcgggtcctcagaggcagaccaggatggcctggccagcacggtgaggagcctgggcgagacccagctggtgctctacggtgacgtggaggagctgaagaggagtgtgggcgagctccccagcaccgtggaatcactccagaaggtgcaggagcaggtgcacacgctgctcagtcaggaccaagcccaggccgcccgtctgcctcctcaggacttcctggacagactttcttctctagacaacctgaaagcctcagtcagccaagtggaggcggacttgaaaatgctcaggactgctgtggacagtttggttgcatactcggtcaaaatagaaaccaacgagaacaatctggaatcagccaagggtttactagatgacctgaggaatgatctggataggttgtttgtgaaagtggagaagattcacgaaaaggtctaaatgaattgcgtgtgcagggcgcggatttaaagtccaatttctcatgaccaaaaaatgtgtggttttttcccatgtgtcccctaccccccaatttcttgtcccctcttaaagagcagttgtcaccacctgaacaccaaggcattgtattttcatgcccagttaacttatttacaatatttaagttctctgcttctgcatttggttggtttcctgaagcgcagcccctgtgaataacaggtggcttttcatggatgtctctagtcagagaaaaatgataaaggcttaaattgaggattaacagaagcagattaacctcagaaatcctgtctggctggcagatttcaagtnnnnnnnnnnnnnnggtgggttggggggacccttttctttctagttgtctttaaggaaaattaattttacnnnnnnnnnngttctggccgaaatttttatgagatatctctcacttgtcttccactttgaaccggttaaagctcatagctgtcagctctgaatgaggaggggagaagcccctgggtctttctttgaaaggaatccgctgcttgagggctgcctccctcatggtgtgcgtgtcgtttctcttcctgacgcatcttgtgatatcagaggtaactatgcaaagcatc

SEQ ID NO: 187228 - DNA, 1534 bp, Homo Sapiens
ggggacaacagacggggtgggtaataaaggctccataacagagccaaaaactgagctgagggccctctgtgggggctactggaatgcttgatggaaacgaggcagggtggtgctactcaggccagacgtgaagacaggaggcaaggagtgcagaggcccaaagttcagtggtcccccagctcctggggaatcttgaggctgagcttgcaaagtggtaagcaggggctgtgcctcagcctgggagtagcccatgaccaggcctcctgtggccccaggtgggttacacgggggcaggttgagtggaagaaagcccagtaggtgggagaagtccacattagcagcgcagagggcctcagagaggttggcggggctcttggcaagcagtgcttcatctaggagggccgcagctgccgccggctgaggtgaggcgggctggggttcagcggatgagagagacaggcttccaggaagctccgccagaaaactatccacctccactttgggcaatttgtcgggcaagtatgaggtagatccaagctggtattttggagggagctgagctggggaagagataggtgaggattccagagggtagctcatacccatgggcagcgtgttgtgcaccagggagtgtggcacgcccgtgctgggcatggtagggatgtgggcaccatacatgcccatgggcaacatgccagggaaggccttggtccccattacgtcccgagaggccatgcacagcacagggctcagctcttccttcacactgactgtggagctgcagctgagtaggcctaacatgtccacgggctctgtcttgatcttgagcagctcctgcgagtggctcttcttgacatgacgcgtcaggtggtccttacggccaaaccgctgggcacagtactggcacaggaagtccttacggcctgtgtgcaccactaggtgccgccgtacatccttacgagtatagaaccgccggtcgcagtggtcacaggggtgcttcttctccttggcaccgcctgctacccggcgtgagtgggccttcaggtgctctagcagggcctgggtactctcaaaggtctgcaggcacaccttgcagctgaggtcaccgctgctggcagcatgcatggccaggtggcgccggtagcccagcttcgtattgtaattcttaccgcactcagagcagtggagggcctctttgttaggatcatgggtctgcagatggttccgcagatggtccttgcggtgaaacatcttatcacagtacatacactggtggggtttctgggctgagtgggtggccatgtgcctatacagcttgtatttggaagcaaaagccttgccacagtgcagctgagggcagctatatggtctctgctctggttgcgggaggctgtgaggcctcagcttctccccatttgagaaaggtgttcccgaaatttcacattggcacttcacttgactctccgcctcccggccccgaggcctgggaactagtttccagcccacttcctcctcctgctttgcatcttgccaa

SEQ ID NO: 187229 - DNA, 1554 bp, Homo Sapiens
ttggcaaacattcaaacttcctgggtgcctatgacagcatccggcatgcccatagccagtctgcagaggcagaacgtcgtgccaatacctcagccctggcagtacctagccctgtgagcaactcggcaagtgctcggcatcggacagaggcactgatggatgctcagaaggaggacttcaacagcaaacacatggccaaccagcgggcacttggcaagctctctgcccatacccacaccctgagcctgacagacataaatgagctggtgtgtggggcaccaggggatgcaccctgtgctacaagcccttgtgggggtgccggctgtcgagatgaggatgggcagccgcgctgtgggggcctcagctgcaatggggcagcggctacagcagacctagcactgggccgggcccggcacacacaggcagagctgcagcgggcactggcagaaggtggtagcatcctcagcagagtggctgagactcgtcggcaggcaagcgaggcacagcagcgggcccaggcagccctggacaaggctaatgcttccaggggacaggtggaacaggccaaccaggaacttcaagaacttatccagagtgtgaaggacttcctcaaccaggagggggctgatcctgatagcattgaaatggtggccacacgggtgctagagctctccatcccagcttcagctgagcagatccagcacctggcgggtgcgattgcagagcgagtccggagcctggcagatgtggatgcgatcctggcacgtactgtaggagatgtgcgtcgtgccgagcagctactgcaggatgcacggcgggcaaggagctgggctgaggatgagaaacagaaggcagagacagtacaggcagcactggaggaggcccagcgggcacagggtattgcccagggtgccatccggggggcagtggctgacacacgggacacagagcagaccctgtaccaggtacaggagaggatggcaggtgcagagcgggcactgagctctgcaggtgaaagggctcggcagttggatgctctcctggaggctctgaaattgaaacgggcaggaaatagtctggcagcctctacagcagaagaaacggcaggcagtgcccagggtcgtgcccaggaggctgagcagctgctacgcggtcctctgggtgatcagtaccagacggtgaaggccctagctgagcgcaaggcccaaggtgtgctggctgcacaggcaagggcagaacaactgcgggatgaggctcgggacctgttgcaagccgctcaggacaagctgcagcggctacaggaattggaaggcacctatgaggaaaatgagcgggcactggagagtaaggcagcccagttggacgggttggaggccaggatgcgcagcgtgcttcaagccatcaacttgcaggtgcagatctacaacacctgccagtgaccccgcccaaggcctaccccagttcctagcactgcccccacatgcatgtctgcctatgcactgaagaagctctttggcccggcagggcccccaataaaccaatggtgaacccccc

SEQ ID NO: 187230 - DNA, 2076 bp, Homo Sapiens
ttggacttaatctcacactgcggcagctcgaccagcatcttgacttgctcaaacattcaaacttcctgggtgcctatgacagcatccggcatgcccatagccagtctgcagaggcagaacgtcgtgccaatacctcagccctggcagtacctagccctgtgagcaactcggcaagtgctcggcatcggacagaggcactgatggatgctcagaaggaggacttcaacagcaaacacatggccaaccagcgggcacttggcaagctctctgcccatacccacaccctgagcctgacagacataaatgagctggtgaggttgaagtgttgggtggggcaggtgggtgtagatgttcctctcacagggccctgacttgttctgtgcctggcaggtgtgtggggcaccaggggatgcaccctgtgctacaagcccttgtgggggtgccggctgtcgagatgaggatgggcagccgcgctgtgggggcctcagctgcaatggggcagcggctacagcagacctagcactgggccgggcccggcacacacaggcagagctgcagcgggcactggcagaaggtggtagcatcctcagcagagtggctgagactcgtcggcaggcaagcgaggcacagcagcgggcccaggcagccctggacaaggctaatgcttccaggggacaggtggaacaggccaaccaggaacttcaagaacttatccagagtgtgaaggacttcctcaaccgtgagcctcccacgtgtcccaggccatgtggttgtcccctttggcaactcccggtgtctgtatctcccttggttcatacttgagcctcagggactacactggattagtgtttatgatcccttgactggctcctgacttattgcccatatgtggtcccaggtccatgttcttgagtctgagccccttgtatagtccctgtccttgtgattatatccttatgcctggtaacaaacccctatcccatgtacatgtcctgagtccataccccaaaactgtatcctcatgcccatgctggagaatctatgttcttaagttcttgctgtgtccctatagaggagggggctgatcctgatagcattgaaatggtggccacacgggtgctagagctctccatcccagcttcagctgagcagatccagcacctggcgggtgcgattgcaaagcgagtccggagcctggcagatgtggatgcgatcctggcacgtactgtaggagatgtgcgtcgtgccgagcagctactgcaagatgcacggcgggcaaggagctgggctgaggatgagaaacagaaggcagagacagtacaggcagcactggaggaggcccagcgggcacagggtattgcccagggtgccatccggggggcagtggctgacacacgggacacagagcagaccctgtaccaggtacaggagaggatggcaggtgcagagcgggcactgagctctgcaggtgaaagggctcggcagttggatgctctcctggaggctctgaaattgaaacgggcaggaaatagtctggcagcctctacagcagaagaaacggcaggcagtgcccagggtcgtgcccaggaggctgagcagctgctacgcggtcctctgggtgatcagtaccagacggtgaaggccctagctgagcgcaaggcccaaggtgtgctggctgcacaggcaagggcagaacaactgcgggatgaggctcgggacctgttgcaagccgctcaggacaagctgcagcggctacagggtaagaaatggggcaccagagacacaagactgcgggaaaccccccctaaactgacacctgcccttcctagaattggaaggcacctatgaggaaaatgagcgggcactggagagtaaggcagcccagttggacgggttggaggccaggatgcgcagcgtgcttcaagccatcaacttgcaggtgcagatctacaacacctgccagtgacccctgcccaaagcctaccccagttcctagcactgccccacatgcatgtctgcctatgcactgaagagctcttggcccggcagggcccccaataaaccagtgtgaacccc

SEQ ID NO: 187231 - DNA, 1363 bp, Homo Sapiens
  misc_feature (70)..(82): n is a, c, g, or t
  misc_feature (1158)..(1185): n is a, c, g, or t
ttggattttgagaagagatttaaatttccatgtcttcttggaatataatcaagatttgagtgtgcgaggnnnnnnnnnnnnngagaaacttgaagacttctttaaaaacatggttaaatcagcagatggagtaatcgtttcaggagtaaaggatgtagatgatttctttgagcacgaacgaacatttcttttggaatatcataaccgagttaaggatgcatctgctaaatctgatagaatgacaagatcccacaaaagtgctgcagatgattacaatagaattggttcttcattatatgctttaggaactcaggattctacagatatatgcaagttttttctcaaagtttcagaactgttcgataaaacaagaaaaatagaagcacgagtgtctgctgatgaagacctcaaactttctgatcttttaaaatattacttaagagaatctcaagctgctaaggatctcctgtatcgaaggtctaggtcactagtggattatgaaaatgctaataaagcactggataaagcaagagcaaaaaataaagatgttctacaggccgaaacttcccaacaattatgttgtcagaaatttgaaaaaatatctgagtctgcaaaacaagaacttatagattttaagacaagaagagttgctgcattcagaaaaaatttagtggaactggcagagttagaactgaagcatgcaaagggtaatctacagttgctgcagaactgcctggcagtgttaaatggagacacataagccacactccgccttcctgttaaaaagggctgccttccttcaaattttatttttgttttcttaatgatgttaagcatttatgctcactggaaacaaacaaaaagcagctgaaaaagtgcatcaactcctctttttctgagaaacatggagcagcgcacgcccaggcgatgccagtctgtgtgccgtgatgccgcactgtgttccccatgacagtgatccatcatcgtgcactcgtcatactcagaagtccaaagttcattcttctttaaagtagcctctataactctgtttattttataaatagtattccttatggctgccactcttatttacctttaaataatttctgaaatttaaccttttcagaatgcattgttgaaacaagataaagattgccnnnnnnnnnnnnnnnnnnnnnnnnnnnnaaaagcatataccaccttagttcattcatgtatcctggtaaagcatcttaatcagacttatttttaattactgaatatttcttagacgttttgggacagattttatgtaatctttataagtatgatttctgaagaaaagcaaatgcattagtatgtttgccttaaacttgtagactaa

SEQ ID NO: 187232 - DNA, 894 bp, Homo Sapiens
agttgggtttttctttccttctcatttcttttgaaatggcatctcgaacaaagtccaccaatccctttacaaaagaatgaactgctcctctgtgtgtacttcatagaaggtggaatcggacagaggcaggttagtgacagttattcctgaaatacaggagcagagtacagtctgttgtggtttcccggattccgcgcctagctcagccaattaagcatgagacataggccattgagccacttagtagttatgcgagtggatagattggtatgtagagggaaagaggtctgctgtaaagaacaacacttgtttgtctgtggggaaagaaaagcagaatacttgagatgaaagttggcatacaaataggatactatcgccagtagttatattacaaacattatcggcctttctagtgtgaatgaacattagacacattattgtcattcctagtttaaagttaaggttgcgtggttggatttttccactatctttttctaatttttctaccatttggagaccgtaggcatttgggcctgtcaccccttggatgggttcctagtttgtttacattttcctgaaccctcctgagcgcccgttcttggtctaatccccagtcgtgatgattccacacttcctcagccgcatgttgtcttgcctcattcatgagctggtcagcgtttcgtctctttaactgacatgttccccagtgctgtttgaactgttgagtttccgttgctggctgagtgcgttttgtccttcacgtaaccttcgctggtaaaaataagcccatgtgatgtccaccagtggatgaatgctggaccgagagccctagcttctggatccaggtctaggcccttcatctgctgctctgtggcccaggcaggtttgcttgac

SEQ ID NO: 187233 - DNA, 1127 bp, Homo Sapiens
  misc_feature (44)..(71): n is a, c, g, or t
  misc_feature (381)..(404): n is a, c, g, or t
ttggcttttcagaatgcattgttgaaacaagataaagattgccnnnnnnnnnnnnnnnnnnnnnnnnnnnnaaaagcatataccaccttagttcattcatgtatcctggtaaagcatcttaatcagacttatttttaattactgaatatttcttagacgttttgggacagattttatgtaatctttataagtatgatttctgaagaaaagcaaatgcattagtatgtttgccttaaacttgtagactaaaccaagtattgtaaaataaacagcgataacagtgatagtttttaactctatggtcattgtatcactctggaaaatgtggagtagctgtaataaatctactcctgtattatgctttacagtgcaggtcttagnnnnnnnnnnnnnnnnnnnnnnnngaaatggcatctcgaacaaagtccaccaatccctttacaaaagaatgaactgctcctctgtgtgtacttcatagaaggtggaatcggacagaggcaggttagtgacagttattcctgaaatacaggagcagagtactgtctgttgtggtttcccggattccgcgcctagctcagccaattaagcatgagacataggccattgagccacttagtagttatgcgagtggatagattggtatgtagagggaaagaggtctgctgtaaagaacaacacttgtttgtctgtggggaaagaaaagcagaatacttgagatgaaagttggcatacaaataggatactatcgccagtagttatattacaaacattatcggcctttctagtgtgaatgaacattagacacattattgtcattcctagtttaaagttaaggttgcgtggttggatttttccactatctttttctaatttttctaccatttggagaccgtaggcatttgggcctgtcaccccttggatgggttcctagtttgtttacattttcctgaaccctcctgagcgcccgttcttggtctaatccccagtcgtgatgattccacacttccctcagcccgcatgttgtcttgcctcattcatgagctgggtcagcgtttcgtctctttaactgacatgttccccagtgctgtttgaactgttgagtttccgttgctggctgaatgcgtttt

SEQ ID NO: 187234 - DNA, 702 bp, Homo Sapiens
  misc_feature (188)..(197): n is a, c, g, or t
  misc_feature (265)..(275): n is a, c, g, or t
  misc_feature (429)..(455): n is a, c, g, or t
ctttgtacaaaaaagttggcattaaagctatattttgaatccatgaaattgctatgctaaacagcctttacatgtatggtctggttaaagttcctttgttccttttgttttaataaaatgtgtcactgattttttagctcaaaatcatcactgttaatttccagtcaccccaaatatggttaaaagannnnnnnnnnaatcatgaagagaaaattagtagcatttctttctctccccattatttattggttttcctcactaatcnnnnnnnnnnnagtccaaaagccaaaaatatttatcttggttttacattttaatttccattcttaattgtaatttttttctttaaataaggaaaccaatataatctcatgtataaaaacttaaatattttacaagttacatatagcatcattctaaaataagaannnnnnnnnnnnnnnnnnnnnnnnnnncttatgtctcttgttgagttttatattttcagtggttatttttgcttgtgttagatcattattaaaatatatccaatgtccctttgatacttgtgctctgctgagaatgtacggtttgcattaaacatcccaggtctcatccttcaggaattttgcagttcaatgagaagagggagacaaatataaagatgaggacagaagcatctctacagatgaaaattacataaataaaacattctccatcaac

SEQ ID NO: 187235 - DNA, 1409 bp, Homo Sapiens
  misc_feature (329)..(343): n is a, c, g, or t
  misc_feature (399)..(419): n is a, c, g, or t
  misc_feature (430)..(698): n is a, c, g, or t
  misc_feature (1174)..(1184): n is a, c, g, or t
  misc_feature (1252)..(1262): n is a, c, g, or t
ctttgtacaaaaaagttggatccatatgaaccatgtgatggtgcccatgctgttgttatttgcactgagtgggacatgtttaaggaattggattatgaacgcattcataaaaaaatgctaaagccagcctttatcttcgatggacggcgtgtcctggatgggctccacaatgaactacaaaccattggcttccagattgaaacaattggcaaaaaggtgtcttcaaagagaattccatatgctccttctggtgaaattccgaagtttagtcttcaagatccacctaacaagaaacctaaagtgtagagattgccatttttatttgtgannnnnnnnnnnnnnnggtacttcaggatagcaaatatctatctgctattaaatggtaaatgaaccaagtgnnnnnnnnnnnnnnnnnnnnngaaacagagtnnnnnnnnnnnnnnnnnnnnnnnnnnnnnnnnnnnnnnnnnnnnnnnnnnnnnnnnnnnnnnnnnnnnnnnnnnnnnnnnnnnnnnnnnnnnnnnnnnnnnnnnnnnnnnnnnnnnnnnnnnnnnnnnnnnnnnnnnnnnnnnnnnnnnnnnnnnnnnnnnnnnnnnnnnnnnnnnnnnnnnnnnnnnnnnnnnnnnnnnnnnnnnnnnnnnnnnnnnnnnnnnnnnnnnnnnnnnnnnnnnnnnnnnnnnnnnnnnnnnnnnnnnnnnccatgaaccaagtgtttttaaggaaacaaaactatttttttaatcatcagatttatactagctatatggatattagcatatctggtaattatgaatctagaatttttttacatatttttataatactgttagctcagttattggatgagtgaaagataatcatgttggttttaatagtgtcaatttttgtaaaataaaaattaaacttcaaactctttactttataaattgtccataggccacactttaatatcacattataaagggaaggacagtcttcattcctcctggttattggtttgtttgtcattaaagatatattttgaatccatgaaattgctatgctaaacagcctttacatgtatggtctggttaaagttcctttgttccttttgttttaataaaatgtgtcactgattttttagctcaaaatcatcactgttaatttccagtcaccccaaatatggttaaaagannnnnnnnnnnaatcatgaagagaaaattagtagcatttctttctctccccattatttattggttttcctcactaatcnnnnnnnnnnnagtccaaaagccaaaaatatttatcttggttttacattttaatttccatttcttaattgtaattcttttctttaaataaggaaacaaatataatctcatgtataaaaacttaaatatttacaagttacatatagcatcattctaaaa

SEQ ID NO: 187236 - DNA, 2225 bp, Homo Sapiens
  misc_feature (876)..(898): n is a, c, g, or t
ttggcactgtctgaaaagaaacaaacaaaaaaccttaccatacacatcaagtaaaaccatttcagtataccttaaaaggaaaaagttcattaagtcacttagcagactacaaatttagtgcagacctggatatagatgaggaataccagcatttttttgttggtgggagggggaaggtgttttatttttaacaattatgtactaactggtattgtcctctcccttggctgtccctgccacagttccagagttatcagtaggctagatagaaggtgacctctcctcataaggacttggacaactcagattatctgaagacacaaacctgacaggagggagaagaaaaaacaaaacacttgaaccaagaaactcaaatgtaatcctacgatcaaagcaactggtcaacacttccatcagaagtgaagataggaagctcatcagatagaacatcagcccatgagatgtttgcaacaaatcttttgttgcaagcagtgtgtcgcttctgcacaatcagagactgtctcgatctctccactcaccgtggaagttgccttgtgcctaaactgaattgacaaatgcattgtaactacaaattttatttattgttatgaaactgtaaggtctacatataaagggaaaaagttaatgtggaaagctgatctacactcagctgatgccagcatacattaaagcggttcacgtgcagagaacaaagcagtgacaaccattggcccttagcattcccggcatacctattagtgtcttaaaaaggaagggaaaagtcttttgttgccctctcctatcctcttgccatatgaatagcgttttccatgaaataggaaaatattacttggtatagcatttctcttgctctcnnnnnnnnnnnnnnnnnnnnnnnctctttgtgggtgttatatttgatctctaaatctgaacagtttatggtcacagtccagcctcctccgtgcagccctgtgtgctttgcacatttaccttacagtggtaagcagagaccatctgtgaccatagcctagctagcattttaaaaggggaaattttgttctctaggttttcccccaaataaacattgctttatttctaataataaccaagacttttcaagcttctagatctcataggaaagcttgtaatagcaaaattgtaaattacaagggaagaatctactttttagaaatcgctttgttttccaagcagtaagtactacatacagtacttgtaaagtgttagctgtaagtaagcacaaaatacatttaaaatacaaagacgattttttcaggctgtgattatggtgaacataacaaaacccagtagtcaccaaggcaggtagtgtgataaatgaacacaccactctgaggctaattacctaatggaatacaagagcaatggtcacccgtatttccttatcctagcctttatttctctgtcatttggatggctggtcaatggggaagaattgagtgggtgatttaatcaactgcaaaccatctgcccctgtcccaaaatgatgagccagattagcattaaaccagtacttgtcagtccatcttaatactgttcattaaggcactctctgtctctaatccttaggagttgttttaaaagacataatcactttgaacttccatgaaacctgtcttccaccacaacaaccctgggagagaaaaacatgctaaaggaggtatcttggcttaataattccttatagccaatatcaacagtggcaatcagcacacagaggaaaggacccaaatcactatgtagcttaaagatttctgttaatttgaaagaacaaaaacaagacagaacttctggtactctaatcaggatgattcctaacaagtcagtcatttgtgaacttagtggactttttggttactttaatttgcatatattctccagttacatcggactctatctggggccttgttcttcatttcagtgttaatcagctaaacagaagttgttgcttatgatgtgtgagtgaacatatgccactgcctggcctttttttcttcagagcttgttgtctttttcgctatattagactttgcagtatgcccagaagctttccttcataaatagaaagaaaaaaacatttgggcttatttttcactgtagctagtcttttatacaataatcttgtaagaaaatttcttgaattctaaatattactctttctagatttttgaaaatcaaaaagtttt

SEQ ID NO: 187237 - DNA, 488 bp, Homo Sapiens
ttggctatacacatgtgtgtaatggagaggtaaatagatgaagatacatagctataaatatatttgcataagcatagaagtaatctagagataaagcatcagtctttaaagaatagttacctgtaaagtagaattagacagaaggaggatagatttttacttctgactttaataccccaagtgactaaaaattgtatagtattttatatttttcttaatttttcaaataaaagatgactggtttttaaacataaaaactagaaaatagcatatatttatgaagtaaaggtacttagcatgctagtgtttagaataacagatttgtttataacaaatatttttaactagttttaaaaaatatattctggattttaaaaactgctatttaaaggcacattattaagaatggaaaaatattttttgaaccttaatctagagtcctataaccttcaaagatatttcaatattatatccaaatatactaaata

SEQ ID NO: 187238 - DNA, 1542 bp, Homo Sapiens
ttggattttccctctttctgggatatttactacagtttgagaatccagctttgttggtatctcctttattaagtttagtagcagccttaatgcttgctaagtgccttcagctgaatgtgaagaaaggaagttttgtagctaaaataataaaagtgattaatttttacttggtgtgtactctgacaataacattgaatattataatgaagatgtttgtcccacacaaagaaaatgggcacatgctgaaattccttgaagtaaaatttggactaaatatgaccaagaattttacaatgaattggctcctctgtcaagaatccctgcaggcaccatctcaagatttttttctgcgattgacacagtcttctttattacctttctacattctagtgttaattatttgttttctttctatgttgcaagttatttttaggaggattaatggtaagtccctgaaggaaactgttactcttgaagatggacgaattggagaaagaccagaaataatttatcatgtaattcacactattttattgggttctcttgcaatggttatagaaggcttgaagtacatctggattccttatgtgtgcatgttagcagcatttggtgtatgttctcccgaactttggatgacacttttcaagtggcttcgattaagaactgtacacccaatattgttggctcttattctgagcatggccgtgcctactataataggtctcagcttatggaaagagttttttcccagattaatgacagaattaatggaactacaggaattctatgacccagatacagtggaacttatgacctggataaaaaggcaagctccagttgcagctgtgtttgcagggagtccacagttaatgggtgcgattaaattatgcactggatggatggtgacaagtttgcctctttacaatgatgatgatcttctcaagagaaatgaaaatatctaccaaatctattcaaagcgatctgctgaggatatttataaaatactgacatcttacaaagctaattacctaattgtagaggatgctatctgcaatgaggtgggacccatgagaggctgtagggttaaagatttattagacattgcaaatggccacatggtttgtgaagaaggtgacaagctaacctactcaaaatatgggcgattttgtcatgaggtcaaaattaactattctccatatgtgaattatttcactagagtatactggaacagatcctactttgtatataaaatcaacactgtgatatccttccagtcttgaaaaataacagagccttcatttcaaagactacctgaagtaaaatgcagttttcttctacctactcggtgtcttttgcagatcagagtatggacatttgaaatattgctgcttctttcccccttctgctgttaactggatccagagttctgtgggaaatagaagatcaagcattactgtcctttgattaaatgtgatatctaccactctgcaatattccagacaggtgtcttccttaccgttacatggtctttaacacttttac

SEQ ID NO: 187239 - DNA, 1565 bp, Homo Sapiens
ttggattgaaatggcatccatggagatggcaaactcatatggccactctctgccaggtgctcctggaagtggctatgtgaaccctgcttatgtaggtgaaagtggtcctgtccatgcttatggaaacccaccattgtctgaatgtgattggcacaagtcaccccaaggacagaagttaatcacatcccttatacccatgacatccagagacagaattaaagccatcaggaaccagccaaggaccatggaagagaaaaggaaccttaggaaaatagttgacaaagaaaaaagcaaacagacccatcgtatccttcagctcaattgctgtattcagtgtctgaactccatttcccgggcttatcggagatccaagaacagcctgtcggaaattctgaattccatcagcctgtggcagaagacgctgaagatcattggaggcaagtttggaaccagcgtcctctcctatttcaactttctgagatggcttttgaagttcaacattttctcattcatcctgaacttcagcttcatcataatccctcagtttaccgtggccaaaaagaacaccctccagttcactgggctggagtttttcactggggtgggttattttagggacacagtgatgtactatggcttttacaccaattccaccatccagcacgggaacagcggggcatcctacaacatgcagctggcctacatcttcacaatcggagcatgcttgaccacctgcttcttcagtttgctgttcagcatggcaagtatttccggaacaacttcattaatccccacatttactccggagggatcaccaagctgatcttttgctgggacttcactgtcactcatgaaaaagctgtgaagctaaaacagaagaatcttagcactgagataaggttcctgaagacacacagtaaccctggggcggtgctgttactgcctttcgttgtgtcctgcattaatctggccgtgccatgcatctactccatgttcaggcttgtggagaggtacgagatgccacggcaagaagtctacgttctcctgatccgaaacatctttttgaaaatatcaatcattggcattctttgttactattggctcaacaccgtggccctgtctggtgaagagtgttgggaaaccctcattggccaggacatctaccggctccttctgatggattttgtgttctctttagtcaattccttcctgggggagtttctgaggagaatcattgggatgcaactgatcacaagtcttggccttcaggagtttgacattgccaggaacgttctagaactgatctatgcacaaactctggtgtggattggcatcttcttctgccccctgctgccctttatccaaatgattatgcttttcatcatgttctactccaaaaatatcagcctgatgatgaatttccagcctccgagcaaagcctggcgggcctcacagatgatgactttcttcatcttcttgctctttttcccatccttcaccgaggtcttgtgcaacctggtcatcaccatctggagattgaagccttcagctgactgtggcccttt

SEQ ID NO: 187240 - DNA, 866 bp, Homo Sapiens
ttgtacaaaaaagttggaaatgattacatttaatgagcgagtcactcgttctactccaaaaatatcagcctgatgatgaatttccagcctccgagcaaagcctggcgggcctcacagatgatgactttcttcatcttcttgctctttttcccatccttcaccggggtcttgtgcaccctggccatcaccatctggagattgaagccttcagctgactgtggcccttttcgaggtctgcctctcttcattcactccatctacagctggatcgacaccctaagtacacggcctggctacctgtgggttgtttggatctatcggaacctcattggaagtgtgcacttctttttcatcctcaccctcattgtgctaatcatcacctatctttactggcagatcacagagggaaggaagattatgataaggctgctccatgagcagatcattaatgagggcaaagataaaatgttcctgatagaaaaattgatcaagctgcaggatatggagaagaaagcaaaccccagctcacttgttctggaaaggagagaggtggagcaacaaggctttttgcatttgggggaacatgatggcagtcttgacttgcgatctagaagatcagttcaagaaggtaatccaagggcctgatgactcttttggtaaccagacaccaatcaaataaggggaggagatgaaaatggaatgatttcttccatgccacctgtgcctttaggaactgcccagaagaaaatccaaggctttagccaggagcggaaactgactaccatgtaattatcaaagtaaaattgggcattccatgctattttttactacctggattgctgatttttcaagacaaaatacttggg

SEQ ID NO: 187241 - DNA, 1682 bp, Homo Sapiens
tctcggactcttcggccccgtcctgctcagcctgggccttgtctgggctcttggggttcccagagtcctcgaacgtgagccccggcccgggctcctgggcgaggtccccgtcggtggccttgggccagggtgccttgggctcgctgctgccggccgcggggggatagctgcccaggctcaggaggctcttgggctcctgccagccccccgcccccggatcctcccggagcagcagggcctctttagccttcttgcttttgggtgacgtgacaccctcgtggtccagtttgacaagcagctcggcctcctcccccggcctccgagggcccttggcacccgactcctcggctgcccgcgccttcttgggcttggggcgtgtggcaggcatggtgatgaggggtgctggggccagggaggtggcaggagctggcagctctgcaaatggctcgggtgctgggcagctggtgaaggcgggtggtgcgggactgggctgcggcggtgccgggcgcgccttgggggccttggctcgcttgtccacaggctctggggggctcttcttggaacctggggtgctgctcggctccagggctaagggggtactggggacctcgtctgttgggttcccctcctccagggtagcggctctgtcacccttggccttggcgctgggtttccgcccacgcccacgggccttggctcctggctcctccgacccagccgtgccaccatctttgccctccccagtgtctttgctggtcttccggctgcggcgcttggcacttggcaccagaagggccggggacggctcagcacactgtatcttatagtcagggggcaggaggcggatatgtgagagggggatcctgcccgtgtctccgtcgtcaaactccacggtgatcaagtccccatcgtcctccaggtccagtaaccctcggaccacagtgcctgggtagagacagcggtactgctggctccagtaggctgcaatcctggtcccttgtggcaagaagcgagtggaggctggcctcacatcgatgatcgcctcctgcagcaactgctccagacagtagatgtggggccggttgccccgctcaccctccaccaccacgcggtatatgtctggcgagtgcacggtctgcacgtgcccggcgtacagcagcttgtcatccatggggatgagcacacgcaggccgtccttcagctcatccttgtcgatgatgcaggagcgaggggctgcaggggttggatcgtgaggcgaggctggagccgggggcgtctgcgacacctctccctcctcccgttacccccaagtcatccccttggaatggaggccctggtaccgggtgggcctgtggggctgagacgtgtgcacttcttcgtctgcctgtgtgtgtacccgtgcagacctgtgtgtaccagtgagcatgtacagggtgccgtggccagcccctctcctcctagccccctcccctgcctggccccagatgtctgcaaagaccccaggtgggtgtgaacccagagatgaaagcctgcacctgctgcctcttcccacctcaagaccagcagcctctgggcctggcatgaagctctgggtgccagccatcaccggacactcacagcgacgatcctccatcatgatgtctgccccctcttactgctgcccacagccaaacttctaggac

SEQ ID NO: 187242 - DNA, 1157 bp, Homo Sapiens
actttgtacaaaaaagttggctttaataccgaccagggaccatgtaactgaggtgagggttgtagtagatgcttccagtgtcagtatgcctgttaattttaagagcttccctttcttgcagagaacaagtctgcccagattccatgctttctataactggaggacctggcaaacctgccgcatgctgcacacatctacctacgtacacatatacaatagtattgatgattctgaacaataacagggtaaaacagttggtttgccattgttaaaaactgatttacagtaacttacaacaactgtacttttgttggattagcaaatcatgtgtttaaacaaatcccatatgttgggcaacagttcaaataagcacggagaagtgttgcccaaacttggttctctgactcttatgtatttgtaaggctgggcttcaaaatcaaaacaaaaaccccaaaaacagcaggcaaatgctttttaactctgacaccgttgccataaatccctgatactcaaagtctaacaagaaagacatggaaaattagcagcccattttcagaaagatcaaaatgatctagggttctaattgcttttgcatcctattcttacaaagtgatgtcccaacagggaacagtaggagctggagtgggatctccaagtcccagtttgagtgtgggatgtgcttccagcagtgccttccctttatgaaagacatcacatggcatccagggccaggcaggcagcttgaggtgcctttacaagaaaaccgagctggggctgggagaggacagttattgacactgatgtgcaatgaagtgacaagatgagagcagaatcgtaagagctttgaatttgaagtgagttttttccccccataagttatttattccttttttctgtgtaaatatatttattttactgtggagcgctaacatctggatcgtaacatgtgcagaatgtatggtaggaatgtattctcttgtaggaatgtaaatctgtattaaaagggggtccaagccaggcccccaggtcttctcattgtatgcacagtccgcattcatttttactcttctctaatatgggtctatttgaaatatgcaaaaggtatgaggaatgttttaatacctccaaatttttaagaaagcatcaaagggttgata

SEQ ID NO: 187243 - DNA, 1719 bp, Homo Sapiens
  misc_feature (896)..(912): n is a, c, g, or t
  misc_feature (1225)..(1242): n is a, c, g, or t
actttgtacaaaaaagttgggtaacttacatatcaactgtacttttgttggattagcaaatcatgtgtttaaacaaatcccatatgttgggcaacagttcaaataagcacggagaagtgttgcccaaacttggttctctgactcttatgtatttgtaaggctgggcttcaaaatcaaaacaaaaaccccaaaaacagcaggcaaatgctttttaactctgacaccgttgccataaatccctgatactcaaagtctaacaagaaagacatggaaaattagcagcccattttcagaaagatcaaaatgatctagggttctaattgcttttgcatcctattcttacaaagtgatgtcccaacagggaacagtaggagctggagtgggatctccaagtcccagtttgagtgtgggatgtgcttccagcagtgccttccctttatgaaagacatcacatggcatccagggccaggcaggcagcttgaggtgcctttacgagaaaaccgagctggggctgggagaggacagttattgacactgatgtgcaatgaagtgacaagatgagagcagaatcgtaagagctttgaatttgaagtgagttttttccccccataagttatttattccttttttctgtgtaaatatatttattttactgtggagcgctaacatctggatcgtaacatgtgcagaatgtatggtaggaatgtattctcttgtaggaatgtaaatctgtattaaaagggggtccaagccaggcccccaggtcttctcattgtatgcacagtccgcattcatttttactcttctctaatatgggtctatttgaaatatgcaaaaggtatgaggaatgttttaatacctccaaatttttaagaaaagcatcaaagggttgatannnnnnnnnnnnnnnnnagtagcactttctctggatgacagaaggggcaaccacatgggcacccttgttcataccaaagggtgagcagtggccagagcctcctctgcacctctcgagtgtctttaccaattgagctttttatcgccatagccccttggagtgccccagctgccctgaggtcaatcaaggaaaatttcttaatgaaataagctccaaagagccaaagtatcaacttacagatcgtttttaaagcttaaatttatgaaccacctttgtggtaaacaatgaattatgaataccgcagggcagccttcttaaatgacaaatgtnnnnnnnnnnnnnnnnnngactctacttcgtgcagcaattgctactctatacgaattgtcttaatttgaaaaccttgctgttacaaattggacctttatacattttctgaaaacaatgaaaagagtatatttaaccttttctggctgtaaatggttaccttcctgtaactgccccgcacctggaggcatggagttgtgtgcatcctgcttatgtacaattgttttcagtgtttctaaaaatgagtctgaatggttcttgaaaattagccaggatcaaatgctattgcagacaaagccaataaaaagttggacttcttttggggataacaagttttggaagagaaatgcaggccatatgtgcgcatgaccgaaattttgaaaaaagatgtacatagtgacatgtttggtgcatggtttttgaggagggcttttgtcaaaaaggaggtataacctttcccccacagacctgagagctgtgccttttctatgcaaaat

SEQ ID NO: 187244 - DNA, 2010 bp, Homo Sapiens
  misc_feature (145)..(165): n is a, c, g, or t
  misc_feature (1697)..(1709): n is a, c, g, or t
  misc_feature (1875)..(1899): n is a, c, g, or t
ttgggaaatatgtcaagctccaggtaaagacattgacatacctcccaagcttataggccatgagaattagtctacacaggtagaatggccttacatcactgttcagacaccttggcctcattgtataggaaaatcttaactctgnnnnnnnnnnnnnnnnnnnnnaattcttgtcagtcaaagaaatagcttccctggtttaatactgcttttcttcatagactgaaacaaataatacagctttccttttagtccttgttcagccacacaacacaaaccagtatggcctttggcattttactgcaagctttccattcgattattaatgtttccggtgcccatgatcaagcatggagaagacctataattaattgacttttcctttcctttaggtgcagtcgctttcaatctgaaatcaaacgcttgaaaatctcatccccggtgcgtgtttgtcagaactgttattataacttacagcatgagagaggttcagaagatgggcctcgaaattgttgaagattcaacaagctgagtggagaccatggtctgtagaccccttcccgattctcctgtcccagcttggaaggcattgaaaacagtctccgtttacacatctcttcataccacgtgtttgaagtgttaaaattcaaagggatcattgaataaaacgggtgtagagtacaggaatggggcagacgcgattcaggtgaacagcacaagaagaatatgaggtggttcctaggagcaacactttcgacctccagttctccctgatgacagtagctgtctccaagagaaaaatcctcacttattaactctcttttcttgcatctcatttttatagagctactcatccttatttggaaaaaccaacaacaaaaaaggcttttagaaaatggttgtaaatctgacttctttgcaagtaactatgtatattgtaaatagatataaaaggccttttttctaaataaggacttaactgcctgtaacatgaaacttcaaactaaaccactaactcaatgaactacttatggtttgtctgacatccctcacttaccaattaattataaatatgtttttttaaatccccaaagacattatctgtggtctttttttcctttcaagctcagcctgtgtgcctgatgtcatttctttcaagttgcccacagtatctccacttaaactaggctagtaaccaaaataatgtggaccttctttaggaaacagtgtgggagaataggagtccagccgtaagataaactggaaatatttgggcgtcttgtacctggctacgcaccacctcagtgttgttcctacataaacagggccccttttaaacttgtatgtggactgctgtttggtcaaagaataccttcttagcattgcagaaaggtggtcagatgaccagtgtagtgcaggaaacagccctgtctcaactaatggaaatatatttgcatgtaacccaaaattagcttatcttgcatagaacataataagtatgtgtctttggtgacactaatgttctactatagcttattttcaaacaaggggtaaaaaaaggaaagaaagaagtgtacagaattaacatataaactttgttgtaaaactgaatcatgtcagaactgcttaaaattaacctttaccatttaatgtcatctacctgaaaacagtgagatttatactgtatcaatgtctannnnnnnnnnnnngctatgaatataattacagtattttaatatttagttatttaatttgttctactagttggatacagaacacacaaatccagggggattaaagctggaaggggctaagagattagtttacagagaaaaggcttggtggtgggatttttttaaatgtgtgttatgtacnnnnnnnnnnnnnnnnnnnnnnnnntaaaaatgaaacaattaatctagattttaacattttcagaaacttagtgataacattatgaacaattctaaaagccctgtgatttgaaaaatatagaatcattaatggccc

SEQ ID NO: 187245 - DNA, 1406 bp, Homo Sapiens
actttgtacaaaaaagttggagataggccttcacaccttcacaggtgcgaaaggaaaggccttcacaccctcacagaggcatcatgcaaaggacagcggctttggcttttccaattttccatctttaggccctggtgagaggcacacttatgcactaaaatgcacatatatgcacatgcattcaaaaataggcatttggtacaatggtgatcttgtacctgatgggctgaaaccagcttaagaacaaatttgttcttcctgatatgataactaggtctccaagagaaaatagaaaggctgctttagtgccttacgcttactaaatttaaatctttatttacctgggtttgagcctacagtctatttatgattacatatcaaaattgattaaaacacttccatttctaaaagttcaaatatacttgttaataaaaggattatcggcattaatactttaatttaaagaaaagttgtgttctgttttcctttctgtgtcttactccccccacactctccctcccccatcaccatcttcaattctaataaataatgctgatgttcaacagttgcagaaattgtgctattatgtaactgtgggccttgcccctgtctggccctctagatgatttgtagcagtgttattctacactttttaaaagaagcgtcctccttttgtccatgaatcatgtttaccccatacccagtggcagaggtgttctttaaagacttgaatatatgaatgtgtgtgtgtagttacttaaaggttattcctctttgtaataggaaactatatgggatgaacacttttaaactttccgacacaacttccattactaactttctaacagaacttccataactagaaggtggaaaccaaaaccctcatggtagtatttcctctggcagctggtgctgtgggcaactgttttgttcaatcgggtttcttttctttttgcctctaatgcagaaatcaacagaatcactcacacatacaagtacactcacatacataaactaattatttctctggatatctttctgtgttccatgtaaatttatttaccaacatctattgtcaacatgtacatctaccttagtatggtctgcattctttttctgagagtacctcatagggctcctgcctgatctttgtagtttgttcattcatccatccacctgttcatttgttcatccatgtattctaacatttctatgtagtgtgcaactctaatgtcatgcttttgaagaagagaatagctgcccatagcagccatccgtctggataatagcaaaacactctagataagttattttgcactttcttatgtataaagttggtagaaacttatttttgctttgtatcatttaaatacattttgttttggtaaaatgaactgtgtataaaa

SEQ ID NO: 187246 - DNA, 1549 bp, Homo Sapiens
  misc_feature (184)..(194): n is a, c, g, or t
gccaactttgtacaaaaaagttggttttgttgtccatactcttcctatgaagagggaatgcgtatgaattaaggctactactgtcacagaagatcatagtctttgatgctacctcacaacacaaacaggtagttcgttgggggcaaatgaattagccaactgttaactggaagcttttgataannnnnnnnnnnagaacaatttggaacattaaaatttactgaatcgtatatattcatctgagataaaaatataaaaagaattatggaccctggatggcaatttgcttgatagcatctgatttgcagactcataatttgatttttaattaaatatataggttatgatgaagtgaatagacatatcagtgaacagttaactatattaaatttttatcatttactttttttaagattcagacctcagttatataaatttcagtttaatatcaaccaaaaaattaaaattttaatctaacccttatgtgtataaattggtgtcccataccagcttttaatggtggacctatagaatccagtacttttaatggtgggaatttacagtagaagcatcctttgctgagttatacattcctttatcaatctcttttgatacaacatttaaaacaagtagcttcaagaaaccactggtgttttgaggatagtatttctaaatagcattcaggaacagagtattattgcacagatctgaagatcaaaaaaaagctcaaggaaatacagatcggaagtgctgatgagttatatttattgaaaacccaacttttaaggaagtgctaagatcagtcacccatgtgaataagaagccaggaaaggaaagatggggaagcccagatcaccaggcttctattaaggaggaaagcaacagaggaaacagtgaaggggaacagaagggggtagcaaagtgttacagaaaagcggactggatagacaaaactgcagaaggtgtatgttggggagaactgaaagggaaaacaaaatacttgacatagtcttaagtagaagaaggcagttagagaaaacaaagtatctactggccttgtcaacatacagacttcaaaataccccttatgagaatccaaagaatgatgtgtgtaagggaagattttatttgcccttccggaagaaatcagtatctatgcaaatcttgaaagacgaaatcaaagcccattaatgattcagaatcagtgcttgacctcctgtattctgaatggtgaactctggaagcagggattgtgtctggctctttttagagctggaagtgtagtggctttcattaaatacttgctgtaaagtctttctaagaccaattattatcttagcatgtttcagtatcttctctatcataggccctaagttcattgggggaaaaaaaataagaagattcaacagaatcagcatttgaagtgtaccattggtagttgtttatgaaattaccagatattcataaatgtgacaaatgaacagcaggattatgaattatcaaaggaaaaagtatttgctgaggtgaaaaaatctgatgtttgaggaag

SEQ ID NO: 187247 - DNA, 1610 bp, Homo Sapiens
  misc_feature (1138)..(1148): n is a, c, g, or t
actttgtacaaaaaagttggctcattctagagcagtagttatttttaaattatattctaaagtatttctttattgtaacaaaattatgttgttttcacaggccttgcagttgaaattcagccataaagaaaatgaagtgatttaaaattgcaaatttttgttacttcagtagttgttaatatataattttattaaaaaggtttattgaaaatcgtgaggcactttattgtatggatgcttttaaacttagtagacaaaggtttctttttttcttaatcgagaaactttcaatattttacagtagtttgaattactgctaactctaacatactgcttgttttattatctttaaaaattgaatgtgcatatccttgatatgaagaaaatctcatcaggcaattgaccccaaatatgtcagggtatctaaatttttgtcacttgtagtaatttacattttttttcctgtccttagatatattattgtgtattgaaggaagtattcatgattaaattattcacagttacttgatgaaagtattcgtcagagttttcatggctggtgttattttaaattttaagcgtatgttggattgtgaagataggagaataggaacaagacttaaaaagcttggaattggggtctcatgatgcttgagcttttgtacccattttactgtttactaaatcatttattatatttaataattgtcagaatattaagataacttgatttttagatatctaactttatgttttgtttgtttgtataggaaatgtttttctaaaacatggttcagaactgcggattattcctagagatcgtgttggaagttgttaatatctgctacttggaacatacgattgcctttcagaataaatattggtattttttgttgttgtaaaattgaaatcaggcatttaacatactatgaaaacaccaggagtcaatgattaatgaaaggtgactcatctgtccctttttgttgtccatactcttcctatgaagagggaatgcgtatgaattaaggctactactgtcacagaagatcatagtctttgatgctacctcacaacacaaacaggtagttcgttgggggcaaatgaattagccaactgttaactggaagcttttgataannnnnnnnnnnagaacaatttggaacattaaaatttactgaatcgtatatattcatctgagataaaaatataaaaagaattatggaccctggatggcaatttgcttgatagcatctgatttgcagactcataatttgatttttaattaaatatataggttatgatgaagtgaatagacatatcagtgaacagttaactatattaaatttttatcatttactttttttaagattcagacctcagttatataaatttcagtttaatatcaaccaaaaaattaaaattttaatctaacccttatgtgtataaattggtgtcccataccagcttttaatggtggacctatagaatccagtacttttaatggtgggaatttacagtagaagcatcctttgctgagttatacattcctttatcaatctcttttgatacaacatttaaaacaagtagcttcaagaaaccactggtgtttt

SEQ ID NO: 187248 - DNA, 1390 bp, Homo Sapiens
  misc_feature (284)..(294): n is a, c, g, or t
  misc_feature (817)..(817): n is a, c, g, or t
ttggcgattgcctttcagaataaatattggtattttttgttgttgtaaaattgaaatcaggcatttaacatactatgaaaacaccaggagtcaatgattaatgaaaggtgactcatctgtccctttttgttgtccatactcttcctatgaagagggaatgcgtatgaattaaggctactactgtcacagaagatcatagtctttgatgctacctcacaacacaaacaggtagttcgttgggggcaaatgaattagccaactgttaactggaagcttttgataannnnnnnnnnnagaacaatttggaacattaaaatttactgaatcgtatatattcatctgagataaaaatataaaaagaattatggaccctggatggcaatttgcttgatagcatctgatttgcagactcataatttgatttttaattaaatatataggttatgatgaagtgaatagacatatcagtgaacagttaactatattaaatttttatcatttactttttttaagattcagacctcagttatataaatttcagtttaatatcaaccaaaaaattaaaattttaatctaacccttatgtgtataaattggtgtcccataccagcttttaatggtggacctatagaatccagtacttttaatggtgggaatttacagtagaagcatcctttgctgagttatacattcctttatcaatctcttttgatacaacatttaaaacaagtagcttcaagaaaccactggtgttttgaggatagtatttctaaatagcattcaggaacagagtattattgcacagatctgaagatcnaaaaaaaagctcaaggaaatacagatcggaagtgctgatgagttatatttattgaaaacccaacttttaaggaagtgctaagatcagtcacccatgtgaataagaagccaggaaaggaaagatggggaagcccagatcaccaggcttctattaaggaggaaagcaacagaggaaacagtgaaggggaacagaagggggtagcaaagtgttacagaaaagcggactggatagacaaaactgcagaagtgtatgttggggagaactgaaagggaaaacaaaatacttgacatagtcttaagtagaagaaggcagttagagaaaacaaagtatctactggccttgtcaacatacagacttcaaaataccccttatgagaatccaaagaatgatgtgtgtaagggaagattttatttgcccttccggaagaaatcagtatctatgcaaatcttgaaagacgaaatcaaagcccattaatgattcagaatcagtgcttgacctcctgtattctgaatggtgaactctggaagcaggattgtgtctggctctttttagagctggaagtgtagtggcttt

SEQ ID NO: 187249 - DNA, 1133 bp, Homo Sapiens
  misc_feature (827)..(837): n is a, c, g, or t
actttgtacaaaaaagttggtgcttgttttcctatctttaaaaattgaatgtgcatatccttgatatgaagaaaatctcatcaggcaattgaccccaaatatgtcagggtatctaaatttttgtcacttgtagtaatttacattttttttcctgtccttagatatattattgtgtattgaaggaagtattcatgattaaattattcacagttacttgatgaaagtattcgtcagagttttcatggctggtgttattttaaattttaagcgtatgttggattgtgaagataggagaataggaacaagacttaaaaagcttggaattggggtctcatgatgcttgagcttttgtacccattttactgtttactaaatcatttattatatttaataattgtcagaatattaagataacttgatttttagatatctaactttatgttttgtttgtttgtataggaaatgtttttctaaaacatggttcagaactgcggattattcctagagatcgtgttggaagttgttaatatctgctacttggaacatacgattgcctttcagaataaatattggtattttttgttgttgtaaaattgaaatcaggcatttaacatactatgaaaacaccaggagtcaatgattaatgaaaggtgactcatctgtccctttttgttgtccatactcttcctatgaagagggaatgcgtatgaattaaggctactactgtcacagaagatcatagtctttgatgctacctcacaacacaaacaggtagttcgttgggggcaaatgaattagccaactgttaactggaagcttttgataannnnnnnnnnnagaacaatttggaacattaaaatttactgaatcgtatatattcatctgagataaaaatataaaaagaattatggaccctggatggcaatttgcttgatagcatctgatttgcagactcataatttgatttttaattaaatatataggttatgatgaagtgaatagacatatcagtgaacagttaactatattaaatttttatcatttactttttttaagattcagacctcaattatataaatttcagttttaatatgcaaccaaaaaataaaattttaatctaacccttatgtgta

SEQ ID NO: 187250 - DNA, 1043 bp, Homo Sapiens
ttggacaggctggatttggacaaaaagcaaatctagacatgcatgtttcagggttcagtagtatacttcatgtttcatacagataattcacattcaaaattacattttctctttgaactagatggtattccttattcacttacattacaaatctaagaccatgtgataagcatgactggagaggtttaatttttataaacaaaaatagctataaagtacaaagctgctgctgcatgcaaccttattgcaatcagtatatcattcctgtggcaatttctgtcaccttatattgtgaataaaatttttctatagaaattaaatgatttaaaaactcacctatatgaaacatttaatgcttttcagcctgctttctggctgattttgttatttgatgtgctaatttgggcaacttaatttacattctggcagtcggtgtagataactaaaagcccagttaagtattttataatttcaggctactgaggccatgcttgggatgttgtttgaaagaaagaaaaaatacacttgacatatttcacatttctgtaccttcatctttacttccaagtaaacccgtggatgatttgatgagggataaatgaacctatttcttttacacacataccaaggacatgcttgtggctaaagtgagttgataatgttgtgcaaaggatagttgtcaccaactcatttctttatggtccataatgaaataaaaattttgtatactgttaattctgtaaacagatgcatgttcaaaagatctatgatggtcttgtaatcttaatctaatatattttagatattttaattttttccctcttggggaacacatttagtatagtgtagaaaatacttccatgacattttcatataaggttatataacttttcatacataaacatgaaatttgttgtagaaaattctttaaaccaaacatttaaatctaggacttcaatttaatttgttccttgaatctatttttatgtggcccttaaaaaatatccaaaaaacccattgctaatatagcaataaaatacttt

SEQ ID NO: 187251 - DNA, 1570 bp, Homo Sapiens
  misc_feature (1118)..(1126): n is a, c, g, or t
ttggggctgctccccggttccccatggatgatttgatcgtctcagcttgaacctatttcttttacggccctaccagcgacatacttgtggctaaagtgagttgataaagttgtgcaacggatggttggcgacacctcgtttctatgcggtcctgcgggaaaaattccttttgcatgctgtcctgcctgtaaccgaatgcctgttcatcaaatctatgatggtcttgtaatcgtaccctctgatattgcaaatcttttaattttttccctccatgggaacacatttagtatagtgtagaagtacttccatgacattttcagggttcgttatatgcttttcctacatacccatgaaatttgttgaaaaaaattcttcaccccaaacatttccctctagaacttcactttaatttgttccttgaatctatttttatgtggcccttaaaaaatatccaaaaaacccattgctgactgggcaataaaaatactttgggtactgacagaatctttggattgttaattttacatatttgaattcatattcttttcagtgatgtgttgtactaaaatccaagatggcttttgcaccatttttaactcaattttttcctttgatgttggtaccagaattactataagtgactgctgcttttgtgggtaaacattttgttagtgaagataaaaccagaacactaaattatggataaaattttcagaataggtggcacaggtaaatttcactaggttatattttgtgtagtaaagaaaaaaattatttggtcaatgttatcttaattcatactacaatttaagattatcttatgtgtattatagtaaatagatgattttcagattcaaggctcctaagagtttgatttgctctgttttttcctaaaataaatattgtctctcccaactgttaagttctaggtattgtacttccaattttaacttcagaaccaagatgttggcatgaaccaggctgctgttgaagtacatgtatattataaattatcttatttgtgttatactcttacatgttatcttttctaagaaaacaaagtccctattattcctattgcaaagcacacaggaattaagaaagtacagtaatttttnnnnnnnnntccggtaaatgtagtattcttaacctgttctatattacttatacctattgtctatatagctttaatttatagttgtcagtttaactattggcatgtctggcaaagaaaattaaactttaagagttttataaactgtttctaggttgctaaagaatttatttttctactatatatggtatagacaaagcatcaaactatgtacaggaaaaaagcctgactatttctatttggaagtaggctgaaaagagaattttcaaaactgttcgtgtcttcagttcattctgtcataactttgctattgtaatatgtgaataccagtttatttaagctgttctcttttatactgtattaatttaatgttcatctgcgtttagtaccatttttgttattaaaactggcatttaccgtttttcacattaacccaccttgcaccttcccccaaac

SEQ ID NO: 187252 - DNA, 1466 bp, Homo Sapiens
  misc_feature (1137)..(1145): n is a, c, g, or t
actttgtacaaaaaagttggctttacttccaagtaaacccgtggatgatttgatgagggataaatgaacctatttcttttacacacataccaaggacatgcttgtggctaaagtgagttgataatgttgtgcaaaggatagttgtcaccaactcatttctttatggtccataatgaaataaaaattttgtatactgttaattctgtaaacagatgcatgttcaaaagatctatgatggtcttgtaatcttaatctaatatattttagatattttaattttttccctcttggggaacacatttagtatagtgtagaaaatacttccatgacattttcatataaggttatataacttttcatacataaacatgaaatttgttgtagaaaattctttaaaccaaacatttaaatctaggacttcaatttaatttgttccttgaatctatttttatgtggcccttaaaaaatatccaaaaaacccattgctaatatagcaataaaaatactttgggtactgacagactctttggagtgtttatattacaaatttgtattcatattcttttctgtgatgtgttgtactaaaatccaaaatggcttttgcaccatttttaagccaattttttcctttgatgttggtaccagaattactataagtgactgctgcttttgggggtaaacattttgttagtgaagataaaaccagaacactaaattatggataaaattttcagaataggtggcacaggtaaatttcactaggttatattttgtgtagtaaagaaaaaaattatttggtcaatgttatcttaattcatactacaatttaagattatcttatgtgtattatagtaaatagatgattttcagattcaaggctcctaagagtttgatttgctctgttttttcctaaaataaatattgtctctcccaactgttaagttctaggtattgtacttccaattttaacttcagaaccaagatgttggcatgaaccaggctgctgttgaagtacatgtatattataaattatcttatttgtgttatactcttacatgttatcttttctaagaaaacaaagtccctattattcctattgcaaagcacacaggaattaagaaagtacagtaatttttnnnnnnnnntccggtaaatgtagtattcttaacctgttctatattacttatacctattgtctatatagctttaatttatagttgtcagtttaactattggcatgtctggcaaagaaaattaaactttaagagttttataaactgtttctaggttgctaaagaatttatttttctactatatatggtatagacaaagcatcaaactatgtacaggaaaaaagcctgactatttctatttggaagtaggctgaaaagagaattttcaaaactgttcgtgtcttcagttcattctgtcataactttgctattgtaatatgtgaataccaggtt

SEQ ID NO: 187253 - DNA, 1402 bp, Homo Sapiens
  misc_feature (232)..(240): n is a, c, g, or t
ttggctaaaataaatattgtctctcccaactgttaagttctaggtattgtacttccaattttaacttcagaaccaagatgttggcatgaaccaggctgctgttgaagtacatgtatattataaattatcttatttgtgttatactcttacatgttatcttttctaagaaaacaaagtccctattattcctattgcaaagcacacaggaattaagaaagtacagtaatttttnnnnnnnnntccggtaaatgtagtattcttaacctgttctatattacttatacctattgtctatatagctttaatttatagttgtcagtttaactattggcatgtctggcaaagaaaattaaactttaagagttttataaactgtttctaggttgctaaagaatttatttttctactatatatggtatagacaaagcatcaaactatgtacaggaaaaaagcctgactatttctatttggaagtaggctgaaaagagaattttcaaaactgttcgtgtcttcagttcattctgtcataactttgctattgtaatatgtgaataccagtttatttaagctgttctcttttatactgtattaatttaatgttcatctgcgtttagtaccatttttgttattaaaactggcatttaccgtttttcacattaacccaccttgcaccttcccccaaacttatctccacttttctatgcattctatcattgatttgacacacttcatagtgagtcatttaaatactctacgtttggttcaattaaccagtaggttacagttattgaaaattaaagtacagtttaaagctcagtctgttacactgaattgattgtgtttgtttttgccaagggtttagatatgcttttaaatattagaaacatctaagaacagaataacataattaaacttttttctggtaagttactggaaggtttcactgtttagggacctatcatatgagacttcttaaaggattaaaagaataggatagtctcataattgtgagtaaacatcaaggcattatattttacaatactgaataaaatttcatctacacacatgttgccattgtttcatttaaggttcagtgcttatagttaactacaatattggacctaacaggatctagattagcaatataaagaagcatagtggtactctgtttcactttcagtagatttattagaagtcaaattctattcaacagacacttattaggatatacaactaatttaagaataaaattccaggcacaatatatttttttaaatggtatttgttagtagtgcttcttccccttaacatttacagtgtaaatactgcaagtaaccgcaatctaagttagccaaaaagcagctttttttcccatactgtatgtaaataatgtaaacctggg

SEQ ID NO: 187254 - DNA, 2377 bp, Homo Sapiens
  misc_feature (1004)..(1018): n is a, c, g, or t
  misc_feature (1387)..(1425): n is a, c, g, or t
ttggcactttttgtggtagcgaacaaactttaaaccctcctgttgatacacaggggattcccgtgactatgaaaattaaaacagggcctggcaatgttgaacacaaagaacagccaataaattcttgaccgtaaggtcatgcgcattaaataaggcagttctgatgccaaatcagtactgtactgtatatttcccatagcagatattgagatatggatctgccgtagaaggaacaggaatgtcatcaggaaatatcagttcagacaaatgtgggtttccaccagcaggggaagagctggacctggtgtggatctgtctcccttcatggtgagaatgtcagatcagaaatgaatattcatgtggcccttggaaagtgggaaggagaaatcaataagctaaacacccaacctaataatagaactgttttctccaatgtgagtgtttttctcttgaagttggtatttctgtccttgatctgttggtgatgctatttagagatgcaacaaaagatttcacagaaaagcaaaaggttggttccattgttctggaataagggttatgtcaatttgtttctatctaagcatgtcactggaagtctggttcacatttaaagttttccttaattccaagaaacaatctagaccctttgaagctttggcaaaagagtaccaggtaaaaaaagaaatcccacttgtaaaggcctagtttgcaattcatttgtcctgggatcttgcaaaaacaacccaatatctgtatgtctctatacattggtgtgtatgataatatctttatttttctttgtagagattttacacaggatataataagtgacacaactgttttggcagatggggtcagaatatgaaggcaattccttccatgtaagaattttggtgcttgtttaaatttaatagactcgcttctcctaaccacactctggaagtctcctgtcattcatgcacataagaactcagaagagaacctctactgtctccccaaaatcnnnnnnnnnnnnnnnaataaacttgctgacattggccaggtttcaagagcatggtaagttcatgatccatcagcctggtttctgaatggaaatccaatgagttatttgtattgtttgttcctaccttttccaggcaccttctaaaaatgaacaagagcagctctgatttggaaaaagtgagccagggctctgcagaaagcctcagcccatccttcaggggtgtccacgtcagcttcaccaccggctccacggacagcctggcctcagactctaggacctgcagcgatggaggtccctcgtctgagctggctcactcgcccaccaacagcgggaagaagctctttgctcccgttccgtttccttcacgctccactgaggacgtgnnnnnnnnnnnnnnnnnnnnnnnnnnnnnnnnnnnnnnnaaaaagatagtgagccgggcagcctcttcaccggatggcttcttctggacccaaggctcccccaagcccggaacagcaagccccaagctgaacctaagccactcggaaaccaacgtccacgacgaatctcactttagctattcgttgagccccgggaaccgccaccatcctgtcttctcctcttccgatcctctggagaaagctttcaaaggcagtggccactggcttccggcagcagggctggcgggcaacagaggcggctgcgggagccctggcctccagtgcaaaggggccccctccgcctcatcctcccagctgagcgtgtccagtcaagcctccaccgggagcacccagcttcagctgcacggtctcctgagcaacatcagcagcaaggagggcacctatgccaagctggggggactctacacccagtccctggcccgccttgtagccaaatgtgaggacctcttcatgggcggccagaaaaaggagctccacttcaatgagaataactggtcgctcttcaagctgacttgtaacaagccctgctgtgactcgggggatgccatttattactgtgccacctgctctgaggaccccggcagcacctatgctgtgaaaatctgcaaagcccctgagcccaaaacagtctcctactgcagcccgtccgtgcccgtgcactttaacatccagcaggactgcggccacttcgtcgcctcggtgccgtccagcatgctcagctcccccgacgcgcccaaggaccctgtgcctgccctgcccacacaccccccctgcccaggagcaggactgcgtggtggtcatcacccgagaggtgccacatcagaccgcctccaacttcgtgcgggacctcggcggccagcctaccaaacggagcccgaggcgtacgagcggcgcgtgtgccttcctgcttctgcaactctgcaacgggctg

SEQ ID NO: 187255 - DNA, 2526 bp, Homo Sapiens
gccaactttgtacaaaaaagttggcttatatcctaaatgtcagaagatattctgaactggatgcctgaatagttaactaaaccagtcttgttagatgatggtactcttggcataaagcgaggattctgatatttggcatacttgtaaaaacaaatacataagtaaccattgaacattaatttgataataggtctagagactctaaaaactaaccaaacttggtgagtgtattcttatattaagaatatcttagtcatctcaaaactagcaaaatttaaattttggcatgttttccattcatatgttctttgcattttatttttgaggtttctgtgagaagtaaagatagttggaatttttgcgatattgaatagaacatcttctgttcccaacactgtttggcttcactaatttagaagtcaggaagcaatagaaagttggagatgaggaagtgctagagtaggtgtttgttttggttcttggagggaaaagattctttattccaatttccagagagaagagaaaactcacccaggaagtttaaaaattctttaaacaggtattttgatattggagaataacatgcatataattctgtaggaatgcacatgtaatccaagtgagtggagagtgtttttaatgtttttgaatgaaggaaatgaggttttgtttcacctgttttgcagcagtaagagaaactagtgctgcaagaatgtattttttaatgaagttccttattttgtcttgcatgttttagttttgcttatttttaaatttggaggtcctccataatgtcagataatattgacctgccatacgttagcactcttagttccgctactgtctttaacaggagcaaagagctgtgataaaccatgcttttttgagcttgtctgactcctaattaataacatgtttttggcaagacaacagattgaggttagaggatcagtaggacatttttattccatctgtcctatggggaaatttacaaatcccgtgctctaaaatgttctcaaacatttatatagatttccctttcatcttactaaattttgcattgttcttttcaagtatgtttcgtatttactgtctttttttctgccatttcccaaataataactccagatttcataattccagtttttacattccgttatctttctggtacaaccattcccattcagccttaaatctgagtcctttttagcagcaacttttttcctgggatcctccttcgtggtcttctaagtcagtgttagttttgaaatttttggccctgcataagttctgcatagcatctaatgtcaaaatagaaccaactggtaatcacagtattatttagtgtggtttccatgacaacaaaaatacatacgaagaaaacttctcaggttactatgctgaaattccaaaatgtctgagttttgaatagtgatcactttgttctggtattgacgcaattatattaggaaaaaagttggttgactgtttttgtttaattgacttctaaaatgttcaaattgtctagttctaaaagtttactaaatgcctagtgcagttaaacatactcttgtttaagtgtgtgttgctaaattttttactgtcattactaaataatctgtgtggcaaaatgtgtgtcagcacttttccctccttttttatctcctattttcaggagtcaaatgtagccataaactgtatccttgtctgacactttagctaaaaatttccagttaggggagtttattgccaaattaaatttggctgttccccccaacccatatagatattaaggaaggtgtacttaaaaaatgtttggactgcttttaaaacctgagcaatgtcattaatccatatgtggactagtgatgaatagatattttcataagagtttaaatgctgatatttggtggaagtagagagtaactcatattctatcaattcaagtattcttactatggttgctttccctatttgttcaatagactgataatactggaatttatagagtttgagccattacaacttttgtgaggatgtgtttcaaacatttctggacaaatcttattttgtatttctggaagaatgtagtaatcttctagaccgcttaaaaccaatgctcccaagctgaatattcttgagaaatttgtttttattatgccatttgacatttcaaatcagtgctcatatacagtaaacttgtgatagaaattgtattttattgctttttggattataattcatataaatataattacttgaatattgtttgagatcattaacatgccaggggcagttcccactgatttagatggtccaagataatctcattctggaggcttgaaacatttaatggtttagtcttgtgaattttaacagttctctgtcatcgtttaacaaaaccaacaactgacacaactccttaagctgtggtttcagtctctgctagttcatattgcatgtttattttggacagtcttttgttaagcatggtgcttgtactggtttaaataaaatgttaacatt

SEQ ID NO: 187256 - DNA, 1193 bp, Homo Sapiens
ttgggcccggacatgtttcacaaaaatactctcaagaaggtaactctggccagaaactgtgcatctatataagaaattttccatttgatgttacaaaagttgaagtgcagaagttctttgcagactttcttcttgctgaggatgacatttacttgctttatgatgacaaaggtgttggtctgggagaagcattagtgaaatttaaatcagaagaacaggccatgaaagctgaacgtttaaaccgacgaagattcctagggacagaggtgttattaagacttatatctgaggcacaaatacaggagtttggtgtaaatttttctgtgatgtccagtgaaaaaatgcaagctcgctcacagtcacgtgagcgaggtgaccattcccatttatttgactcaaaagacccaccaatatactcagttggtgcttttgaaaactttagacatcagctagaggacttgaggcaactggataacttcaagcatccccagagggatttccggcagcctgacaggcaccctccagaagacttccgacactcctcagaggactttaggttccccccggaggacttcaggcactccccagaggacttcaggcgacctagggaggaagacttcaggcggccttctgaggaggacttcaggcgcccttgggaggaagatttcaggcgccctccggaggatgacttcaggcaccctagggaggaggactggaggaggccccttgaggaggactggaggcggccactggaggaggatttcaggcggtctcccacggaggacttcaggcagctccccgaggaggacttcaggcaaccccctgaggaggacttaaggtggctcccagaggaagatttcaggcggccacctgaggaggactggagacggcccccagaggaggactttaggcggcctcttcagggagaatggaggcgaccacccgaggatgacttcaggcggcccccagaggaggatttcaggcattcccctgaggaggacttcaggcagtcaccccaggagcatttccggaggccacctcaggagcatttccgtcggccacccccagagcatttccggagaccacctccagagcattttaacggcctcccccagagcacttccggcggccacccccagagcacttcggcggccacccccagagcatttcaagcgcccgcccccggagcactt

SEQ ID NO: 187257 - DNA, 1132 bp, Homo Sapiens
ttgggccagagtgaggctcctgctgtacagtgccacccatactgtgatgtcgatgcccatgtgaatgaggcccaccctcgccctgcttgccctgccgcaggccccccaccagaagccatctcccccgctgtgtgtccccaggcgcatcattgctccactctcccctgcagccgcggctgctcggccactgaccaggggccctggcagacattaggggatcagttgtatttattgtattttatctgtgtgtgctcaggaggtgagcctagtgggtccttaagtttggttgtgaataatctcttgatagacaatttatacccatgaaagttcagccaatgcccagagtgaccaagcagcaccagcaggcctgcccaggatgctgaaagcagatttcttcttgatttcacttctgatggatgcatggggctctgggggaatgctgggaaaatgggcaagcagagtgcacagccctcgttctgccagctggagccaagaagcacagagacacagaggcgcctgcccctcagctccgctggtctgtctgtgcatccactgtgccgtgggacatatgtaatttgtgcagtgtgacatggacttgctgtcctaatggatgtgttgtgccttgtgtctgtcatgtgtggccagcgtgattgtatagaatccagagtatgtagagagccaaaatgtgtggccctgtccccaagctcagcaccaccggccatgaccagaggttgctcggcccagggtctgggagctgggctaacaggctgacacttcggcagggtcaccaggaggcacagctaggggcatgctcacatgggtaggtcagttctttggtccaagcctctggtgcagattcaagctcctcctcttagaggaagcagctccttcctcccacaggagccccaagggagcactcaccctcctcccaattggatctgaatagctgtgttcctgatcccacataagcatgtctcatccttgccccactggtgagaggaggaccttgtgcctgcccagagcctgcagacagcacgccttgaggtcagaggcctggcccttctttacagatgtagatagcaggtaggacgcccaggccttctcacatgggcaccatgaaacactttcttcc

SEQ ID NO: 187258 - DNA, 1440 bp, Homo Sapiens
actttgtacaaaaaagttggcgatactcagccctctgcgaccatggctgtgctggcggcacttctgcgcagcggcgcccgcagccgcagccccctgctccggaggctggtgcaggaaataagatatgtggaacggagttatgtatcaaaacccactttgaaggaagtggtcatagtaagtgctacaagaacacccattggatcttttttaggcagcctttccttgctgccagccactaagcttggttccattgcaattcagggagccattgaaaaggcagggattccaaaagaagaagtgaaagaagcatacatgggtaatgttctacaaggaggtgaaggacaagctcctacaaggcaggcagtattgggtgcaggcttacctatttctactccatgtaccaccataaacaaagtttgtgcttcaggaatgaaagccatcatgatggcctctcaaagtcttatgtgtggacatcaggatgtgatggtggcaggtgggatggagagcatgtccaatgttccatatgtaatgaacagaggatcaacaccatatggtggggtaaagcttgaagatttgattgtaaaagacgggctaactgatgtctacaataaaattcatatgggcagctgtgctgagaatacagcaaagaagctgaatattgcacgaaatgaacaggacgcttatgctattaattcttataccagaagtaaagcagcatgggaagctgggaaatttggaaatgaagttattcctgtcacagttacagtaaaaggtcaaccagatgtagtggtgaaagaagatgaagaatataaacgtgttgattttagcaaagttccaaagctgaagacagttttccagaaagaaaatggcacagtaacagctgccaatgccagtacactgaatgatggagcatctgctctggttctcatgacggcagatgcagcgaagaggctcaatgttacaccactggcaagaatagtagcatttgctgacgctgctgtagaacctattgattttccaattgctcctgtatatgctgcatctatggttcttaaagatgtgggattgaaaaaagaagatattgcaatgtgggaagtaaatgaagcctttagtctggttgtactagcaaacattaaaatgttggagattgatccccaaaaagtgaatatcaatggaggagctgtttctctgggacatccaattgggatgtctggagccaggattgttggtcatttgactcatgccttgaagcaaggagaatacggtcttgccagtatttgcaatggaggaggaggtgcttctgccatgctacttcagaatctgtagacaacttctgctatttaaggagacaaccctatgtgcccagaaggcccgctgtaatcactgtgactactgtgggtcttctttttttcagacaagctgcttccctttttattattt

SEQ ID NO: 187259 - DNA, 948 bp, Homo Sapiens
ttggctccgttcatgcctggacaccagaagacgattcagaacacaagaggagaatgagctggagcgccagcaccacgatggccccaggacgttgtttaagatctgagatcccttggtttctctcttgttgatctgagatgctacatcagggcccttgctgctgtattacctctgcccgggtgtttgagacaggtcacaagcgcgtggatgtttcctggaagtgtattcccctggggctcagcgatgctctgggaacccttggggtttggggaaggacagtgtggtgtgactattggcttgaaacgttatggatatggttggagtcacccatgtggatatgattttcagcttggagctgggatggagaagatggaagcactggtggccgggcctctttttccagcgaggccagccctggcttctcctctgttccagcttgtctgccagaagccttcccctgcaaggtgcccacctgcccggagacagagggagcagctgaggcctctctccactggccgccagcctccctagcacaaggggaccattcagcaatgagtgtttactcatgttctttcttgttgatgagttctgcggcccagcatatagaaatggctcagaacgttccaggccttggtgagacacagcagcgtccaatgctcacaggctgtccccactctgcctgttcccatcttcccctcgggacctgtttataaattgaggaatggatgaggccctggagggtccttgggagtagttagtggagggcaggattctcatgtccccatagagagggaaagagaagaccagatgtgcatagaagccaatctctgtcacatacaccgcgagtggtcaccgagttattttccaaaagctgaggaacataaagcaaatttaggcttttgtccttctgcaatacatgcacttgaaaataaacagaaagagatgttt

SEQ ID NO: 187260 - DNA, 2190 bp, Homo Sapiens
ttggcctttaagtcgggttcccgctgggactgccgcagccagggggagtgggtgggggtgagagatgttggtgagagccctgcctctccaaaggctcccccccagccaagccttcccggcttccagcccagacaccagccagccagtggcgttcctggctcctcgggattttccttttcctccgaagctgctgattcatccccaggctggagtcaggctcagctgtggggctgggagcatgggctctcaggctgctgctgagtggaggaactgggcctcctgggaggtgtcctccagcctctctggatgctccatgggtgggggtcgggagtggtgagggaagggtggcgcatctcagagccctcgcaaatttctggccagaaatgtgggggtatgggcgcagcttggccaaggccatgctgcaagggccagggtggccgtccttcctcactcctgtctggcctccctctgcagggtgcttcaaggatgaccgcatcgtcttctggacttggatgttctccacctacttcatggagaaatgggctccccggcaggacgacatgcttttctatgtgcgccggaagctggcgtactccggcagcgaaagcggtgcagacgggaggaaggcagctgagcctgaggtggaggtggaggtgtaccggcgggactccaagaagctgccaggcctgggagaccctgacatcgactgggaggagagcgtctgcctgaatctcatcctgcagaagctggactacatggtgacctgtgcggtgtgcacacgtgctgacggcggggacattcacatccataagaagaaatctcagcaagtgttcgcgtcccccagtaaacaccccatggacagcaagggggaggagtccaagatcagctaccccaacatcttcttcatgattgacagcttcgaggaggtgttcagcgacatgaccgtaggggaaggagagatggtctgtgtggagctggtggctagtgacaaaaccaacacgttccagggggtcatctttcagggctccatccgctacgaggcgctcaagaaggtgtatgacaaccgggtgagcgtggccgcccgcatggcacagaagatgtcgtttggcttctacaagtacagcaacatggagtttgtgcgcatgaagggcccccagggcaagggccacgccgagatggcggtcagccgagtgtctacaggtgacacatccccctgtgggactgaagaggactccagcccagcttcgcccatgcacgagcgggtgacctccttcagcacaccccccaccccagaacggaacaaccggcctgccttcttctccccatccctcaagaggaaggtgccccggaaccggatcgctgagatgaagaagtcgcactcggccaacgacagcgaggagttcttccgggaggacgacggtggagccgatctgcacaatgcaaccaacctgcggtctcggtccctgtcgggcacaggacggtccctggtcgggtcctggctgaagctgaacagagcagatggaaacttccttctctatgcacacttaacctacgtcacgttgccgctgcatcggattttaacagacatcctggaagttcggcagaagcccatcctgatgacctagccgcgtgcggagcctgcgcagagccccggccgggcccagccctcggagtgctgccaagtgcctacctgtccaccgccaccggggtctgcgatggcacgccagtgctggagccgcagccaggcgaggccactcgactcccggggccggggccgactccacgaacaccagcccaaactgaagtgcctcttccctcccctgctggcgctgctccgccctgtgccccccgcccatcgccccccacccatctctggagagccctctgcacccaaagaggactagagatgccgagcggccatgagagagagcggaaggagcagctgatgcccagagcggggccagagcggcgggtctatgttcacgtccccccagcagcaggcggaaccacccagccagggcactcagtgcattggactgtccacatgttcttgaggaaagccggtggaagattctgggatgccgtgcggatgaacttcagcacccgagtcagtcccagctcatcctccccagttaccactttgttctaataggagatgggaacacgaaaagtttgatggctttgccctgg

SEQ ID NO: 187261 - DNA, 1523 bp, Homo Sapiens
  misc_feature (898)..(913): n is a, c, g, or t
ttgggactaagtaatgcatcagaattcatctgtttgaagcctgaaataatttaggactctgattcactgaccaaaagtcagtgttgcagagatttctctaccccgtatggtattttgttagattgttcaacaggaagcacatgattgagaacatcttgggacagaccaaaaccactgacagatggcaaggctcggcgattctgatttcccttctcaaatctgctcaactccaagagtcttgagaaactgctaaaattttgcctctgtcactcaagtcttacaaatgttatcttgtaaacctttgaggtgaactattccactgtcttgtacataggcatcttattcactgcaccctgtcacacccagcaccccccgccccgcacattatttgaaagactgggaatttaatggttagggacagtaaatctacttctttttccagggacgactgtcccctctaaagttaaagtcaatacaagaaaactgtctatttttagcctaaagtaaaggctgtgaagaaaattcattttacattgggtagacagtaaaaaacaagtaaaataacttgacatgagcacctttagatcccttcccctccatgggctttgggccacagaatgaacctttgaggcctgtaaagtggattgtaatttcctataagctgtaatagtggaggtattgtgggttcatttgagtaagccctccaaagataccattcaaataacctgggagaatgtcataaattattcagataattaacactgcatgaatctgattcagaggcatgcatttacatatgttgccctaattaccatttgatgatcataaatacaagtgaatgacattggacttttagtaacaaacttaatttttaaaaaggtgtagacaatggtggttnnnnnnnnnnnnnnnncaggtaccaggttctgtgtgtttgcaccaagtaattgacatgttttttaatacatgtggaccatgaacagtattcattctactttttcaaatgatatgctgtagaaaatattccttgaagatgtgagatttaaaaatttttccctttcaatgttgttttaattgtatttcttacttggtttttttgattgatagcacagtgataaatcataatactagacaaaattgtcttctctttcaaaccagagccatatatatgtctgtatatatgggacctactgcttctctgaggaaatgcataatctgttaatatcagacaaaatgagcaattggcagtgctcataatatattccaatttttattggaattttcgatggaatgttatttcaataaagccatgtaaggtgaaactttgataactttttactcttcaagttagggtaaattctgatccaatattcaattcatttgtgtactcccacatgcaaaatgctaaattacaatgcagacattaagaaaaagtattgactggaggggttgaattccttgagaatttattttatagtctaaatcacaaatactttactcaatttagtttttaaaaatagtaa

SEQ ID NO: 187262 - DNA, 1193 bp, Homo Sapiens
  misc_feature (284)..(299): n is a, c, g, or t
ttggtgaacctttgaggcctgtaaagtggattgtaatttcctataagctgtaatagtggaggtattgtgggttcatttgagtaagccctccaaagataccattcaaataacctgggagaatgtcataaattattcagataattaacactgcatgaatctgattcagaggcatgcatttacatatgttgccctaattaccatttgatgatcataaatacaagtgaatgacattggacttttagtaacaaacttaatttttaaaaaggtgtagacaatggtggttnnnnnnnnnnnnnnnncaggtaccaggttctgtgtgtttgcaccaagtaattgacatgttttttgtttaatacatgtggaccatgaacagtattcattctactttttcaaatgatatgctgtagaaaatattccttgaagatgtgagatttaaaaatttttccctttcaatgttgttttaattgtatttcttacttggtttttttgattgatagcacagtgataaatcataatactagacaaaattgtcttctctttcaaaccagagccatatatatgtctgtatatatgggacctactgcttctctgaggaaatgcataatctgttaatatcagacaaaatgagcaattggcagtgctcataatatattccaatttttattggaattttcgatggaatgttatttcaataaagccatgtaaggtgaaactttgataactttttactcttcaagttagggtaaattctgatccaatattcaattcatttgtgtactcccacatgcaaaatgctaaattacaatgcagacattaagaaaaagtattgactggaggggttgaattccttgagaatttattttatagtctaaatcacaaatactttactcaatttagtttttaaaatagtaaactgaatatttttgttgtaagcctatcagagtcaatccttcgtttggaattgttttcctgtttttccttactataaatcatttaaaaactgaattcattttcttagatggcataagtctgtctcttgagaaataagtaaaatactcctattttcagtatctgtagcacctgaaataggtctttgtatagccagaaacaagttatgttgaagttagcttttctttgtcaacagttttggacaataaaaatctgaaagtattaacacttgattttctactggg

SEQ ID NO: 187263 - DNA, 865 bp, Homo Sapiens
ttggtgtaataaatgtatgacattattttgattgatacattaaaaaagagtttttagaacaaatatggcatttaactttattatttatttgcttttaagaaatattctttgtggaattgttgaataaactataaaatattattttgtattgcagctttaaagtggcacactccataataatctacttactagaaatagtggtgctaccacaaaaaatgttaaccatcagtaccattgtttgggagaaagaaacagatcaagaatgcatattattcagtgaccgctttcctagagttaaaatacctcctctttgtaaggtttgtaggtaaattgaggtataaactatggatgaaccaaataattagttcaaagtgttgtcatgattccaaatttgtggagtctggtgtttttaccatagaatgtgacagaagtacagtcatagctcagtagctatatgtatttgcctttatgttagaagagactttcttgagtgacatttttaaatagaggaggtattcactatgtttttctgtatcacagcagcattcctagtccttaggccctcggacagagtgaaatcatgagtatttatgagttcaatattgtcaaataaggctacagtatttgcttttttgtgtgaatgtattgcatataatgttcaagtagatgattttacatttatggacatataaaatgtctgattaccccattttatcagtcctgactgtacaagattgttgcaatttcagaatagcagttttataaattgatttatcttttaatctataacaatttgtgttagctgttcatttcaggattatattttctacaagttccacttgtgggactccttttgttgccccta

SEQ ID NO: 187264 - DNA, 1037 bp, Homo Sapiens
ttggtgataaatgtctgttggattctttttggatttctttaattaatttgtaagtaaccaagataattattttcccccttgctctctatgttaatacgtagctataaagcaacagttggttttcttatcctttgataaaagcatcccataaaatataaagtagtaagttaacatagtattattgtcacacacaatgctttttttggttaaatgttgatacgaagcaatgttttggaattactttaattgatggagtagtggtggtagagagaaattaataacaaaaagagtgaaaatattttaattagcagtagatggtgctactggctttcatttgctgacttgattattccctttctcttaaaaaccatggcattagactgcactaaattaacaagcatgttagttgctggtagaggttttggaggttaatttaccttaaattggaagacttttaattgcagtctctttctaccttccctctgttagtcatttgtaaattctaaatggtcaccataaaatgtattaggtaggagaagatacgttttatgtataatatatctcagactgagttactgcctgtcttatcaggatggataaaacactacagtctcttatcaggaaatagagatgatgtggatatttatatattacatatataaccaccagactccattttatatattagcattttccttgcttatgggaaaatagcaaaacaacatttcatttatacttttgtttacccctctctgagacaggttttgataaccactgaaatggtagaatatgtgagatacaaatattgagttgtagaactttctttttaaggtgaataagtcatgccttaacatccaaataagagttcatcttcagagtggttcttttgggagcactgtttattccagctatactgcaaaagtataatgtttttggaactgttctagagcataccatgaaaagcagtttgttattatgcagaaaatcagtttcatcattttagttacactaaacacttttggcagcttaatatgacc

SEQ ID NO: 187265 - DNA, 938 bp, Homo Sapiens
  misc_feature (715)..(724): n is a, c, g, or t
ttggatgaagttcagatttcatcttatttactgaaggtggagaaaggatgtggaagtaggggttatgggctctcaaaagtagatttagagagatttttttatcactgttttatgatatagttcactgagcacttacatagattaacagttacaagtttccataaatcagttagaatatgactagcttcagggaaggaattttcaacaactgcaatctttgattgttttactgtgggattacaggtgtgagccaccacagccagccagtatgacctatcttaatcatcagctcaactgtaatttaaatttggctgttctctggagctaaaccattagggaagttcaaaggaatgtgccatgatttccgaatttgcacaagagaatgttttaagcattggtagcatcattgaataaaagaatagtttcctgatgtcactattttgaagtggaaattatcacttggatgtggaggttttactttttaaaaacattcagcttaattaccttaccttaattaccttagttagatatactaatggaaaaaaaccaagtcctttctctagaacttgttttctatttttgttccttttcatgaaaacttctcaatttaattttaactactgtaggatagtattgattgaatggatactatggaaaagtggatccaatatttaagatagaagtagtttaaggagacaacagcctttactgccannnnnnnnnnaaatgttttcactcagatgaacaatttgactttaataaaagactggagatttttgtacaaagaaataggaataagtttcatatactaattatgctgagttttaagcctacatatcacaaatatttagaattgtataaccttttcatatatttataacttttaatgtctttttaaagatgtggaccaaaaataatatttataatttggaaatgtg

SEQ ID NO: 187266 - DNA, 1351 bp, Homo Sapiens
ctttgtacaaaaaagttggtcctttctcccttcaaagtggttggatggagccattggcctccttttcttcagcgggcccttcaacctctctgcaccatgttgtctggctgaggagctactagaaaagctgagtggagtctcctttccaacaggatgatgcatttgctcaattctcagggctggaatgagccggctggtcccccagaaagctggagtggggtacagagttcagttttcctctctgtttacagctccttgacagtcccacgcccatctggagtgggagctgggagtcagtgttggagaagaaacaacaaaagccaattagaaccactatttttaaaaagtgcttactgtgcacagatactcttcaagcactggacgtggattctctctctagccctcagcacccctgcggtaggagtgccgcctctacccacttgtgatggggtacagaggcacttgctcttctgcatggtgttcaataggctgggagttttatttatctcttcaaactttgtacaagagctcatggcttgtcttgggctttcgtcattaaaccaaaggaaatggaagccattcccctgttgctctccttagtcttggtcatcagaacctcacttggtaccatatagatcaaaagctttgtaaccacaggaaaaaaataaactcttccatcccttaaagaatagaatagtttgtccctctcatgggaattgggctgtatgtatattgttcttcctccttagaatttagagatacaagagttctacttagaacttttcatggacacaatttccacaacctttcagatgctgatgtagagctattgggaaagaacttccaaactcaggaagtttgcagagagcagacagctagagataactcgggacccagagttggtcgacagatgttagatgtatcctagcttttagctataaaccactcaaagattcagcccccagatcccacagtcagaactgaatctgcgttgttgggaagccagcagtggccttgggaaggaagccatggctgtggttcagagagggtgggctggcaagccacttccggggaaaactccttccgccccaggtttcttcttctcttaaggagagattgttctcaccaacccgctgccttcatgctgccttcaaagctagatcatgtttgccttgcttagagaattactgcaaatcagccccagtgcttggcgatgcatttacagatttctaggccctcagggttttgtagagtgtgagccctggtgggcagggttggggggtctgtcttctgctggatgctgcttgtaatccatttggtgtacagaatcaacaataaatcatatacatgt

SEQ ID NO: 187267 - DNA, 963 bp, Homo Sapiens
ttggcccgtacccctccagacaggaagcatgggtttgcccacagacctgtcgggtgctcctgtgagtggcctccagatgtctttgtgcataggcacaagtgggccagggctggagggaggtgggaaacctcatcatccggtgggccctgccaatcttaacccagaacccttaggtattcctggcagtagccatgacattggagcaccttcctctccagccagaggctgacctgagggccactgtcctcagatgacaccacccaggagcaccctaggtgaggggtgagggcccccttatgtgaacctcttgcctccccctttctcccatcagagtggttggatggagccattggcctccttttcttcagcgggcccttcaacctctctgcaccatgttgtctggctgaggagctactagaaaagctgagtggagtctcctttccaacaggatgatgcatttgctcaattctcagggctggaatgagccggctggtcccccagaaagctggagtggggtacagagttcagttttcctctctgtttacagctccttgacagtcccacgcccatctggagtgggagctgggagtcagtgttggagaagaaacaacaaaagccaattagaaccactatttttaaaaagtgcttactgtgcacagatactcttcaagcactggacgtggattctctctctagccctcagcacccctgcggtaggagtgccgcctctacccacttgtgatggggtacagaggcacttgctcttctgcatggtgttcaataggctgggagttttatttatctcttcaactttgtacaagagctcatggcttgtcttgggctttcgtcattaaaccaaaggaaatggaagccattcccctgttgctctccttagtcttggtcatcagaacctcacctggtaccatatagatcaaagctttgtaaccacaggaaaaaataaac

SEQ ID NO: 187268 - DNA, 905 bp, Homo Sapiens
ttggggaagagtgacagcagtccatactcaaggctagccaggtccacactcctgctgatccccctgtttggagtacactacatcatgttcgccttctttccggacaattttaagcctgaagtgaagatggtctttgagctcgtcgtggggtctttccagggttttgtggtggctatcctctactgcttcctcaatggtgaggtgcaggcggagctgaggcggaagtggcggcgctggcacctgcagggcgtcctgggctggaaccccaaataccggcacccgtcgggaggcagcaacggcgccacgtgcagcacgcaggtttccatgctgacccgcgtcagcccaggtgcccgccgctcctccagcttccaagccgaagtctccctggtctgaccaccaggatcccaggggcccaaggcggcccctcccgccccttcccactcaccccggcagacgccggggacagaggcctgcccgggcgcggccagccccggccctgggctcggaggctgcccccggccccctggtctctggtccggacactcctagagaacgcagccctagagcctgcctggagcgtttctagcaagtgagagagatgggagctcctctcctggaggattgcaggtggaactcagtcattagactcctcctccaaaggccccctacgccaatcaagggcaaaaagtctacatactttcatcctgactctgccccctgctggctcttctgcccaattggaggaaagcaaccggtggatcctcaaacaacactggtgtgacctgagggcagaaaggttctgcccgggaaagtcaccagcaccaacaccacggtagtgcctgaaatttcaccattgctgtcaagttcctttgggttaagcattaccactcaggcattttgactga

SEQ ID NO: 187269 - DNA, 1978 bp, Homo Sapiens
ttgggaaaaaattagaagagatattacctctgggaccaaacaaagctcttttttataaaggaatggcatcatatcttttaccaggacaaaaatctccatggtttttccaaaaacccaaaggtgtaataactttggacaaacaagtaatatccacgagttcagacgccgaatccagggaagaagttcccatgtgttcagatgctgaatccaggcaagaagttcccatgtgtacaggccctgaatccaggcgagaagttcccgtgtatacatattctgaacccaggcaagaagttcccacgtgttcagaccctgaacccaggcaagaagttcccacgtgtacaggccctgaatccaggcgagaagttcccatgtgttcagaccctgaacccaggcaagaagttcccatgtgtacaggccctgaacccaggcaagaagttcccatgtgtacaggccctgaagccaggcaagaagttcccatgtgtacagactctgaacccaggcaagaagttcccatgtgtacagactctgaacccaggcaagaagttcccatgtatacaggctctgaacccaggcaagaagttcccatgtatacaggccctgaatccaggcaagaagttcccatgtatacaggccctgaatccaggcaagaagttttaatacggacagaccctgaatctaggcaagaaattatgtgtacaggccatgaatccaaacaggaagttcccatatgtacagatcctatatccaagcaagaagactccatgtgtacacacgctgaaatcaatcaaaaattacctgtagcaacagattttgaatttaagctagaagctctcatgtgtacaaaccctgaaattaaacaagaagaccccacaaatgtggggcctgaagtaaagcaacaagtaaccatggtttcagacactgaaatcttaaaggttgctagaacacatcacgtccaagcagaaagctacctggtgtacaacatcatgagcagtggagagattgaatgcagcaacaccctagaagatgagcttgaccaggccttacccagccaggccttcatttaccgtcccattcgacagcgggtctactcactcttactggaggactgtcaagatgtcaccagcacctgcctagctgtcaaggagtggtttgtgtatcctgggaacccactgaggcacccggacctcgtcaggccgctgcagatgaccattccagggggaacgcctagtttgaaaatattatggctgaaccaagagccagaaatacaggttcggcgcttggacacactcctagcctgtttcaatctttcctcctcaagagaagagctgcaggctgtcgaaagcccatttcaagctttgtgctgcctcttgatctacctctttgtccaggtggacacgctttgcctggaggatttgcatgcgtttattgcgcaggccttgtgcctccaaggaaaatccacctcgcagcttgtaaatctacagcctgattacatcaaccccagagccgtgcagctgggctcccttctcgtccgcggcctcaccactctggttttagtcaacagcgcatgtggcttcccctggaagacgagtgatttcatgccctggaatgtatttgacgggaagctttttcatcagaagtacttgcaatctgaaaagggttatgctgtggaggttcttttagaacaaaatagatctcggctcaccaaattccacaacctgaaggcagtcgtctgcaaggcctgcatgaaggagaacagacgcatcactggccgagcccactggggctcacaccacgcagggaggtggggaagacagggctccagctaccacaggacgggctctgggtatagccgttccagtcagggacagccgtggagagaccagggaccaggaagcagacagtatgagcatgaccagtggagaaggtactagtcaacctccagaaagagtatgggagagaaaaagaggcacacctggac

SEQ ID NO: 187270 - DNA, 2147 bp, Homo Sapiens
  misc_feature (467)..(492): n is a, c, g, or t
  misc_feature (1870)..(1899): n is a, c, g, or t
ttggctagtgtgtctggagcgggctgcactacatacaaggaacccttggatttccgagaagtaggagaaaaaatcttgaaaaagtatgtatctgtgtgtgaaggacccctgaaagaacaagaatggaatacaacgaatgcaaaacaaattttaaacttctttcatcatcgctgtaactagtaagttcatctagtccttttcaaatagaaaaacaacaaaacccatgaaatggaaaagagagttccaaaaaagaagacctgttgatactgaatatgagaacattacactgcataaagatatccagcttgggtaccctactaaaacaacatcaccatctttttcattatatattagtaaacctatgaagggatgattctttaatttctaaagtgttgttcaaactcaccttaaaatacagatgttatgtcactaataatgagtagtaacccaatttagctttacaaagnnnnnnnnnnnnnnnnnnnnnnnnnnattgtggtatatgtaacacaagtttaccatttttatcatctttagattatttttaaatctcactaccttgaagtttgccatgcttcagaaattaaagtcaagttacttcactgctttgaatacatactatggatataaatgtaggcaaaatgaaagattatgactaatattcagattccattttcaataaggtaaataatgaaagatctcacaaaggaatcattgtgtttaattattttgccatgtattactaattgtatttaaaatttctacttcccttaggcattttataaaaatttaaaaattatttttctattttgtttaaaagacaatgcatggcttttcaagtgagtaatgaagataaaaaccaagctaggttagtctaccattagttcatatgtttttgtagcacatcttttcataacatactgaaattttaatgttttttgcctttaataataggggtgagtgttaaaggccagagagcctaacttgatatcttgctcatggtctttctgtctacctcaactcctgttgtcatctttggatgatctttctgataccttgctgataccttggacttctgcccagtgactttattacattccagcagcttactcccgtggccgcactttgaatgtcaccaccttgagtttctctttctggtaaaatttcagtaactgataactgccctcttttcaattttttcacttccttattttattgacttttctctcctttatgctcattccacattcttcagttccttcttacccccttttcttgactgctccccttcctcctaaactgtcagcccctttcaggctttcttccctatccaccctcagctttatgggatactatatgaactaatctcaccagttattcttctttccctggtcttttagtctagtcctttggcaagccctcaacctcagattaatcctatttattatctaccttttcggggatgctgagttctttgtgatgggtagtccttcaaagtagaatcactacaagtgtctcacttcagccttagaaaagccctcaatgtaaaccttatgtttgttactagggtggcctctctcccatttcccgctgtggctgagccaaacttcattactttccttaggccctctgcccctcccctagcatatggctctttctcctattgaacagaaaattgagactatgaagaggtcaacttgtatttaccaactttactcattttcccattttagaggaaaagaggttgcctgcttcctatcaaaggcgactctgtgctacatgttggtttcatcttcgctgtctctctcatttccccacaaagtgttgtctcactttctgcctaccttttaggtattgatcttcactatannnnnnnnnnnnnnnnnnnnnnnnnnnnnnactttacatattttatacaatgtcattcataactatggcttcttttaccacctgtaataacagactgagtctcaaacctgtaacttgtatcctgacttatctcttgctttctaaaccttgtttctaactgtctatcaaatatcttcattagacatcccacagtaattttaagctcagtgtttccaaacgtcaagtcctcatctgttatataaaatcctttctgctttgtaagttttctctttttggga

SEQ ID NO: 187271 - DNA, 890 bp, Homo Sapiens
ttgggaaatggagatgtctctcagtttccatatgtggaatttacaggaagagatagtgtcacctgccctacttgtcagggaacaggaagaattcctagggggcaagaaaaccaactggtggcattgattccatatagtgatcagagattaaggccaagaagaacaaagctgtatgtgatggcttctgtgtttgtctgtctactcctttctggattggctgtgtttttccttttccctcgctctatcgacgtgaaatacattggtgtaaaatcagcctatgtcagttatgatgttcagaagcgtacaatttatttaaatatcacaaacacactaaatataacaaacaataactattactctgtcgaagttgaaaacatcactgcccaagttcaattttcaaaaacagttattggaaaggcacgcttaaacaacataaccattattggtccacttgatatgaaacaaattgattacacagtacctaccgttatagcagaggaaatgagttatatgtatgatttctgtactctgatatccatcaaagtgcataacatagtactcatgatgcaagttactgtgacaacaacatactttggccactctgaacagatatcccaggagaggtatcagtatgtcgactgtggaagaaacacaacttatcagttggggcagtctgaatatttaaatgtacttcagccacaacagtaaaaactggaagagatggatttaaagaagaaatatctattgatatttcctatactctcaatgaagaggtatttcctaataggagaccttaaattgaacaaacctaaagtttacacttctaagagtacagttaaaagtatgtagacctgcagatcttgtaactctccactctgtgttaatgatat

SEQ ID NO: 187272 - DNA, 1493 bp, Homo Sapiens
ttgtacaaaaaagttggaacaataactattactctgtcgaagttgaaaacatcactgcccaagttcaattttcaaaaacagttattggaaaggcacgcttaaacaacataaccattattggtccacttgatatgaaacaaattgattacacagtacctaccgttatagcagaggaaatgagttatatgtatgatttctgtactctgatatccatcaaagtgcataacatagtactcatgatgcaagttactgtgacaacaacatactttggccactctgaacagatatcccaggagaggtatcagtatgtcgactgtggaagaaacacaacttatcagttggggcagtctgaatatttaaatgtacttcagccacaacagtaaaaactggaagagatggatttaaagaagaaatatctattgatatttcctatactctcaatgaagaggtatttcctaataggagaccttaaattgaacaaacctaaagtttacacttctaagagtacagttaaaagtatgtggacctgcagttcttgtaactctccactctgtgttaatgatatatttgtactaggatcttttacttgaatctaaatttactggttgatttccttctccagcctatcccctacagggaaaagctgatacttcccctatagtacaataaataattatttaaaagtcatagctccagtcactactgaaaacataattttggtgataaacataatttgagaaacttaatttctgaatgtttttatagaaaattactgaaagtctattactcatggaagacttttaaagaataaccttttttcctgttttataaattcccattgttatatggtagtatttcagctacacaatattttagcttttagctagacatttatagcttttcatttgttgaaatggtaatcatctgcatgtttttgtcacttatttcaggttagtgattgcctaacacttataagccaaaataatctttgcaaaattccatacctaaaattttgaaagcccctaatgttttcacacatctttctgtattagttatagttttgtgaaatctttgtgtgatcttcaaacattatcatttaatgtacaatactgtaaataaactgtgcatggcttttatacagctttagtaaatgtcaaataaagtggtacagactcattacaacaagtttctcataaaaatacaataaataggaaaatgaaattcagaaacccatagactgggaataggttccagttacagcttggatctggcataaaataaatttgaaataaaatattttgatgctccatttttttatgttgcttttcatactaaagaatggtgtagacatgttttgcaactgttaggtacccagttatcaattttatcaatgttttagaggaggaaattatttttttggtagaaattgttcaagaaatccttaattgaatgtcattaaatgatggtggccaaataaaacctatttagaattt

SEQ ID NO: 187273 - DNA, 1739 bp, Homo Sapiens
ttgggtcagagcccaagttctcgctaggcttgttgggtcagcgcgattggccggggcccgcgcgagcctgcgagcgaggtgcggcggtcgcgaagggcaaccgagcgggccgtgaccaccgcctccccgcgacgccccagtccagtggcctcgcgtccgcccattcagcggagacctgcggagaggcggcggccgcggcctccgcaagccgtctttctctagagttgtatatatagaacatcctggagtccaccatgaacggacagttggatctaagtgggaagctaatcatcaaagctcaacttggggaggatattcggcgaattcctattcataatgaagatattacttatgatgaattagtgctaatgatgcaacgagttttcagaggaaaacttctgagtaatgatgaagtaacaataaagtataaagatgaagatggagatcttataacaatttttgatagttctgacctttcctttgcaattcagtgcagtaggatactgaaactgacattatttgttaatggccagccaagaccccttgaatcaagtcaggtgaaatatctccgtcgagaactgatagaacttcgaaataaagtgaatcgtttattggatagcttggaaccacctggagaaccaggaccttccaccaatattcctgaaaatgatactgtggatggtagggaagaaaagtctgcttctgattcttctggaaaacagtctactcaggttatggcagcaagtatgtctgcttttgatcctttaaaaaaccaagatgaaatcaataaaaatgttatgtcagcgtttggcttaacagatgatcaggtttcagggccacccagtgctcctgcagaagatcgttcaggaacacccgacagcattgcttcctcctcctcagcagctcacccaccaggcgttcagccacagcagccaccatatacaggagctcagactcaagcaggtcagattgaaggtcagatgtaccaacagtaccagcaacaggccggctatggtgcacagcagccgcaggctccacctcagcagcctcaacagtatggtattcagtattcagcaagctatagtcagcagactggaccccaacaacctcagcagttccagggatatggccagcaaccaacttcccaggcaccagctcctgccttttctggtcagcctcaacaactgcctgctcagccgccacagcagtaccaggcgagcaattatcctgcacaaacttacactgcccaaacttctcagcctactaattatactgtggctcctgcctctcaacctggaatggctccaagccaacctggggcctatcaaccaagaccaggttttacttcacttcctggaagtaccatgacccctcctccaagtgggcctaatccttatgcgcgtaaccgtcctccctttggtcagggctatacccaacctggacctggttatcgataaggaggctcctctacaccaattaatgtagctgctagctattggcctcccaaaagactccagtactattttaatttgtattgaagaagttcagaaatttaaaaagcagagcattttttatgatatcattgttggtgttaattggaaagtataatttgctggaacacaaagaccaaaatgaaagttttttcctccctgcttaaaaattgtagccagcttcttagttactttggaacactactcttacttgtttaaagtggatggacttgactttctagcttcccc

SEQ ID NO: 187274 - DNA, 1327 bp, Homo Sapiens
  misc_feature (348)..(407): n is a, c, g, or t
  misc_feature (1065)..(1105): n is a, c, g, or t
ttggcagaactaccttttaattaaaaaaaggtgattttgctgaatttaccttgaccattttcttctgttattatgaatattcttagggtcactaaattataagaaactttctatgatgttaagagataattggcaggaaattattaaattaacatgtttgtttattttttttcagcctctacagctttacgttccagtccaataatgagaaaaaaagtatctttaaatacgtatacacctgcaaagatcctcccaacaccaccagctaccttaaagagcactaaagcaagcagcaaaccagctacaagtggaccttcaagtgcagttggtcctaatacctcatctcgnnnnnnnnnnnnnnnnnnnnnnnnnnnnnnnnnnnnnnnnnnnnnnnnnnnnnnnnnnnngaaatgaaatcttatcataagctggaactttttatacttataaaaatagtatgttcttatgtttctccttatgcatttatgtgttcacttaaaaatgtttttaaatctaaggttttctttgtttatgttcaggtaaggaactgttgtcatgatctggaaatgtttaaaacaatgtttgttagcattctgtgagcagcaaaacttatagtgataaaaatcgattgttgttaatatgatgtttaccatgtgcacatagtaatgaaaaggaacataaaagcccagcaggctcgtaccaaagtcacagcagtaatgctatgtactgcagagtctgatgagctggcctttgtgcacacttttattttcatgggattgcatcttagctgttaaaacttctagattgaaatttgacagccagggttacatattggggacttttaaagtgtctttccaaagagatttcattaaccgtttagattagaatatctttcccaattgttacagtgacatatatgctgcaatatttaacaactggagtattagccacatgggttattttttcaatctgtgttttgaatttttttattgtgtgttatttaaaatattacatatgcagctgggagaactacacctttgtgcacatagatttatatattaattnnnnnnnnnnnnnnnnnnnnnnnnnnnnnnnnnnnnnnnnngtgccttgttcatcaggaaaacttttgttttgtattttgacaagaaaggcaccttcagagtttctttttaagtatagttgacaagtgtataaatgttacactttactttcagagttctttttagatctaaagaagtcagttcaaaaatggaaatcaacaatgttatggagaaatctgaattctgttaagttagtaagtattatgtatagcatctgtttttaa

SEQ ID NO: 187275 - DNA, 1749 bp, Homo Sapiens
ccatacatcgcatcctcgtggctgccgtactccaagtactcgttattagagatgtcttgcatcatttggtcatgagatacaaagtaataattctttccattttcttcgtctttctttggaggtctggttgtatgtggaatagggtacgcaaaccggtctgggtgctttgtgatgagagtgttttttatgtgtcttctcccaacaccatgtgcgcctaataagactagtgttttcctcttgaatgctggcagttttactacttcttcatatgtgacaagatctaattgatcaaacactgcattgtgctttgccaaatatttatctttgtactgcttctttttcttgccaaaccaagtacagctggcctgctgctcctgtttggtcttctccatggcaatgcaagctactcgccattcctgaagttcaggagaaggaatgagacctgcagttccatttttggagttttccagtttaccctgccaccaattatgatcatccttactaataatctggatgatgtcaccaactctgaatcgaatgccagcttctttacaggggatgaggtcatccttggctggatcatattcaaattgtgctcttacatagatctgtcgtccttttggttgggtagttgatggcaagtccgaaacagaattgttagtgctgctatgaccattagctggggactgtctggaagtggaaggggaatctctctcacaggacgaagactgagtgcggtaacttggcacaatcttgaaggtaatactcccccgcatttccctaagcattttttgcagttgttccactgtttggttagccacactgatgccattgatttctcgaatttcatcaccaacatgaagtgtaccttgcctgtgaatcatgcccccatgcataattcttgcaacaatacaatgatttagttcattcatttttaaagtgattcccattggttcatctgtgttcttttgaaactgtaccagccgaactctggtcacattctccatatccatgtctccgttagcactttctggagaatcgccgtttaaatagggagaggtgggaggaggtgtgaccctcaatgcttcatcactgtaaacttcatgtgccactacgtcgtgagtctgaagtaaggccatgaaatgaggttgtgttaaaatacgctttagttcctttgcgtcgttattctcagggtaacatgaaatttcttccaatacctctttggctctctgtactgcatcgcttggaggattcctgatttgtggtgaagactttgtgttaattttgtcatacagatctagtagtgtgtgaagatgctgatcctggaaaacactgtgtagaaaatctaggtccttttcactgcagtctgtaagcgcatgaatctcttccaggctgtccagcacctgtgagactgctcctgaggaggtagggtcttcggagaaatctggtaactcttcagggggatccccatagaatgagttgaatttgtgacttgacacagcggctagtactgcaccctttagtttcctccttgcattgaatttcctcagctgctctactgtttctggaagatgaatcttgtaggcgtaacgatcccgctccttaagccatgggtgattcagtgcttcataaacagtgatcctttcagctggatccagcatcagcatgcgacgtactaggtctttggcactttcagagatatggctccactgccttggattcatcttatattttcccaacttttttgta

SEQ ID NO: 187276 - DNA, 905 bp, Homo Sapiens
ttggcttcaagattgtgccaagttaccgcactcagtcttcgtcctgtgagatctatgtaagagcacaatttgaatatgatccagccaaggatgacctcatcccctgtaaagaagctggcattcgattcagagttggtgacatcatccagattattagtaaggatgatcataattggtggcagggtaaactggaaaactccaaaaatggaactgcaggtctcattccttctcctgaacttcaggaatggcgagtagcttgcattgccatggagaagaccaaacaggagcagcaggccagctgtacttggtttggcaagaaaaagaagcagtacaaagataaatatttggcaaagcacaatgcagtgtttgatcaattagatcttgtcacatatgaagaagtagtaaaactgccagcattcaagaggaaaacactagtcttattaggcgcacatggtgttgggagaagacacataaaaaacactctcatcacaaagcacccagaccggtttgcgtaccctattccacatacaaccagacctccaaagaaagacgaagaaaatggaaagaattattactttgtatctcatgaccaaatgatgcaagacatctctaataacgagtacttggagtacggcagccacgaggatgcgatgtatgggacaaaactggagaccatccggaagatccacgagcaggggctgattgcaatactggacgtggagcctcaggcactgaaggtcctgagaactgcagagtttgctccttttgttgttttcattgctgcaccaactattactccaggtttaaatgaggtaagaatctcttcagcgtctgcagaaggagtctgacatcttacagagaacatatgcacactacttcgatctcacaattatcaaccattgaaa

SEQ ID NO: 187277 - DNA, 1444 bp, Homo Sapiens
ttggccccagtctttatcagaccctctgctttgaagatgcagctctgtggcgtacttattataataattcaatgtgtgagcaagagtttccatctatccttgcaaagaaagtttccttatttcagcagattcttgtagtacaggtgctaagaccggacagattgcaaagtgccatggctctttttgcatgtaaaactctgggactgaaagaggtgtccccactgcctctaaatctcaaacgtttatacaaagagacactggaaattgaacccatcttgataattatttctccgggtgctgatccttctcaggaacttcaagaactagctaatgctgaaagaagcggagagtgttatcaccaggttgccatgggtcaaggtcaagctgatttagcaattcaaatgctaaaagaatgtgcccgcaatggagactggctctgtttgaagaacttacatcttgtggtatcttggctgccagttctggaaaaggaattgaatactcttcaacctaaagatacctttcgtctttggctcactgcagaagttcatcccaactttactcctattttactacagtcaagtctgaagataacatatgagtcacctccaggtttaaagaagaatttaatgcgtacttatgagtcttggactcctgagcaaattagcaaaaaagataatacacatcgagctcatgctctcttcagtcttgcatggtttcatgctgcatgtcaagaaagaagaaactatattcctcagggttggacaaagttttatgaattttctttatcagatcttcgggctgggtacaacattattgacagactttttgatggtgccaaagatgtacaatgggaatttgtacatggtttacttgaaaatgctatttatggaggacgtatagacaactattttgaccttagagttcttcagtcatacctgaagcagttttttaattcttcagttattgatgtattcaaccaaaggaacaagaaaagcatttttccatattccgtatctctaccacaatcctgcagcattttggactatcgtgctgtcattgagaaaattccagaggacgacaaacctagtttctttggtctgcctgccaatatcgctcgctcatctcagcgcatgatcagttctcaggttatttcacagttgaggattttgggcagatccataacagctggttccaaatttgacagagaaatctggtctaatgaactttctcctgtcctcaatctctggaagaaactaaaccagaattcaaacctaatacatcagaaagtgcctcctcctaacgatcgacaaggatctccaatactgtcattcatcattcttgaacaatttaatgctattcgtttagtacaaagtgtccaccagtctcttgctgctctcagcaaagtcatcagaggaactactttactgagttcagaagtacaaaa

SEQ ID NO: 187278 - DNA, 1183 bp, Homo Sapiens
  misc_feature (1092)..(1113): n is a, c, g, or t
ttggggattaaggcctgggaattggagtctcaccatggctccccttccttgtctggggcctggacacactgaggacaatgcggctatagcagatggccatggcagtcagtggcagcagaaagaggcagcagaaggtgaagaggttataggtggtctcttgccattgagccttgaagctgcctttggtgacacactgagtgaaagggactgggccagctcagtggaccgtgtggaacaggaacagctggagtggagttgaggactattagaactggttcccctcaccacccaacctacccacctatgtcatactgtctcctcccaattcatccttaattccaagtgaagcagcacagtgctgagaaacagttcatccatggtgccatgttaaagaagttggaaatatatcttgaaaatcctatcttccttttaggcttgaatatgatgctgaacagtaagtttgttaaatcttggaacttaaaacaatcctgctttctcaagtactattctaacattgcgctttataagggatgatatttctaccacctcactcatatttttagctgaaatgattttcctggtatgtctgttattttgtggaaaaagaaatattgtgtaaaatgggtgctgccaaaattccaggccattttgcagggactctgaagtgacctttagtagtaatagtcttatgtgcagtaactataatggtaaagaatgttaaataataaaatttaacattttccaaatgctattgggctgcccctccccctttttgttaaattgctgggttttccaactgaatcagtaaaaactatttctgtttagagctacaaggttaaagtgcctgctttccagtaatggagattgagtcactattaatttgataaaaggtaagctcagtaggcatcagattcctagatacaaggcatttgggaaagtgattttagcagacatgagggacatttaggaaagatgaatagtttcagcctaagagaattttgtgaactgtttggagttacgatcaggctactctgagctagttgggaaatggtctttcctcttcccatctcttgcattcatatatttctaagnnnnnnnnnnnnnnnnnnnnnngtgctctgcctaagaagtgcttgagaattgtgaggagtataaaaatagtcaaagctggctgggcgcggtg

SEQ ID NO: 187279 - DNA, 1976 bp, Homo Sapiens
  misc_feature (170)..(215): n is a, c, g, or t
ttggctcaagcaaatgatcaagaagttggatgccagctgtgcagcgaacaatcccagcctaaaacttacatacacagaatgtctgagggtttgtggcaactggttagcagaaacgtgcttagaaaatcctgcggtcatcatgcagacctatctagaaaaggcagtagaannnnnnnnnnnnnnnnnnnnnnnnnnnnnnnnnnnnnnnnnnnnnngaaaaatgaaggcatttctctcattagcccggttttcagatactcaataccaaagaattgaaaactacatgaaatcatcggaatttgaaaacaagcaagctctcctgaaaagagccaaagaggaagtaggtctccttagggaacataaaattcagacaaacagatacacagtaaaggttcagcgagagctggagttggatgaattagccctgcgtgcactgaaagaggatcgtaaacgcttcttatgtaaagcagttgaaaattatatcaactgcttattaagtggagaagaacatgatatgtgggtattccgactttgttccctctggcttgaaaattctggagtttctgaagtcaatggcatgatgaagagagacggaatgaagattccaacatataaatttttgcctcttatgtaccaattggctgctagaatggggaccaagatgatgggaggcctaggatttcatgaagtcctcaataatctaatctctagaatttcaatggatcacccccatcacactttgtttattatactggccttagcaaatgcaaacagagatgaatttctgactaaaccagaggtagccagaagaagcagaataactaaaaatgtgcctaaacaaagctctcagcttgatgaggatcgaacagaggctgcaaatagaataatatgtactatcagaagtaggagacctcagatggtcagaagtgttgaggcactttgtgatgcttatattatattagcaaacttagatgccactcagtggaagactcagagaaaaggcataaatattccagcagaccagccaattactaaacttaagaatttagaagatgttgttgtccctactatggaaattaaggtggaccacacaggagaatatggaaatctggtgactatacagtcatttaaagcagaatttcgcttagcaggaggtgtaaatttaccaaaaataatagattgtgtaggttccgatggcaaggagaggagacagcttgttaagggccgtgatgacctgagacaagatgctgtcatgcaacaggtcttccagatgtgtaatacattactgcagagaaacacggaaactaggaagaggaaattaactatctgtacttataaggtggttcccctctctcagcgaagtggtgttcttgaatggtgcacaggaactgtccccattggtgaatttcttgttaacaatgaagatggtgctcataaaagatacaggccaaatgatttcagtgcctttcagtgccaaaagaaaatgatggaggtgcaaaaaaagtcttttgaagagaaatatgaagtcttcatggatgtttgccaaaattttcaaccagttttccgttacttctgcatggaaaaattcttggatccagctatttggtttgagaagcgattggcttatacgcgcagtgtagctacttcttctattgttggttacatacttggacttggtgatagacatgtacagaatatcttgataaatgagcagtcagcagaacttgtacatatagatctaggtgttgcttttgaacagggcaaaatccttcctactcctgagacagttccttttagactcaccagagatattgtggatggcatgggcattacaggtgttgaagtgtcttcagaagatgctgtgagaaaaccatggaagtgatgagaaactctcagaaactctgttaaccattgtagaggtccttctatatgatccactctttgactggaccatgaatcctttggaaagctttgta

SEQ ID NO: 187280 - DNA, 1370 bp, Homo Sapiens
  misc_feature (1305)..(1324): n is a, c, g, or t
aattacagtacacattatatctcttagaattgaggaaaaggaaaaccccactcaagtgaggtaacaaacttgccatcttttacaaaatttcattagaactgacaatgttatggtgagtccttaattcctgagaatttgaattattaagttttctgtgaacttaaaacaaacgctcacattaatttttaaattacagtatgtctgaaaaaataaaattaatgttaatgttatcaagaaaaatcatcatccaaatgtacatattaacctattagatgtgaatatactgaagccctgttgctctgcagtttgacaccatttaaattcgtttccaggatcttatttcaaatatatgaacttataatttatccagatagcagtgacattattttgacctaaaggaaaaataattgtctgtcattttcttctcaactgtaggtatccagggagtcagcatgtgaactctatctagtattgataaaataattaatttacatgtgtagggataatgaacacagaacatgtgattctcttctagtaacaatttctatcccttaataggagatgatttcagagaagttagagaagaaaaacagagaaaacaatactgttgctatgaaatgacgaatttgatataatcaaatgcaagatcattaatataaacacttataataatgaaaatataaattattaattatgcagcatgctttagggccatttctacagttattatgaattacaaatattaaatgcctttaatctatccactgttcataattctgtaagccatgtttacataataaacaaaaaacatttcctacatattctgtctcttctgacttttaacaattaaagtatttatcttgggctggcaagttaccctgaccctaaccagtaagtacaaacagggcattgtacacccattttaaaagctggaatcaaagaataatgttagaagtatttgcaggatttatccaaagaaatgtttagcagacaaatgcaatagaaaaaaatcaagcatttcccaaaatggtgtttgtattagaaagttttaaacttttgttttcattgtaaaggtatcactttattttatttttaaaaggccatgattaaccatttaataacttacatacctttacaaaaataaaactaacagcttgctgggcacaaaatttactcaaaatctttctgtatttttaaaatcagtaagtgatgtatcttgctagcgctttattctcacagtggtattttttaaaagcctgaacagtgtaattatttaatttgatgttttaaattatacttgatatnnnnnnnnnnnnnnnnnnnncccaactttcttgtacaaagttgtgccaacttttttgtacaaagtt

SEQ ID NO: 187281 - DNA, 1976 bp, Homo Sapiens
  misc_feature (262)..(285): n is a, c, g, or t
  misc_feature (588)..(624): n is a, c, g, or t
  misc_feature (1545)..(1553): n is a, c, g, or t
ttggtgaagatattgtaaattttgaagaactagtaaaagaagaaggtcttgcagaagaaacattaaaagcagcaaggcatttggattcagtcctcagtgatcacacacgaaattctgccgaaggcacagaatatttcaaaatgcttgtagacgtttttgctccagaatttcgaaggccaaagaatatacatctccgaaatttctatataattgttccccctctgaccctcaactttgtagagcattccattagttgcaaggnnnnnnnnnnnnnnnnnnnnnnnnttggagctgcctttactgatgatggctttgccatgggtgtggcttacattctaaagcttttggatcagtatcgggagtttgattcacttcactggttccagtctgttagagagaaatacctgaaggagataagagcagttgctaagcaacagaatgtacagtcagccagtcaagatgaaaaactcttacaaaccatgaatctcactcagaagcgactggatgtctatctacaggaatttgaattgctgtatttctcactgagcagtgcaagaattttcttcagagcagacaagactgcggctnnnnnnnnnnnnnnnnnnnnnnnnnnnnnnnnnnnnnctaaaacaagcaatggagacctgtctgacagcactgtgtctgctgatcctgttgtgaaatgatacggatggtattcactgcacatatgatgaaatcatcagaattgttaaaacttttgccagtggaatggataaactattgatgaattgtttcctgggtcacatctctggaaatagatgttacagttcttaaaggcagtgctttaaagtgaagttcattctgtttccaaaggctctactttcaaaggttaagaatgagattttaaaattggatttttgcctggacttgagggtacaagatgtttctatttgaagtgaagttataaaagggcaaatccagattcataaactatcacctcggatttcttgtaatctacatgtttgtaatttgtatttgcatagatctttgatctatagttatttcaagtcatgggaaattcaatgcatatactatatacagccagtaaatacatgcttaacaaaaggaatgagcctgaagttcataaagaatacatatcaatattcttataaaaggaatatatgaagatggctttgatactagaggtgaggcacaagtgttttatgtactctcagtgtacagtataactgatgatccttctttcattgttaatttcatgtgactcacaagagctgctgatgtctttgatgagacattttataactagtttacattgctttgagaacatttaacctccaacagctgctttaaatttaagatttacttaatactcagaaaattcagataaagccatagagtcctgtttgaagcttcacttctattttggttgaaggcatgatgtatgatgtcagaaaaaaaattgaatgaattatttctacatccaaactcaggtttcttctacattagattgaattgaaattttggtgatggtttgggtagacnnnnnnnnnatatcaagtataatttaaaacatcagattaaataattacactgttcaggcttttaaaaaaataccactgtgagaataaagcgctagtaagatacatcacttactgattttaaaaatacagaaagatttgagtaaattttgtgcccagcaagctgttagttttatttttgtaaaggtatgtaagttattaaatggttaatcatggccttttaaaaataaaataaagtgatacctttacaatgaagacaaaagtttaaactttctaatacaaacaccattttgggaaatgcttgatttttttctattgcatttgtctgctaaacatttctttggataaatcctgcaaatacttctaaacattaatcctgtgattcagcttttaaaaatgggtgtacaatgccctgtttgtacttactggttaggg

SEQ ID NO: 187282 - DNA, 831 bp, Homo Sapiens
  misc_feature (51)..(80): n is a, c, g, or t
  misc_feature (372)..(380): n is a, c, g, or t
ttggataaattttcgtcacctttataaacagcgcagacggcgctatggacnnnnnnnnnnnnnnnnnnnnnnnnnnnnnngatttagatggcttcttgccagtttgagcctaatctgattcttacagttttaccttcttgaaccaatgtaaaagtttttttaatgttaaatgattaaattctcagtgaggctatcttccttttccccagtaacattcctgaatttactgttatcttattgtagtacttgcatgacatggattcctgatatctgatgagaggttcattcttgtgtattcagttaatgacaccaaaaggctcagcccaccccaaccctatctcatgttcagtctgtctaatacatgccagagannnnnnnnncaaaaagtgctttatccctacaatgtactgacagttcttacagttgagatttgttcttttcagctattgcttgtgaaaaaaagcaagactatgtcactctatagaaggctgttaaagtgactcaggcaggaattaattattctgtacctaaggggttacttgtttaatgggatggcattgactttttgaaaatcaagtggactgagtcattgataaaacatttctaagagtggggctagagaacatactttacatctgacatcctttggcctaacaacatctattattatagtgctcagcagtgtgggcattgaagaggcgcagaatgctttgaaagaaactaatcagaatcttggaacatcatgatcatgccattcttaagtaaatcaactattttcaacactgaagaaaaatgaaacattatttagaaaacaatgagattacaagttcc

SEQ ID NO: 187283 - DNA, 1104 bp, Homo Sapiens
ttggcttctgcctgcgcaggccatttatgccagtgttcttcctggagagttgatgagggggtacatgacccagtttcccaccttcccaagctggctggggaagcactcgtctacaggcaaacatgatcgtattgttcaggacctggccttgcatatgagtctcagaacttactccagcaaaaggactgtaaacatggattatctgtcgcttctaagggatgcacttgtacagcccttgacctcacaaggagtagacggagtacaggatgttgttgcacttatggacacatattatttgatgaaagaagactttgagaatatcatggaaatcagcagctggggtggcaaacctagtcccttttcaaagctggatcccaaggtgaaagcagccttcacaagagcttacaataaggaagcccaccttactccatactcacttcaagctataaaggcatctagacacagcacaagcccatccctggattcggaatacaatgaagaattaaatgaagatgactctcaatctgatgagaaagaccaagatgctatagaaactgatgccatgatcaagaaaaagacaaaatcttcaaagccttcaaaaccagaaaaagataaggagcccagaaaaggaaaaggaaaaagttcgaagaaatgaaaccatttttcactagcgacagccactttttactctccctcctgaccagtccagctggtctagagaaagccttgttttttcccagagcaaccatgttttagcataatgggatgacctggtgtcccattataaataaagggtggtatggctagaagggtatgagcagtaggcttatgtacacctcttatagaggttgataggactgcttgggtcctccactgtcctctgtcatctagttagacgtgcttctgaatgactgtagaattggaactagaaactacacctgggctttggagtcagattttagttaacaataatgagcctgggagcagtagtactaaggcgtcttttgtaggcttaagaatttatcctaatggccctttataggacccaatgctgattttttttaaaggcagttcctattatgtggctgaaattttgtaaataaa

SEQ ID NO: 187284 - DNA, 1333 bp, Homo Sapiens
  misc_feature (405)..(655): n is a, c, g, or t
  misc_feature (666)..(677): n is a, c, g, or t
  misc_feature (955)..(989): n is a, c, g, or t
tcaaggggacatttgcagtttccaaaccttgaagatactgaagggaccagaaagttcctttgagtggctggtcacccaaagctcccggtcctccacccactgccctttggagggactcaaaccttgggaggagaaggctgagcttcctgtgggcccctcccacccacacctgagccagagagaagactgcagcaaagacatccaaagccaacggcaagggaagcgtcagcggaggcagaggagccagccctgtccttggctcacccagcttccaccatacaggaacccaagaccccagccttgcttccacagagaactggcaggggtcccctggcctggccatcacagggactcacatgggagccttttaaaactccagatggtggctgagcacagtgattcatnnnnnnnnnnnnnnnnnnnnnnnnnnnnnnnnnnnnnnnnnnnnnnnnnnnnnnnnnnnnnnnnnnnnnnnnnnnnnnnnnnnnnnnnnnnnnnnnnnnnnnnnnnnnnnnnnnnnnnnnnnnnnnnnnnnnnnnnnnnnnnnnnnnnnnnnnnnnnnnnnnnnnnnnnnnnnnnnnnnnnnnnnnnnnnnnnnnnnnnnnnnnnnnnnnnnnnnnnnnnnnnnnnnnnnnnnnnnnnnnnnnnnnnnnnntctgtcttggnnnnnnnnnnnntacagatggccaggcttgcctctagattggctgggccagaatttctggggtcagtctgaaaagtctgcattcttagcccgggattcagatgatcattaggtttgggaatcttaaatagagtctcccttctctcttttcactgttagggagggagagggagtgatgtttttgatgctctgttactttagctgaaggattttctatcaatcttcacaatctgtcttgaaatggttcccatcagccacttcgtgcaggaatccaaggggctaagaaacatnnnnnnnnnnnnnnnnnnnnnnnnnnnnnnnnnnnggcccactgtgcccagagacccacacgcgcagcaggctgccaggaaaccaggactcagggcccaccacaatctggaaggaacatcaagtccccaggtatagccacggcggctcttggcccatggtctggtggccaaggaggcatcagctgctggtcacaggtggcgggccgcttcccagaggatctgcagagccatggaggcgcaggggagctgggccagggtgtaggtcacggagcggatgggtgcccgcagcttccccaggtaggccacggtgtgtgccacacggcccacgaggaagaccaggaagtgcatccaggcgacaaaagggttaggacccagccaa

SEQ ID NO: 187285 - DNA, 2015 bp, Homo Sapiens
  misc_feature (744)..(785): n is a, c, g, or t
ttggcagaaggtcggggctgtcggccggccacagggatgtcttttactatagcccgagcgggaagaagttccgcagcaagccgcagctggcgcgctacctgggcggctccatggacctgagcaccttcgacttccgcacgggcaagatgctgatgagcaagatgaacaagagccgccagcgcgtgcgctacgactcctccaaccaggtcaagggcaagcccgacctgaacacggcgctgcccgtgcgccagacggcgtccatcttcaagcagccggtgaccaagattaccaaccaccccagcaacaaggtcaagagcgacccgcagaaggcggtggaccagccgcgccagctcttctgggagaagaagctgagcggcctgaacgccttcgacattgctgaggagctggtcaagaccatggacctccccaagggcctgcagggggtgggacctggctgcacggatgagacgctgctgtcggccatcgccagcgccctgcacactagcaccatgcccatcacgggacagctctcggccgccgtggagaagaaccccggcgtatggctcaacaccacgcagcccctgtgcaaagccttcatggtgaccgacgaggacatcaggaagcaggaagagctggtgcagcaggtgcggaagcggctggaggaggcgctgatggccgacatgctggcgcacgtggaggagctggcccgtgacggggaggcgccgctggacaaggcctgcgctnnnnnnnnnnnnnnnnnnnnnnnnnnnnnnnnnnnnnnnnnncctgacccggacccggagatggagcacgtctagggcagaggccctgccgagagcccgtgctgcctgctggagccgcctgcagacgcggtcctcggccccacgtgaaccaggctcggcggcgaagcccagccttggagacacccaggaggaaggccgtgctcctggctccctcctcggcccgtccccacttcccggggcctcggggcacacagctggggctgcccccacccgaaagaccctccacgctcgtcctctacagagtccggcttcgggaagtgccgggtgctcctgggccctgcctggctccctacgacctttgggctcgaggccagctcctccccatgcccgctgtcccagctccttgagactggagagcagccagcaggtgcccggcagctcggcgccacggcttgctgacagctgggagggtttctcggtctggaggcgtagttttgaaactcacatcacccactgtgcaacgtgaggacgggactctggtctgctgtggggggcatgcaggacggcgccactctctgccctgccatgcagctggtggtgccacagagcctcaccgtgcctgattggcgtgcccaggaggccgctctccttcagtaaatgtaacacagtcgaggcacgtcatcgggcagccttccctgtgtgccaacgccagccttcgcttctgaaaaccaaactccagccgctgccagtcgggacttggtcgcccggcgctgccagaatgctccactgccagccggcccccctgcctcggtttcccttctgtttagtggcgacacaggcacccagctttggggtggtgctgacgctcccaggggtgccaggagccactgggacagggtgaggctcccagacgctcctcgaggtgcccagctctccagggagcttctggcccaaggccgtctgagggatctgctccttaaccccccagtgccttggcgagggcaggttccaagccacagacgcctgccccgagtggactctgcggccagtccctggtgccctcctggccctgctgcccagtgagggctcctacaggtgggttcattggcctgggcccagcgagcccccacctgcattgaccttaggcccatagagagggcctgtcccggtgctgccccagccaggatctggtcgctgccccagggggactgatgggcagagtcgcccctgtggctggactgtgaccatccctgatggggcctgaccgcggga

SEQ ID NO: 187286 - DNA, 1098 bp, Homo Sapiens
  misc_feature (178)..(208): n is a, c, g, or t
  misc_feature (661)..(689): n is a, c, g, or t
  misc_feature (906)..(916): n is a, c, g, or t
agcaatgcttttttataatgccaactttgtacaaaaaagttggcttagatcatagttttatttatatttattgactcttgagttgtttttgtatattggttttatgatgacgtacaagtagttctgtatttgaaagtgcctttgcagctcagaaccacagcaacgatcacaaatgacnnnnnnnnnnnnnnnnnnnnnnnnnnnnnnngttgttgggggaggggagactttgatgtcagcagttgctggtaaaatgaagaatttaaagaaaaaaatgtcaaaagtagaactttgtatagttatgtaaataattcttttttattaatcactgtgtatatttgatttattaacttaataatcaagagccttaaaacatcactcctttttatttatatgtatgtgtttagaattgaaggtttttgatagcattgtaagcgtatggctttatttttttgaactcttctcattacttgttgcctataagccaaaattaaggtgtttgaaaatagtttattttaaaacaataggatgggcttctgtgcccagaatactgatggaatttttttgtacgacgtcagatgtttaaaacaccttctatagcatcacttaaaacacgttttaaggactgactgaggcagtttgaggattagtttagaacagnnnnnnnnnnnnnnnnnnnnnnnnnnnnnctgctttagacttgaaaagagacaggcaggtgatctgctgcagagcagtaagggaacaagttgagctatgacttaacatagccaaaatgtgagtggttgaatatgattaaaaatatcaaattaattgtgtgaacttggaagcacaccaatcttactttgtaaattctgatttcttttcaccattcgtacataatactgaaccacttgtagatttgannnnnnnnnnnaatctactgcatttagggagtattctaataaagctagttgaatacttgaaccataaaatgtccagtaagatcactgtttagaattgccatagagtacactgcctgccttaagtgagggaatcaaagtgctattacgaagttctagatcaaaaaggcgtataaacagagtaatcttgttggtt

SEQ ID NO: 187287 - DNA, 2273 bp, Homo Sapiens
  misc_feature (1239)..(1269): n is a, c, g, or t
  misc_feature (1722)..(1750): n is a, c, g, or t
  misc_feature (1967)..(1977): n is a, c, g, or t
ttggacctcattattcgatggcaaggcagttcggttaaccagtgtctgaatggagcaaattcactgacaaaaagctttgcagacacagattgtcgagtaattttgaagaaaggctgctttgagtattcctctgactctcaagtctgacaattgtttttccagtctgctgaagatatacgggatgatgggaacccgatcaaggaaatcactgacaaaataatcgatcttgttagtaaacgtgatggaaacagctcgctgattgctgccgttgcagaagtaagagttcagaggcggcctctgaagaacagaacagatttccttgttcccttgctgagctctgtcttaactgtggcttggatctgttgcttggtgacggccttctactggtgcctgcggaagcggcggaagccgggcagccacacacactcagcctctgaggacaacaccaccaacaacgtgcgggagcagctgaaccagatcaaaaaccccattgagaaacatggggccaacacggtccccatcaaggattacgagaacaagaactccaaaatgtctaaaataaggacacacaattctgaagtagaagaggacgacatggacaaacaccagcagaaagcccggtttgccaagcagccggcgtacacgctggtagacagagaagagaagccccccaacggcacgccgacaaaacacccaaactggacaaacaaacaggacaacagagacttggaaagtgcccagagcttaaaccgaatggagtacatcgtatagcagaccgcgggcactgccgccgctaggtagagtctgagggcttgtagttctttaaactgtcgtgtcatactcgagtctgaggccgttgctgacttagaatccctgtgttaatttaagttttgacaagctggcttacactggcaatggtagtttctgtggttggctgggaaatcgagtgccgcatctcacagctatgcaaaaagctagtcaacagtaccctggttgtgtgtccccttgcagccgacacggtctcggatcaagctcccaggagcctgcccagccccctggtctttgagctcccacttctgccagatgtcctaatggtgatgcagtcttagatcatagttttatttatatttattgactcttgagttgtttttgtatattggttttatgatgacgtacaagtagttctgtatttgaaagtgcctttgcagctcagaaccacagcaacgatcacaaatgacnnnnnnnnnnnnnnnnnnnnnnnnnnnnnnngttgttgggggaggggagactttgatgtcagcagttgctggtaaaatgaagaatttaaagaaaaaaatgtcaaaagtagaactttgtatagttatgtaaataattcttttttattaatcactgtgtatatttgatttattaacttaataatcaagagccttaaaacatcactcctttttatttatatgtatgtgtttagaattgaaggtttttgatagcattgtaagcgtatggctttatttttttgaactcttctcattacttgttgcctataagccaaaattaaggtgtttgaaaatagtttattttaaaacaataggatgggcttctgtgcccagaatactgatggaatttttttgtacgacgtcagatgtttaaaacaccttctatagcatcacttaaaacacgttttaaggactgactgaggcagtttgaggattagtttagaacagnnnnnnnnnnnnnnnnnnnnnnnnnnnnnctgctttagacttgaaaagagacaggcaggtgatctgctgcagagcagtaagggaacaagttgagctatgacttaacatagccaaaatgtgagtggttgaatatgattaaaaatatcaaattaattgtgtgaacttggaagcacaccaatcttactttgtaaattctgatttcttttcaccattcgtacataatactgaaccacttgtagatttgannnnnnnnnnnaatctactgcatttagggagtattctaataagctagttgaatacttgaaccataaaatgtccagtaagatcactgtttagatttgccatagagtacactgcctgccttaagtgaggaaatcaaagtgctattacgaagttcaagatcaaaaaggcttataaaacagagtaatcttgttggttcaccattgagaccgtgaagatactttgtattgtcctattagtgttatatgaacatacaaatgcatctttgatgtgttgttcttggcataaattttgaaaagtaatatttattaa

SEQ ID NO: 187288 - DNA, 1726 bp, Homo Sapiens
ttggatattaatgactgtgagagcaacccttgtagaaacggtggcacttgcatcgatggtgtcaactcctacaagtgcatctgtagtgacggctgggagggggcctactgtgaaaccaatattaatgactgcagccagaacccctgccacaatgggggcacgtgtcgcgacctggtcaatgacttctactgtgactgtaaaaatgggtggaaaggaaagacctgccactcacgtgacagtcagtgtgatgaggccacgtgcaacaacggtggcacctgctatgatgagggggatgcttttaagtgcatgtgtcctggcggctgggaaggaacaacctgtaacatagcccgaaacagtagctgcctgcccaacccctgccataatgggggcacatgtgtggtcaacggcgagtcctttacgtgcgtctgcaaggaaggctgggaggggcccatctgtgctcagaataccaatgactgcagccctcatccctgttacaacagcggcacctgtgtggatggagacaactggtaccggtgcgaatgtgccccgggttttgctgggcccgactgcagaataaacatcaatgaatgccagtcttcaccttgtgcctttggagcgacctgtgtggatgagatcaatggctaccggtgtgtctgccctccagggcacagtggtgccaagtgccaggaagtttcagggagaccttgcatcaccatggggagtgtgataccagatggggccaaatgggatgatgactgtaatacctgccagtgcctgaatggacggatcgcctgctcaaaggtctggtgtggccctcgaccttgcctgctccacaaagggcacagcgagtgccccagcgggcagagctgcatccccatcctggacgaccagtgcttcgtccacccctgcactggtgtgggcgagtgtcgggcttccagtctccagccggtgaagacaaagtgcacctctgactcctattaccaggataactgtgcgaacatcacatttacctttaacaaggagatgatgtcaccaggtcttactacggagcacatttgcagtgaattgaggaatttgaatattttgaagaatgtttccgctgaatattcaatctacatcgcttgcgagccttccccttcagcgaacaatgaaatacatgtggccatttctgctgaagatatacgggatgatgggaacccgatcaaggaaatcactgacaaaataatcgatcttgttagtaaacgtgatggaaacagctcgctgattgctgccgttgcagaagtaagagttcagaggcggcctctgaagaacagaacagatttccttgttcccttgctgagctctgtcttaactgtggcttggatctgttgcttggtgacggccttctactggtgcctgcggaagcggcggaagccgggcagccacacacactcagcctctgaggacaacaccaccaacaacgtgcgggagcagctgaaccagatcaaaaaccccattgagaaacatggggccaacacggtccccatcaaggattacgagaacaagaactccaaaatgtctaaaataaggacacacaattctgaagtagaagaggacgacatggacaaacaccagcagaaagcccggtttgccaagcagccggcgtacacgctggtagacagagaagagaagccccccaacggcacgccgacaaaacacccaaactggacaaacaaacaggacaaca

SEQ ID NO: 187289 - DNA, 960 bp, Homo Sapiens
ttggcataccccagatttctctcctgaccttttggggcaaagaggtgggtatttactaacttgaaggaaaactagagtggggaaaaggccggcaaattagtgacactttggcgagggagaaaaaggaggcagtttgccacttggagaagatgaggaagacagggttgcaagacggtgactccaaaagagggagctcgacaggggtaatgtaaacagagatgctaactaagtcagaaaactctcctggtgaccaaaagagaaccactattgggggtaatggctagatttggtctcctttaacttaaggaggggagatttgagaatgacagacagttgaacttcctggcagcagcaagcaaaaaacaaatcaggaagagtttagtgtgtcttctggcaggggacaccagggcccagcacaggagaaggtggcccctgtgagatactggtgggctatataggcgttttctgaggggctttgggaggcatgaacaaaggtggaaacattgctgttggcttcggcagtatctgaatttactgtgagatggagggtttaaatctaaccccatggaatgcaggagtccatgaattatctaaatcgatcattttgatctttaatcaactctgcaattatgtgtaccttgtttgctcaattaaaccctgaactatttgagaatgaaagctatgctgttcctctagtgcaagcctcagggcctgtcctgtgcctacaggatgtccccattctgccaaaacctgtccctcttccagagactcctacttcaatgtctcttgctagaaacacatccctttcctcacacatccagtcactcatcaagtgtaatctgtctcctaaatatctctggaacctatcttcttttctccaagttaccatcacctcttgtctaaactgctacggaaacttcctaacctgttctcccatttccacttctgacttccatgctg

SEQ ID NO: 187290 - DNA, 887 bp, Homo Sapiens
ttggtgctgattgcgaccgaagaagtcggattgaagctttggaactcttgggtgcctcctttgcaaatgaccgtgagaactatgacatcataaagacataccactatctatatttagccatgttagagaggttccaagatggtgataacattctcgaaaaagaggttcttccaccaatccatgcttatgggaatagaactgaatgtagaaatcctcaggaactggagtccattcggcaagacagagatgctcttcatatggaaggccttatagttcgggaacggattttaggtgctgacaatattgatgtttctcatcccatcatttacagaggagctgtttatgcggataatatggaatttgagcagtgtatcaagttgtggcttcatgccctgcacctcagacaaaaaggtaacaggaacacccacaaggatcttcttcgatttgctcaagttttctcacaaatgatacatttgaatgaaactgtgaaggccccagacatagaatgtgttttgagatgcagtgttttggaaatagaacaaagtatgaacagagtgaaaaatatttcagatgctgatgtccacaatgctatggacaattatgaatgtaatctctatacctttctgtatttagtgtgcatctctaccaaaacacagtgcagcgaagaagatcagtgcaaaattaacaagcagatctacaacctgattcaccttgatcccagaactcgtgaaggtttcaccttgctgcatctggctgtcaactccaatactccagttgatgatttccacaccaatgacgtctgcagctttccaaatgcacttgtcacaaagctcctgctggactgtggtgctgaggtgaatgccgtggacaatgagggaaacagccaa

SEQ ID NO: 187291 - DNA, 1113 bp, Homo Sapiens
tttgtacaaaaaagttggcaaccaaatgggtctactattctattatgcttcagggtcagacgtgttctccatctcactggataatggtactgtcatcatggatgtaaagggaatcaaagttcagtcagtagataagcagtacaatgatgggctgtcccacttcgtcattagctctgtctcacccacaagatatgaactgatagtagataaaagcagagttgggagtaagaatcctaccaaagggaaaatagaacagacacaagcaagtgaaaagaagttttacttcggtggctcaccaatcagtgctcagtatgctaatttcactggctgcataagtaatgcctactttaccagggtggatagagatgtggaggttgaagatttccaacggtatactgaaaaggtccacacttctctttatgagtgtcccattgagtcttcaccattgtttctcctccataaaaaaggaaaaaatttatccaagcctaaagcaagtcagaataaaaagggagggaaaagtaaagatgcaccttcatgggatcctgttgctctgaaactcccagagcggaatactccaagaaactctcattgccacctttccaacagccctagagcaatagagcacgcctatcaatatggaggaacagccaacagccgccaagagtttgaacacttaaaaggagattttggtgccaaatctcagttttccattcgtctgagaactcgttcctcccatggcatgatcttctatgtctcagatcaagaagagaatgacttcatgactctatttttggcccatggccgcttggtttacatgtttaatgttggtcacaaaaaactgaagattagaagccaggagaaatacaatgatggcctgtggcatgatgtgatatttattcgagaaaggagcagtggccgactggtaattgatggtctccgagtcctagaagaaagtcttcctcctactgaagctacctggaaaatcaagggtcccatttatttgggaagtgtggctcctggaaaggctgtgaaaaatgttcagattaactccatctacagttttagtggctgtctcagcaatctccagctcaatggggcctccatcacctctgc

SEQ ID NO: 187292 - DNA, 1493 bp, Homo Sapiens
tgtacaaagcagaggacctcccgctgcgaaaaggcaccaagcacctcagcccttatgctactctcactgtgggagatagttctcataaaaccaagactatttcgcaaacttcagcccctgtctgggatgagagtgcctcctttctcatcaggaaaccacacactgagagcctagagttgcaggttcggggtgagggcactggcgtgctgggctcattatccctgcccctctcagagctcctcgtggctgaccagctctgcttggaccgctggtttacactcagcagtggtcaggggcaggtgctactgagagcacagctagggatcctggtgtcccagcactcgggagtggaagctcatagccacagctacagccacagctcctcatcgctgagtgaagaaccagagctctcggggggaccccctcacatcacctcctcagccccagagctccggcagcgcctaacacatgttgacagtccccttgaggctccagccgggcctctgggccaggtgaaactgactctgtggtactacagtgaagaacgaaagctggtcagcattgttcatggttgccggtcccttcgacagaatggacgtgatcctcctgatccctatgtgtcactgttgctactgccagacaagaaccgaggcaccaagaggaggacctcacagaagaagaggaccctgagtcctgaatttaatgaacggtttgagtgggaactccccctggatgaggcccagagacgaaagctggatgtctctgtcaagtctaattcctccttcatgtcaagagagcgtgagctgctggggaaggtgcagctggacctagctgagacagacctttcccagggtgtagcccggtggtatgacctgatggacaacaaggacaagggcagctcctaggagctggcgagtcccagcctgactgctctgtcttcctgccttcgtctcgctccatcaccgcctcaatgtgatgagcctaaagctagggtccaagggcagagcctgtgcccttcagccctttcacctaacaggcccatattcgggcctttgcctgaccaaagagaagaaccgtatgttccctttactgcacggcctttatccttctgggcccctggggcggggacctgagctggctgtttcctgctttgcctgcacattgttctcccttcctcccaactcctcagggccttctgtatctgtgcctggccagtggcagcactagcagtggtattagcttatgccaaatacagctttggaaggatctttttttctttaactagatggtcaccttcttccctaccacacatgggtgggaaggtggacaaggctaacctctccagctgtgagccctcttagactactgcatgtagcaaatgttcagcagctcaggcccccatgtccagttctgtccccactgtcctcaaccctgtcctgaaaatttctactgcttttgatggctggggcccagtctccttgtcactttggaaa

SEQ ID NO: 187293 - DNA, 909 bp, Homo Sapiens
ttggggaagagtgtgtacgtggtgggggcttcctcggtggcgggcatggaggcttcgcgctgccggctcagtcccagcggcgacagtgtcttccatgaagaaatgatgaagatgcgacaggctaagctggattatcaaggctactacttgagaagaggcaaaggaaaaagcgccttgagccatttatggtgcagcccaatccagaagccaggctacgtcgggcaaagccaagggccagtgatgagcagactcccttggtgaactgtcatactccccacagcaatgtcatcttacatggtattgatggtccagctgctgtcctgaaaccagacgaagttcatgctccatcagtaagctcctctgttgtggaagaagatgctgaaaacaccgtggatactgcttccaagccaggacttcaggagcgtctccaaaagcatgatatctctgaaagtgtgaacttcgatgaggagactgatggaatatcccagtcagcatgtttagaaagacccaattctgcatcaagccagaattcaaccgatacaggcacttccggttctgctactgccgcccaaccagctgataacctcctgggagacatagacgacctggaggactttgtgtatagtcctgcccctcaaggtgtcacagtaagatgtcggataatccgggataaaaggggaatggatcggggtctcttccccacctactatatgtacttggaaaaagaagaaaatcagaagatatttcttcttgcagctagaaagcggaaaaagagcaaaacagccaactaccttatctccattgatccagttgatttatctcgtgaaggagaaagttatgtcggcaagcttagatccaacctcatggggaccaagtttacagtttatgaccgtggcatctgccccatga

SEQ ID NO: 187294 - DNA, 1519 bp, Homo Sapiens
ttggctagggttgtacaggcccacgccagacacgacgtctggcaggaacctcggcctcagagatggctctgagtaaatcaatgcatgcaagaaatagatacaaggacaaacctcctgactttgcatatctggcatccaaatatccagattttaagcagcatgttcagataaatctgaatggaagagtgagccttaattttaaagaccccgaagcagtcagagctctgacgtgtactctcctaagggaagattttggactttctattgatattccattggagagactaattcccacagttcccttgagactcaactatattcactgggtagaagatctgatcggtcaccaggattctgacaaaagtactctccgaagaggaattgacataggcacgggggcatcttgcatctaccccttacttggagcaaccttgaatggctggtatttcctcgcaacagaagtggatgatatgtgtttcaactatgcaaagaaaaatgtggaacagaataacttatctgatctcataaaagtggtgaaagtgccacagaagacactcctgatggatgctcttaaagaagaatctgagataatctatgacttttgcatgtgcaaccctcccttttttgccaatcaattggaagccaagggagtaaactcacgaaatcctcgaagacctccgcctagttctgttaatacaggaggcatcacagagatcatggcagaaggaggtgaattagagtttgttaaaaggatcatccatgacagtctacaacttaaaaaaagattaagatggtatagctgcatgctgggaaagaaatgcagcctggcgcctctgaaggaggagcttcgcatacaaggggttcccaaagtaacgtacactgaattctgtcaaggtcggacaatgagatgggccttagcttggagtttttatgatgatgtcacagtaccatcaccaccaagtaagcgaagaaaattagagaaaccgagaaaacccataacattcgtggtgctggcgtccgtgatgaaggaattatccctcaaagcatcacctctgcgctcggagacggcggaaggcatagtcgttgtcacgacatggattgaaaaaattctcactgatttgaaggtccagcataaacgagttccctgtggaaaagaggaagtcagccttttcctaacggccatagaaaactcctggattcatttaaggagaaagaaaagagagcgtgtgagacagctgagagaagttccccgagctcctgaggacgtcattcaggccttggaagagaaaaagcccacccccaaagagtctggcaatagccaagaactggccaggggcccccaggagaggaccccctgtgggcctgctctgcgggaaggcgaggctgccgctgtggagggcccgtgcccgagccaggagtccctgtcccaggaggaaaacccggaacccacggaggatgaaaggagtgaggaaaagggaggggtggaggttttggaaagttgtcaaggctctagcacgga

SEQ ID NO: 187295 - DNA, 1603 bp, Homo Sapiens
tccagcaggcccctgagcgctgctgccacgtcagcgagtgcatgtactgctccgtgttgatgatgcggatctcacgctccagctcggggatgatggcgcctgtgcgccagccgtgccgcagcatgagatccgccagatcactatagaggtggtccccgaagtagagcacgcgggggccacgccattccgtcaagcgtaagaagtcaaacaggtttccctgccgatagatcttgcccttttccaagcgggtgatccggtcccactgaagtgagcccttctcatcgagttttctgaaaggcttgcgccggtcagtgaagaagctgggcttgtctgcctggacaatgaccacatcgaagagctggcgccaatcgggacccaccatgtgccgcatccccttgtctacgaagctgaaaggactgttggtgatgaggaacagctgtttcccatgggccaccaggcggctcaggacagcaaacgtctcatcccctctcaggatgtacttctccatgtcctgctcgatccactggtacatgaggcccttcacatgcacgtctcggatggcgtccgtcacgtccttgtagagatgtgcttggtcaaactccaggctgtggcccagaaagtagtccaccacacaggacagcagagccatctccggtagcgagaagatgtccatgaactgcttaatggagggacccttgccatagaagccactcatctggtatagtgggatgtgctgggtacccccatacagctcaatcacctcctcgtctggcacaggctggaggcccctgtaggctgtccccagctgcacgtagtggaaggcgtcaatcttcatcagaaggctcttctgaatgtcatagtggaggccacggatggcaaagctggggttgtagtcatacttccgaatcccttctgggtacttgtagtgctcgatcaggatgtcacgggcggttctgaagatctcggggtgcagtgcgtctgcatactgggccagggtgtagtcgtagtcaaagccgtagacctcaacgtcacgcaggctgatctcgttgttggcgtagatggctgctgggttcaggagactgcagacctcggggggcaggaggtccgtcaactcccggtttcccggcgcacgcccctcgtgagatgctgtggtcttttctagcaacgtcgacaggctttccaacaaaattcctctttcctgcgcagaaccgctctccactcgcatttcttctgctcagatccgtattccgagcccgcacgcataccaggctgtgctcagggtccggaggaggccgacccagtagccgtgggccctgtcggaggggagccagctgggcgcgcgttgttttctgaggtggcctcgctgtctttcagggtgtgtgtacattcgaaactccactgaaccttgattgaagacctacagtgtggcagtccatggcctggggactggtaaggattgaggccgtaggatgggctcgagtgtggcggtgtccccagggccccagtgagcaagtgggtgtgctgggaacctggccacaagtgaacctcctccaggcgaggggatgccctgcagcatccagccgtcaaaacctcctgtagccaa

SEQ ID NO: 187296 - DNA, 1011 bp, Homo Sapiens
ttggcaactgacaaaatgtcttcttcaaattaaaaaaaattgagaagcagcactttaagtctaactctacaccattttattgcatgtattagttttattaatgatttttggtgcatgcctttgggcttattcaaaagtgtacaataggaaagtatatttcctttcttagaaaggagatgttttctactttgcaacatgtgattacaaaaatcttcctctgtgggaagattaaccatgtattgaactactgaaaagtatatatttttagatatacagaaggaatctacatggagcagcattcagacctatatagaagtcatagcattctgtataggaccaaaaaggaaataacattaaacacttaaacagacgttgttgggtagaaatacctttagatcttgcatttacttccaaaaagaaaaaatgccacagaagtttgctgaaaacttttgtcgtttgaattttctctgtcagtgtatttagcccaaatacaacagctttgggttagcacacacataagaatcaaaaaaacaaagctcactaaataaatcagtctggtttgccaatccagcttgactgaaataagtaaaccaatcacttgcaacatgaaaaactgtccaactcctctaaggttctgacaaaataaccttggctgatgtgggaagactcccactttgattactgacctgacagtgaagattcatgcttgacatgatttcagacttgacaatgtctgtttaaggagctatggtacagtttgctaattcaatcccagatacctgttgattacctgtgagatctagagtccaaagtagccagcagccatatccctgagtgctctgtgcccatcagatatcttaaagtaagcagggttgggacaggtcacagcttggatgattgacctcaggtgccgtagacagccccagattcaagaattgtatctgctttcttggcagtcgtcactgaactaatgtcccatactgtgttacttactgtagatgctctctttta

SEQ ID NO: 187297 - DNA, 2043 bp, Homo Sapiens
ttggcaggtctcttcgccttttgttcgggtactgagttgctgccttggccagagtccggagcagccgccgcccgaccgcgccgagctcagttcgctgtccgcgccggctcccaccccggcccgaccccgacccggcccggtcaggccccatactcagtagccacgatggaggtgatgaacctgatggagcagcctatcaaggtgactgagtggcagcagacatacacctacgactcgggtatccactcgggcgccaacacctgcgtgccctccgtcagcagcaagggcatcatggaggaggatgaggcctgcgggcgccagtacacgctcaagaaaaccaccacttacacccagggggtgccccccagccaaggtgacctggagtaccagatgtccacaacagccagggccaaacgggtgcgggaggccatgtgccctggtgtgtcaggcgaggacagctcgcttctgctggccacccaggtggaggggcaggccaccaacctgcagcgactggccgagccgtcccagctgctcaagtcggccattgtgcatctcatcaactaccaggacgatgccgagctggccactcgcgccctgcccgagctcaccaaactgctcaacgacgaggacccggtggtggtgaccaaggcggccatgattgtgaaccagctgtcgaagaaggaggcgtcgcggcgggccctgatgggctcgccccagctggtggccgctgtcgtgcgtaccatgcagaataccagcgacctggacacagcccgctgcaccaccagcatcctgcacaacctctcccaccaccgggaggggctgctcgccatcttcaagtcgggtggcatccctgctctggtccgcatgctcagctcccctgtggagtcggtcctgttctatgccatcaccacgctgcacaacctgctcctgtaccaggagggcgccaagatggccgtgcgcctggccgacgggctgcaaaagatggtgcccctgctcaacaagaacaaccccaagttcctggccatcaccaccgactgcctgcagctcctggcctacggcaaccaggagagcaagctgatcatcctggccaatggtgggccccaggccctcgtgcagatcatgcgtaactacagttatgaaaagctgctctggaccaccagtcgtgtgctcaaggtgctatccgtgtgtcccagcaataagcctgccattgtggaggctggtgggatgcaggccctgggcaagcacctgaccagcaacagcccccgcctggtgcagaactgcctgtggaccctgcgcaacctctcagatgtggccaccaagcaggagggcctggagagtgtgctgaagattctggtgaatcagctgagtgtggatgacgtcaacgtcctcacctgtgccacgggcacactctccaacctgacatgcaacaacagcaagaacaagacgctggtgacacagaacagcggtgtggaggctctcatccatgccatcctgcgtgctggtgacaaggacgacatcacggagcctgccgtctgcgctctgcgccacctcactagccgccaccctgaggccgagatggcccagaactctgtgcgtctcaactatggcatcccagccatcgtgaagctgctcaaccagcccaaccagtggccactggtcaaggcaaccatcggcttgatcaggaatctggccctgtgcccagccaaccatgccccgctgcaggaggcagcggtcatcccccgcctcgtccaactgctggtgaaggcccaccaggatgcccagcgccacgtagctgcaggcacacagcagccctacacggatggtgtgaggatggaggagattgtggagggctgcaccggagcactgcacatcctcgcccgggaccccatgaaccgcatggagatcttccggctcaacaccattcccctgtttgtgcagctcctgtactcgtcggtggagaacatccagcgcgtggctgccggggtgctgtgtgagctggcccaggacaaggaggcggccgacgccattgatgcagaggggggc

SEQ ID NO: 187298 - DNA, 923 bp, Homo Sapiens
ggattttggggggtttgggttctaggaactcgggccctgggagcccctggggggtttagggcagttggtcgggtggagtttcagtgagaatatcagacccagagaaggaaccaaagcccttccgggcccaggcagctggagacagggaggctggaggtttggaggggcgttgctgggggaaaacagaatgggtacttgagtctgaagctttagtggccagggccacaggggcggggagggggtgtcaggccctggacccatgcccaggacagaaaagcaggagcagaacactatcccaagaaagaccctacggaggacctctggaggcgcagggtgcagcaggaagttacaccccggcttccccagctcaggcacttttctgtcttgccccatcgcctgcacggagagcctctcagatgaggaaccgcacctgttaggggagcggggacagacaggggtcaggggctcggtggacctgcatccccagaagctcaagccactccgtgtcacctgcccgccacccccagaaggggccagcaggaataggcctccccatccccaccaaagacacaagaagaaggcaggccagggcacaccgtgcttggggaagctcagcagcaaaggatccccccaaaaaaggagcgcaggtttcagcggggagatgggagggcctccaacagaaggaggttctagagaggaggaaaagcctgcaaagagggggccgtactggggccaggccgcctaggccagcatgtggtctgcagtggggtacgggggcctgaggccgtcgctgtaggtgtcgatggggtagtctccatccatgtccatgtgcatctccagcgggtcaaggggcacatcgctggagtacatggggcggtaggcagccgggtcatgcttgaagagccaacttttttgtacaaagt

SEQ ID NO: 187299 - DNA, 1558 bp, Homo Sapiens
actttgtacaaaaaagttggtgctatccgtgtgtcccagcaataagcctgccattgtggaggctggtgggatgcaggccctgggcaagcacctgaccagcaacagcccccgcctggtgcagaactgcctgtggaccctgcgcaacctctcagatgtggccaccaagcaggagggcctggagagtgtgctgaagattctggtgaatcagctgagtgtggatgacgtcaacgtcctcacctgtgccacgggcacactctccaacctgacatgcaacaacagcaagaacaagacgctggtgacacagaacagcggtgtggaggctctcatccatgccatcctgcgtgctggtgacaaggacgacatcacggagcctgccgtctgcgctctgcgccacctcactagccgccaccctgaggccgagatggcccagaactctgtgcgtctcaactatggcatcccagccatcgtgaagctgctcaaccagcccaaccagtggccactggtcaaggcaaccatcggcttgatcaggaatctggccctgtgcccagccaaccatgccccgctgcaggaggcagcggtcatcccccgcctcgtccaactgctggtgaaggcccaccaggatgcccagcgccacgtagctgcaggcacacagcagccctacacggatggtgtgaggatggaggagattgtggagggctgcaccggagcactgcacatcctcgcccgggaccccatgaaccgcatggagatcttccggctcaacaccattcccctgtttgtgcagctcctgtactcgtcggtggagaacatccagcgcgtggctgccggggtgctgtgtgagctggcccaggacaaggaggcggccgacgccattgatgcagagggggcctcggccccactcatggagttgctgcactcccgcaacgagggcactgccacctacgctgctgccgtcctgttccgcatctccgaggacaagaacccagactaccggaagcgcgtgtccgtggagctcaccaactccctcttcaagcatgacccggctgcctgggaggctgcccagagcatgattcccatcaatgagccctatggagatgacatggatgccacctaccgccccatgtactccagcgatgtgccccttgacccgctggagatgcacatggacatggatggagactaccccatcgacacctacagcgacggcctcaggcccccgtaccccactgcagaccacatgctggcctaggcggcctggccccagtgcggttcctcatctgagaggctctccgtgcaggcgatggggcaagacagaaaagtgcctgagctggggaagccggggtgtaacttcctgctgcaccctgcgcctccagaggtcctccgtagggtctttcttgggatagtgttctgctcctgcttttctgtcctgggcatgggtccagggcctgacaccccctccccgcccctgtggccctggccactaaagcttcagactcaagtacccattctgttttcccccagcaacacgtcattgtgtaaggaaaataaaagtgctgcc

SEQ ID NO: 187300 - DNA, 798 bp, Homo Sapiens
ttggcacctgttccccaggactcaccccagcccctgcctgcccctgaggaagaagaggcactcaccactgaggactttgagttgctggatcagggggagctggagcagctgaatgcagagctgggcttggagccagagacaccgccaaaaccccctgatgctccacccctggggcccgacatccattctctggtacagtcagaccaagaagctcaggccgtggcagagccatgagccagccgttgaggaaggagctgcaggcacagtagggcttcttggctaggagtgttgctgtttcctcctttgcctaccactctggggtggggcagtgtgtggggaagctggctgtcggatggtagctattccaccctctgcctgcctgcctgcctgctgtcctgggcatggtgcagtacctgtgcctaggattggttttaaatttgtaaataattttccatttgggttagtggatgtgaacagggctagggaagtccttcccacagcctgcgcttgcctccctgcctcatctctattctcattccactatgccccaagccctggtggtctggccctttctttttcctcctatcctcaaggacctgtgctgctctgccctcatgtcccacttggttgtttagttgaggcactttataattttttctcttgtcttgtgttcctttctgctttatttccctgctgtgtcctgtccttaccagctcaaccccatcctttgccagctccctcctatcccgtgggcactggccaaactttagggaggctcctggtctgggaagtaaaaga

SEQ ID NO: 187301 - DNA, 1189 bp, Homo Sapiens
actttgtacaaaaaagttggcaaatgaaggctaaaattttggccagaacattacaaaagttttaaatcgtagacgtaactccccctgaaataaagttaggtagtaaaatccttaatgaaaccagtggatgtgcttaacgtaaggttagtaaagcatacaaagaatctagtgtgctcagggcttggtacaatgagctgaattagatggccttatgaaactctttctaacctcttacccaacctgtttctccttggttaaaattatacttgaaggcccagaacactcatggcacatttgtttaatattgcttatagttagtttaaggtaattttgcttctacagtattttggaaggtctgaaaacttgcacagggtcatctttgtaattatataaccccaaactaagatgcacaatgtctccttcaggtgatcacacacagtggacgagtatgtgcaaacatggacataatagttcacttacaaatgtgatttgatgttaacactagagaatgatgactgtagaacatttgagcaagtaaaatagtaaagcacatagtgagtgtatgtccatctaactggtacattgataatttagtttgggcacataaaaggaatatttatatggcttcccaaatgcagagttacatcttattcgtgtatttctctgagtatttatatcccgtctccttttttcattcttaaaaataaatgaattttcactgttggcacatatgaggcttaaatataaggaacataacacttgcattctaatttttgcatatattgtaaatgtgtctggtatttacagcaaaatactgtgtatccttttatgggtaaaacaaaagtgaacattgcatgcatgtaatgtgatgaatttgtaatttaggagttctttggggcttctgtgacttgggaaatgcttacattcaggccttaatgttgcattagctagcatgttttccctctgatgtatatagtcactgttgtataaactaatctttgcttgttttctactctgtgatctttccatatcatatttcattaatgatcagttagtgtcaaggagtcaaaacagattaaaattaatttcatgtgtatatggtggaaatttgtggctagtgtgatttttgtttgtttccttttaagtactgttgatcagttgtgacacttactggttaaacttacgttgc

SEQ ID NO: 187302 - DNA, 932 bp, Homo Sapiens
ttggctatcttgcccccttttcactcagtaattaccagctagaccagcttatgtgccccaaatccctatcagaaaagaattctaacaatgaagtggcgtgtaagaagactaaaataaagaaaacttgcagaaggattatacctccaaagatgaaaaacacatcttccaaggcagaatccacgctgcaaaattcatcctcagctgttcatactgaaagtaacaagctacaacccaagagaacggcagatgcgatgaatctcagtgttgatgtggaaagtagtcaggatggagacagtgatgaagataccacaccagccctggatttttcgggattgtcaccctacgaaaggaagagactgaagaacatatcagaaaacgcagacttttttgcttctcttcagttgtctgagtctgctgcaagactccgtgaaatgatagagaagagacagcctcctaaatccaaaagaaagaagcctaagagagaaaatgggattggatgtagaaggtcaatgcgattactaaaagttgatccttcgggagtttcattaccagcagctccaacaccgccgacattagtagcagatgaaactcctttgttacctcctgggcctttagaaatgacttctgaaaatcaagaagacaacaatgaacgatttaaaggatttctgcacacatgggcaggaatgagcaagccaagtagtaagaacactgagaagggattatctagcattaaaagctacaaagccaatttaaatggcatggtcattagtgaagataccgtttacaaagttaccacaggcccaatattctctatggctctccatccatcagaaactagaactttggtagcagttggggccaatttgggcaagttggactttgtgatttgacccagcaacctaaagaagatggagtttatgtttttcatcccc

SEQ ID NO: 187303 - DNA, 1589 bp, Homo Sapiens
ttgggactgagtgggaaggcacgtggtggaagtcccgagttgaggaggtggatggcagcctagtcaggatcctcttcctggatgacaaaagatgtgagtggatctatcgaggctctacacggctggagcccatgttcagcatgaaaacatcctcagcctctgcactggagaagaagcaaggacagctcaggacacgtccaaatatgggtgctgtgaggagcaaaggccctgttgtccagtacacacaggatctgaccggtactggaacccagttcaagccagtggaacccccacagcctacagctccacctgccccacctttcccacctgctccacctctatccccccaagcaggtgacagtgacttggaaagccagcttgcccagtcacggaagcaggtagccaaaaagagcacgtcctttcgaccaggatctgtgggctctggtcattcctcccctacatctcctgcactcagtgaaaatgtctctggtgggaaacctgggatcaaccagacatatagatcacctttaggctccacagcctctgccccagcaccctcagcactcccggcccctccagcacccccagtcttccatggcatgctggagcgggccccagcagagccctcctaccgtgctcccatggagaagcttttctacttacctcatgtctgcagctatacctgtctgtctcgagtcagacctatgaggaatgagcagtaccggggcaagaaccctctgctggtcccgttactatatgacttccggcggatgacagcccggcgtcgagttaaccgcaagatgggctttcatgttatctataagacaccttgtggtctctgccttcggacaatgcaggagatagaacgctaccttttcgagactggctgtgacttcctcttcctggagatgttctgtttggatccatatgttcttgtggaccgaaagtttcagccctataagcctttttactatattttggacatcacttatgggaaggaagatgttcccctatcctgtgtcaatgagattgacacaacccctccaccccaggtggcctacagcaaggaacgtatcccgggcaagggtgttttcattaacacaggccctgaatttctggttggctgtgactgcaaggatgggtgtcgggacaagtccaagtgtgcctgccatcaactaactatccaggctacagcctgtaccccaggaggccaaatcaaccctaactctggctaccagtacaagagactagaagagtgtctacccacaggggtatatgagtgtaacaaacgctgcaaatgtgacccaaacatgtgcacaaaccggttggtgcaacatggactacaagttcggctacagctattcaagacacagaacaagggctggggtatccgctgcttggatgacattgccaaaggctcttttgtttgtatttatgcaggcaaaatcctgacagatgactttgcagacaaaggagggtctggaaatgggtgatgagtactttgcaaatctggaccatatcgagagcgtggagaacttcaaagaagatatgagagtgatgccccctgttcctctgacagcagtggtgta

SEQ ID NO: 187304 - DNA, 1671 bp, Homo Sapiens
  misc_feature (185)..(198): n is a, c, g, or t
  misc_feature (556)..(565): n is a, c, g, or t
ttgggggattgcttgttaccacagagaattctcttcaaattaagatatgtcattagaatgcttggaccagtcaatcttttgtacttatttgaaaatataggaacaatttagcagctgcaaatatgcccaagctatttttaatagatatactaaacttattgttgacaaatttcagcctccttaannnnnnnnnnnnnnggtaattacctataggcttaaaagtcattcgttgctgttctagtataattagtagttccgtgattgaaagtttattgtaattctactatcttcaaattagatacattttcaaaaggaaaagataattttttagaaacatcttaatattcactatttcctgaaaaaatccaagcagttaacgctttctggatggtaacaaagtaccttctaaaagataagtgctatgacaccatgtatgaatgtaattctcttagtaatttacctctgactatttggtgtcttaacgctttggtttatataatctcaggggttgtctgcaaaccaaaactgacatattctgtggttagcttttattacnnnnnnnnnnaacagaatgctttgctttggttatatttcttctttcttcttttgtcttatatggattaataactagtctccatgaacttcacttgaaagagcctgtaaaagttagatgagtctaaaagtgctctttgaagtagcagcaaattgggagtatatgctctgttatatagaaataaattgtccttgctattttcttacatttagctttgctagattgtatatacattgagctaagaccttaggaaattcactttctgcatgataaaatgacccaataaatattccactttgcttaataatgtacatacagtgcattattttttctatttgtagatgaatttaatgacagataattgtctgttccccgctgaaactgaagaaatctagtttttttgtgaacatttttgtggtcttatggataaggtacatgaagatttttgcagcagtattagtggttcagtggctgcactttattaatcagtgtgttaatttttgacagtgattggactagaccttttcaaatagagtctgagggtatcagacagtgaaaatgtgctgtaactaagtagcatgtaaatcagttgattgtaaaacgtttcgctgggaacttattttagctatattttacttcagacagattatgatacaataatctacctgtgcatcagttagtaggtgctgcagggtttcttactatttacagaaacattttgtgcagtctttgttataaattttcagaagactatactctttactttgaaggtctattttttaattatacctcatttagctaactagtattctaatacctggtagaaaaacagtgagccagcctttaagcatctaacaaaatttagactctttgttttgttttgaactgaagacatcattggggaaaggtaggaaatattagtttaggatagagcatacatgtcatatcccagtagcataaaaaagtattatctccctgtctccattaataaatttaactgtgcatataagtgcgtttttgcagaagtttctagtatgacattataactcattttacaggttctgaaatgctcagagtctatattaagggcttataaagtttttcctgtgatcagtaag

SEQ ID NO: 187305 - DNA, 1662 bp, Homo Sapiens
ttggctggtctggaaggaacctgagctacgagccgcggcggcagcggggcggcggggaagcgtatacctaatctgggagcctgcaagtgacaacagcctttgcggtccttagacagcttggcctggaggagaacacatgaaagaaagaacctcaagaggctttgttttctgtgaaacagtatttctatacagttgctccaatgacagagttacctgcaccgttgtcctacttccagaatgcacagatgtctgaggacaaccacctgagcaatactgtacgtagccagaatgacaatagagaacggcaggagcacaacgacagacggagccttggccaccctgagccattatctaatggacgaccccagggtaactcccggcaggtggtggagcaagatgaggaagaagatgaggagctgacattgaaatatggcgccaagcatgtgatcatgctctttgtccctgtgactctctgcatggtggtggtcgtggctaccattaagtcagtcagcttttatacccggaaggatgggcagctaatctataccccattcacagaagataccgagactgtgggccagagagccctgcactcaattctgaatgctgccatcatgatcagtgtcattgttgtcatgactatcctcctggtggttctgtataaatacaggtgctataaggtcatccatgcctggcttattatatcatctctattgttgctgttctttttttcattcatttacttgggggaagtgtttaaaacctataacgttgctgtggactacattactgttgcactcctgatctggaattttggtgtggtgggaatgatttccattcactggaaaggtccacttcgactccagcaggcatatctcattatgattagtgccctcatggccctggtgtttatcaagtacctccctgaatggactgcgtggctcatcttggctgtgatttcagtatatgatttagtggctgttttgtgtccgaaaggtccacttcgtatgctggttgaaacagctcaggagagaaatgaaacgctttttccagctctcatttactcctcaacaatggtgtggttggtgaatatggcagaaggagacccggaagctcaaaggagagtatccaaaaattccaagtataatgcagaaagcacagaaagggagtcacaagacactgttgcagagaatgatgatggcgggttcagtgaggaatgggaagcccagagggacagtcatctagggcctcatcgctctacacctgagtcacgagctgctgtccaggaactttccagcagtatcctcgctggtgaagacccagaggaaaggggagtaaaacttggattgggagatttcattttctacagtgttctggttggtaaagcctcagcaacagccagtggagactggaacacaaccatagcctgtttcgtagccatattaattggtttgtgccttacattattactccttgccattttcaagaaagcattgccagctcttccaatctccatcacctttgggcttgttttctactttgccacagattatcttgtacagccttttatggaccaattagcattccatcaattttatatctagcatatttgcggttagaatcccatggatgtttcttctttgactataacaaatctgggga

SEQ ID NO: 187306 - DNA, 1064 bp, Homo Sapiens
ccagccgagaatcttgactttgttagatgtggacacaggaaaatcacctttgtcctccccagattttgttatagtcaaagaagaaacatccatgggattctaaccgcaaatatgctagatataaaattgatggaatgctaattggtccataaaaggctgtacaagataatctgtggcaaagtagaaaacaagcccaaaggtgatggagattggaagagctggcaatgctttcttgaaaatggcaaggagtaataatgtaaggcacaaaccaattaatatggctacgaaacaggctatggttgtgttccagtctccactggctgttgctgaggctttaccaaccagaacactgtagaaaatgaaatctcccaatccaagttttactcccctttcctctgggtcttcaccagcgaggatactgctggaaagttcctggacagcagctcgtgactcaggtgtagagcgatgaggccctagatgactgtccctctgggcttcccattcctcactgaacccgccatcatcattctctgcaacagtgtcttgtgactccctttctgtgctttctgcattatacttggaatttttggatactctcctttgagcttccgggtctccttctgccatattcaccaaccacaccattgttgaggagtaaatgagagctggaaaaagcgtttcatttctctcctgagctgtttcaaccagcatacgaagtggacctttcggacacaaaacagccactaaatctagaaaaagaaaaacataaaagacatctaataaaatgtatgggctaaacttgtaaatgggtggtagggaggaattaacgaaggaaaaaagtttaatgttttttgtctctttttacacaaaaagacgttgaatgaatatgaaataaatggcaggtgaactggtgggggtgggggagacaacataaacaaaataaaataacacagaacatctgtaaaaatttcatttgggtttgactgctatttgcttagtgtacagtgtatcgttactggggtataggaacaagtcttcctagtttaaaggaaagctgcagccaa

SEQ ID NO: 187307 - DNA, 983 bp, Homo Sapiens
ttggctcgagtcggctccaactgccagcccgggttggcgccatgtacgccgtgtacaaacaggcgcatccgcccaccggtctggagttctccatgtactgcaacttcttcaacaacagcgagcgcaacctggtagtggccgggacctcgcagctctacgtgtaccgcctcaaccgcgacgccgaggctctgaccaagaatgacaggagcacagaggggaaggcccaccgggagaagctcgagcttgctgcctccttctccttctttggcaacgtcatgtccatggccagcgtgcagctggcaggagccaagcgggatgccctgctcctaagcttcaaggatgccaagctgtctgtggtggagtacgacccgggcacccatgacctgaagaccctgtcactgcactactttgaggagcctgagcttcgggacgggtttgtgcagaatgtacacacgccgcgagtgcgggtggaccccgacgggcgctgtgcagccatgcttgtctacggcacgcggctggtggtcctgcccttccgcagggagagcctggctgaggagcacgaggggctcgtgggtgaggggcagaggtccagcttcctgcccagctacatcatcgacgtgcgggccctagacgagaagctgctcaacatcatcgacctgcagttcctgcatggctactacgagcctaccctcctcatcctgtttgagcccaaccagacctggcctgggcgcgtggccgtgcggcaggacacgtgctccattgtggccatctcactgaacatcacgcagaaagtgcaccccgtcatctggtccctcaccagcctgccctttgactgcacccaggctctggctgtgcccaagcccatagtggggtggtggtgtttgccgtcaactcgctgttgtacctgaaccagagcgtccccccgtatggcgtggctctcaacagcctcaccacaagaaaccacggctttcccgcttcgcacc

SEQ ID NO: 187308 - DNA, 2730 bp, Homo Sapiens
  misc_feature (1940)..(1954): n is a, c, g, or t
  misc_feature (2442)..(2482): n is a, c, g, or t
ttgggtgtctttttttggaggactctttttctgtagtagtagttgttgttgttcatctgtcaagaaaaaagttttcctttttgtggctctcaaattggggtatagggtaggagacaaaatgaggctgtatttcactgttagtgagtaactaaggcttctccctccctccctgtcctgtcagtcttcagccaatgacttgcttgcatcagacatctttgctcctcccgtctcagaaccttcaggccaggcgtcacccacaggacaacctacagccctgcagcccaaccctctggatctcttcaaaacaagtgctcctgccccagtggggcccctggtgggtctaggtggtgtaactgtcacactccctcaggcaggaccatggaacacagcatctttggtcttcaatcagtccccttcaatggctccgggagccatgatgggtggtcaaccttcaggttttagtcagcccgtcatttttggtacaagtccagctgtttcaggttggaaccagccttcaccctttgcagcctcaactccccctccagtgcctgttgtctggggcccttctgcatctgtggcacccaatgcttggtcaacaacaagccctttggggaatccttttcagagcaatatttttccagctcctgctgtgtccactcagcccccatccatgcactcctctctcctggtcactcctcctcagccacctcccagagctggccctcccaaggacatctccagtgatgccttcactgccttagacccacttggggataaagagatcaaggatgtgaaagaaatgtttaaggatttccaactgcggcagccacctgctgtgcccgcgcggaagggagagcagacttcttctgggactttgagtgcctttgccagttatttcaacagcaaggttggcattcctcaggagaatgcagaccatgatgactttgatgctaatcaactattgaacaagatcaatgaaccaccaaagccagctcccagacaagtttccctgccagttaccaaatctactgacaatgcatttgagaaccctttctttaaagattcttttggttcatcacaagcctctgtggcttcttctcaacctgtatcttctgagatgtatagggatccatttggaaatccttttgcctaaattctgaacttggtctgcagaccatccagaggaataaaaaggttggccttagtagtcaaaaacaaagctgatagccagacacgttctgatttctgcccttgttccagctttgacgtattatctgttgccttatttctcattgcctcttctacttgtaaaatgcttttcactttctgtctaggttaaagctaaactgaatctatggctttaaataaattaagatcctaaactctctagcttaagtgtaaatgaagtacagtagtttccctactgaaccctgcctcttgtgtccctggaaccttctagaacacctgccttctaccctctggttgggagatgcagccaccacatcccttcatatcatactgttttgaataaattttcaaatccttattgttcagagttgtttgggggttctgtttcagagcataaaacctaaaggttatagtagaacaaggcaccttcttaaaagaaatcttgcttcagaccatcagttacagagaatttctaaagtaaaattgaagcaactacaacttctccttagacactttggaatctaaccacttaaggacctttttaaagagatagcttctcttctttctgaagatcaatttctcccaaggccaagattgtccttttctcccatttcttgctagctattgcaaatgagggaagaacattattcatctctcctcccctttttttctgattcttttttcagtcagttttgctcctgggttcaagtagtattaccaccctttcacaagcaacagactctcacagggcnnnnnnnnnnnnnnntctaatgattcacagacagatctggagcctctcttcattctcagtaattgctagtcccaagaactagaattgcaaatgggcacaacctatatccttcctgtggaagaggaggccactctcttgagctgaagttccagaagagcagttaatgttcaagagaaattgaactcaactcagcaacaaaggactctattttgaagagcaacatatcacaaagctaaatgtgattgtgccaaacacattaggtgcttatttggggtcatgctaggcctttatcaagtaactggaaaacttttcttgcagccacaatctcaatgtcgttagtaggaagataagaggggagaaaaagctgtagaacaaatgtttggggttaccattgaaaatctaatgtctgcaatatttttctcctcacaacttggaaacgttcccagttcattttcagtcctgttgtgagcacagttctgaagggtttattattgtcaaaatannnnnnnnnnnnnnnnnnnnnnnnnnnnnnnnnnnnnnnnnctcttgacccttaatgctcaggttcttgtgggagttaatcaaccacatccaacgttaccttgagggggaagaagagggtgatgctcagaaagctaaacaagacaggggccacatgaccctctattgattagcccccaagtagaaaagtcctgtggttttatgtttaatggtaatagttgatcatatatggcataattttctatcagcttcctactcatcactatatacacagacttgaaatattactt

SEQ ID NO: 187309 - DNA, 1927 bp, Homo Sapiens
  misc_feature (113)..(154): n is a, c, g, or t
ttggctttttgttctttctctgtcagagaagccactgcaagatgctgccgaagataaccctctctttcctgcctcattcttctctcttccttcctgttttttcctagttcttnnnnnnnnnnnnnnnnnnnnnnnnnnnnnnnnnnnnnnnnnnactgtccatagtctcctgtccctacatcatggatcatgtccacattttgctaatttaacatcgtcagactgaaagatgaagccatgatagctacagagaaaggttttagactccagtttacctttctcttggagaaactcaatgctaatcccaccttttgtctctaaattgttttttgttcccatcagtttcaggccaggactggagaggccacattaccaagtagaaagggtctgaaacattacttggcagccaagaatttggaggttttaaaatggtgctaattctgtcctctgaggtcttccttgtccctttataccttcaatccttacttctgccagtctgtatttcctatcaagggtgaaagtgatgatggtggtgcaggagggtgacaataaaatcctagtggaattggagaccattggaagggatggaatataagtcagtgtgaaactgagtgtacactgccatgttacatcagtgtccattggcttgttttgagcctgttctctaagaagataggattggttttagcccaaactctgcttctatggtagggcatgaggacaactattcagcatggttttagcttcttggagatgattccaacttaactattttggctttttaaacataattttctctgaaaattaattgtggctcttatttgcatttacgaatgatcttcccatccctttttcccattcagcaaatattagtttgtcctcctttaattgtttgcccaaatcttccacccatcttttttcttccctcattttctgggattctcaagaaagaaaaagtaacccattatcactctgagtttcgtcgtgccctgagacatgatgggaatctcattcccacctctcatagcagagccaaacctttagtgttggtggtaggaggatggggagaggaaaaaagagctggcaaagaaatggatagggaatattttagttctttaaatatataggcagatgcttctcttggaatccagatcatctggctgaagcttttgcaagtaggctttgaggggtgaaggagattggtggaggagagtaaataatctagaggcaagagttcagtgagggccaagggggacccccagaaaaaggtatggagctaactcatctcttttacaaggggtggccatgacttactgttgcaaagtactcagtgtatatttaatgttgattgttgaattttagttacgagagggaagaacaattttacttctgtccttatttcacttgctgaaaagctgtgggacaaaatgtatggaatagacaaggccactttctttgtgatttctgcttttcatgcatattattttatttacccataatttccaagaggtttggcgttccgctctcctgcttttttctttcatccacccctttcctttttttggaagggggttatatatgagagttcattgaagaagtccagtgaggctgaagtaaaggggcaagatagggcagttaactaaagagcactttatttctttgaagcctttctaagaaagaaatgggggtgcgagtggcttgaatctcccatgatgttggagggcacttagtggggttgaagtatgacataatatttcccattggggaaaggagaatttctcttagagggtggcaaaatgcctttgcccagtgtccctattttaggcatcttttccttccttattccttccagtcagggtgtgtcctatacaaaacttcccatcagttctcctcaatattccccatttgtaaatgatcacttctcttt

SEQ ID NO: 187310 - DNA, 1702 bp, Homo Sapiens
ttggcacctgctaccagtcaagctcagccagactgcaagaggaggcgaggcggagccagccgagggagtgaaccatggacaagttgaaatgcccgagtttcttcaagtgcagggagaaggagaaagtgtcggcttcatcagagaatttccatgttggtgaaaatgatgagaatcaggaccgtggtaactggtccaaaaaatcggattatcttctatctatgattggatacgcagtgggattaggaaatgtgtggagatttccatatctgacctacagcaatggtggaggcgccttcttgataccttatgcaattatgttagcattggctggtttacctttgttctttctggagtgttcactgggacaatttgctagcttaggtccagtttcagtttggaggattcttccattgtttcaaggtgtgggaattacaatggtcctgatctccatttttgtgacaatctattacaatgtcataattgcctatagtctttactacatgtttgcttcttttcaaagtgaactaccatggaaaaattgttcttcgtggtcagataaaaactgtagcagatcaccaatagtaactcactgtaatgtgagtacagtgaataaaggaatacaagagatcatccaaatgaataaaagctgggtagacatcaacaattttacctgcatcaacggcagtgaaatttatcagccagggcagcttcccagtgaacaatattggaataaagtggcgctccaacggtcaagtggaatgaatgagactggagtaattgtttggtatttagcactttgtcttcttctggcttggctcatagttggagcagcactatttaaaggaatcaaatcgtctggcaaggtggtatattttacagctcttttcccctatgtggtcctactcatcctgttagtacgaggtgcaactctggagggtgcttcaaaaggcatttcatactatattggagcccagtcaaattttacaaaacttaaggaagctgaggtatggaaagatgctgccactcagatattttactccctttcagtggcttggggtggcttagttgctctatcatcttacaataagttcaaaaacaactgcttctctgatgccattgtggtttgtttgacaaactgtctcactagcgtgtttgctggatttgctattttttctatattgggacacatggcccatatatctggaaaggaagtttctcaagttgtaaaatcaggttttgatttggcattcattgcctatccagaggctctagcccaactcccaggtggtccattttggtccatattattttttttcatgcttttaactttgggtctcgattctcagtttgcttcgattgaaacgatcacaacaacaattcaagatttatttcccaaagtgatgaagaaaatgagggttcccataactttgggctgctgcttggttttgtttctccttggtctcgtctgtgtgactcaggctggaatttactgggttcatctgattgaccacttctgtgctggatggggcattttaattgcagctatactggagctagttggaatcatctggatttatggagggaacagattcattgaggatacagaaatgatgattggagcaaagaggtggatattctggctatggtggagagcttgctggtttgtaattacgcctatccttttgattgcatatttatctgg

SEQ ID NO: 187311 - DNA, 1595 bp, Homo Sapiens
ctttgtacaaaaaagttgggtcttaaaaactttttgctctggtcagttacaggtggatccccaataatctgtttttggttttctgatggaaataatagaattaggggaaatcaaatctggttggtaggtgtctacagtattagaagagggtataagggcactgtttaacactaagttctaatacttccagaaactgtgcattccagatctacatactaaatgctcttatcattttgaaatgggctcttgattaatagacccatattttttagtggcttctatgttgtatatttgtctaaaatgaaagctcttttgcgttctaaaactacaatatatgtcatcttattttccctgagtatccaagtatagtgcagattctatgtaaaactactaaatgacactggaatatgtttagtagattagggggaaaaactataaaggtttatacaattgtttgtagttacatttaggatggcttatccctttggagaagagtgaagtttgttttttcgccatgtgatgaagaccactgtgattttttaaaaaagtagataatacttaaaatggcgtaataattctgcacttgaatttgtactgttaacagcacatttggaagattttaaaactttttattgtcttataaatagcattcacttattattttggatatttaagggttccattaagttaacactgtatttggacaaagtgtgaccaaattagccagtctgttttcttccatgtttaattagaagtgagaggtagaagtacttcaaattcaacaggccagcaagcaatcggcttaaaattccctttcttaaatgttgtgctcttatgttctcggctttttaatgactttatttttacagtacttgttcagtcacttgagatgaaatgcttggggtagcttttccatcctcaaacttaatgtttttactagttcatagtgtttggaacagtatatgccaatcactgagactgcatcagagtttgcaattttgtatgtttcattgccaaagaaggcttagtggttgttgactgtagtataagtcagctttctgtagcataagatttgattttcccatacttacttcacttgttatacatcactgattatttgggttaaactggactcatttcaagcagtttgcttttgttcaaatcgtgatgagaaacctaatactgtaatttgatttgagccataaaacacattttaatattagcttgtattatagttattaagcttgtttttgtggaaaaaaacttactaaaacctaggtaactctagattaggccagttcaggtgtattttgtatcttagtaatggatcatatcgtaaaaatagagataagttgggaagatatattgattatgctgttctgttgagggaaaggtcatgtatttagaaatttaaacttttggttattgtgttcacatcatagtattcaagcatcatttatagtttggttttgagaacttttctggtattacgtttatggcaaatgtataaaagaaacaagttttggttatatttttatatttgtaaagtaagtttggtaaagtgatcactgttcttttttaatttattgtcattt

SEQ ID NO: 187312 - DNA, 2642 bp, Homo Sapiens
acaaaaaagttgggttaatggcgggcagtagccgctgaggggattgcagataaccgcttcccgcacggggaaagtctaccctgcctgccactttctgctcgccgtcagcgccggagctcgccagcatgtctgtggtaccgcccaatcgctcgcagaccggctggccccggggggtcactcagttcggcaacaagtacatccagcagacgaagcccctcaccctggagcgcaccatcaacctgtaccctcttaccaattatacttttggtacaaaagagcccctctacgagaaggacagctctgttgcagccagatttcagcgcatgagggaagaatttgataaaattggaatgaggaggactgtagaaggggttctgattgtacatgagcaccggctaccccatgtgttactgctgcagctgggaacaactttcttcaaactacctggtggtgaacttaacccaggagaagatgaagttgaaggactaaaacgcttaatgacagagatactgggtcgtcaggatggagttttgcaagactgggtcattgacgattgcattggtaactggtggagaccaaattttgaacctcctcagtatccatatattcctgcacatattacaaagcctaaggaacataagaagttgtttctggttcagcttcaagaaaaagccttgtttgcagtccctaaaaattacaagctggtagctgcaccattgtttgaattgtatgacaatgcaccaggatatggacccatcatttctagtctccctcagctgttgagcaggttcaattttatttacaactgaattcctgcgcagtggagaagtaaaagaagccgcttgtctctgtgagcacagctatatacagtgtagaataaatgtggtagaaaagtttttttggttttatctcttttgcgatccctaaattgccacctttctattgtttgaatagtaaaattaatatgaagaactagatagtggtgtaaacaaatgtgataatgtttatttactttcggttctgctcatacttttttgtacaacattaaagaaaatggactttttttattttaatttctcattaaacttctaaaattcttataggtgaggatcatttttccccccaccttaggatggtgaatgttgcaacacaatgacaggtttaagtcagtcaagtttattggacccttgctttgataccattcttgggcacatactccaagattgtattagatttttgtgatgaagagcttccattacttctgaaaactatatttatctgagtgagtccaaggtgcaactcctaaatgaattgtgttgcagagaactcccagtataattcactgaccagtacattttataaccatccaggccttggtttgcaagcaacagaccttaaacatacaggaaactattaaaattggctcgatcagtagtcataggaattggtataagaagagactcatttagagctcagagttttcttcacataatgggggtattaattatttgtgctgttgcgaaattatgtgtcttattcttaaagccatggtaaaaatagggatctgtgaaggaaatttctaaaattggatgtattaggttttgaactctgagattgcacaaatattcaattaacttgaagttgtgtacatagagaagaaaatttggttttagcaaatgacagagccttcaaaaatatttttggaataatgtgaatcaaccgaaaactgggggcaaggcagaggacaggttttctcaggttaagagaaaaacgaaattttaaaaactttaaaaaatactgataaattcggatcaaatttgggggaataaaaaatattagagcaaaggagtttgctggttgtgtcattatttaatgatcaaagtatagcatgtatgccttattacagacttgttgactataggcttaatgtaaaaaggaatcttgccagatgtagctacttaaggaaaaaagggtttttaatagaaatgaacttttgattagtatggtaccagtcacagggctattttcctgaatattgggtgatgtcaaaggtatatgatacttgaggaaatcaggccaagtgtagctgagcaattaataaacactcaagtttttttagttggggtcatgtcaaaccctcacatggtggttaagtagtgactaactgtgcatgtccttcatggtaggtgagcaccagtctccatgatcaaaaatgccccagtttcctttgaaaaagccactagttctgtgaattgtccttttccctcctgcccctaacagtcctacccctctagcctacattagcatatttctcatgtaatgtattttgctggtaagctcatccattagctgcgtccttcagctattcctttagattggaggaagtggatatgaagatggattgattcagctcaccttccatgattgcttttgagggaaaagctacagtggccacatttcagatgttcacttttgcaatttgtggagggtggagagaggtagacttttgttgtgtgttttataaagtactctcagtaaggagtgtttgagttgaagagtcatctgattcgaggccactcatgttctttgtaacttaaactttgaccaaaaattcttcacttctcacttcttcacttcttccc

SEQ ID NO: 187313 - DNA, 1544 bp, Homo Sapiens
ctttgtacaaaaaagttggattaataaacaccccttagtttttttagttggggtcatgtcaaaccctcacatggtggttaagtagtgactaactgtgcatgtccttcatggtaggtgagcaccagtctccatgatcaaaaatgccccagtttcctttgaaaaagccactagttctgtgaattgtccttttccctcctgcccctaacagtcctacccctctagcctacattagcatatttctcatgtaatgtattttgctggtaagctcatccattagctgcgtccttcagctattcctttagattggaggaagtggatatgaagatggattgattcagctcaccttccatgattgcttttgagggaaaagctacagtggccacatttcagatgttcacttttgcaatttgtggagggtggagagaggtagacttttgttgtgtgttttataaagtactctcagtaaggagtgtttgagttgaagagtcatctgattcgaggccactcatgttctttgtaacttaaactttgaccaagaaattcttcacttctcacttcttcacttcttcccaatatacagtaagtacgtgagccagtcatccatacactaaggcctagttgagaaaaacctttgattcaggatggctgggttactaaccttgaaatgtaagagatctggttttgaatgtaaaagttgcaacacacaaacggaagtcttaaaaactttttgctctggtcagttacaggtggatccccaataatctgtttttggttttctgatggaaataatagaattaggggaaatcaaatctggttggtaggtgtctacagtattagaagagggtataagggcactgtttaacactaagttctaatacttccagaaactgtgcattccagatctacatactaaatgctcttatcattttgaaatgggctcttgattaatagacccatattttttagtggcttctatgttgtatatttgtctaaaatgaaagctcttttgcgttctaaaactacaatatatgtcatcttattttccctgagtatccaagtatagtgcagattctatgtaaaactactaaatgacactggaatatgtttagtagattagggggaaaaactataaaggtttatacaattgtttgtagttacatttaggatggacttatccctttggagaagagtgaagtttgttttttcgccatgtgatgaagaccactgtgattttttaaaaaagtagataatacttaaaatggcgtaataattctgcacttgaatttgtactgttaacagcacatttggaagattttaaaactttttattgtcttataaatagcattcacttattattttggatatttaagggttccattaagttaacactgtatttggacaaagtgtgaccaaattagccagtctgttttcttccatgtttaattagaagtgagaggtagaagtacttcaattcaacaggccagcaagcaatcggcttaaaattccctttcttaaatgtgtgctcttatgttctcggcttttta

SEQ ID NO: 187314 - DNA, 2886 bp, Homo Sapiens
ttggcatgaatgcggaggagcaagctcagctggctgcctcccagcccgggccaaaggtgctgtcggcggaacaggggagctacttcgttcgtttaggtgacctgggtcccagcttccgccagcgggcatttgaacacgcggtgagccacctgcagcacggccagttccaagccagggacactctggcccagctccaggactgcttcaggctgattgaaaaggcccagcaggctccagaagggcagccacgtctggaccagggctcaggtgccagtgcggaggacgctgctgtccaggaggagcgggatgccggggttctgtccagggtctgcggccttctccggcagctgcacacggcctacagtggcctggtctccagcctccagggcctgcccgccgagctccagcagccagtggggcgggcgcggcacagcctctgtgagctctatggcatcgtggcctcagctggctctgtagaggagctgcccgcagagcggctggtgcagagccgcgagggtgtgcaccaggcttggcaggggttagagcagctgctggagggcctacagcacaatcccccgctcagctggctggtagggcccttcgccttgcccgctggcgggcagtagctgtaggagcctgcaggcccggcgcggggtcgccctgctctgtccagggaggagctgcctcagaactttctccccgcccccaaacctggatcggttccctaaagccctagacctttggggctgcagctggctgagcgccgaggggctgcggaggcagtgaccttcttaactgagccaccccacgccctgctccgggcctgcctgcatctcccacctcctccccagcgctgcctgcccctctcggagcctggggtcactcagaccaccagccaagagccttcccttgaagtccccaagcaagcactgcaattaggaaagagaaaaagcagcgtgcccagcctggaagggcatctgtttgccccgctagcaacccttttatatctagcagggctcttccagtcctgcagcacgggcccccagctatcagcggtgcaggcagtgctgtggcatcccaggctccgggcagctccgttctcatgctgaaagtgggtctccggccttagcacacacaccttgagggtcttaagaaccacattccctcatagtagaaagtactagaaaaagcgacactgccatcatcatcccaaggcaggctgctactgcctttgctgacccccggggtggcctcacggtggggacaaagctgccaggagccacagcagccacagctggggctttgcaccagcctggcttgagactgagcagtttgcagggggtggggggtgcaaaaaacaagcaaacaggctgctgctgcctccagctgcccaccacaggcctgccccaggcacctggggctctgaggcccctggggaggctgggcccagcagctgcccctggagaacacagacaaaggacttccccgcagggaactgtgccctatggagggatcagacagggctgggaacagccacagaggctgcgtgcctatggcacagcccttcctccgccgcacactccccctgggtcctcaggcccacccaagcgccgggctgcagaggaagcggggctggggaggctgcaggcatcagagacactggtggtggcggacccggccgccgggccccgtgctctcaggctagcccaggtcgtggaggctggcaggctcaggtcgggtgtgagacgtgccgtggctgcgctcagtccagcggggaggagccgttcagcccggcctccccaggaagccatatccccactcacccggtaagagaaccttgtcgtcccctttccatgctctcctaggacacgagcccaggaaccccagacccagggggaggaagggtggaggggccccaggggtcaccatgtgcaccaggggccgtgaggggccggggcattcagctcagctctgaaccggggaagctggcacggcaaggactgcctcaggtgacgggccgtgagaggggacgggtcaggagccttcccaagccttctcctcagcccgacacccatggccatcggaggctaggatgccagacacagccatttgcagaaatcaggcacagtgactgcggctcacgtccagccaaccaagcatggggccgcagctcaggaagtcccttcccgccacaccacagcctaattcttactgggacggaggcaactcggctacgctgggcaggacgacaaacacgagacgccactgtggaatgagcaacttcggagcacggggtgacttgcttgggaccgtgcccacgtgacagccccttatgcagaggaggaaagagaagccccgagtgggaggggaacctgtccaaagtcacacggtgtgtgggtgacacagctggggtgagtcgaggctggcccctgaggcccatgctccctgaacgctggagaccactgtcggctagcagcggctctcagggaaggcctggtctccaccctcccagcctagcctcgcggaccctcgtcctccccacatcggacctgctcacctgcctggaccctgggctgccagatgcaggaagcatcaaaccccccagcctcgtgggtgcggggcagggcgcaggcagcacagcttagatgccctggtttgtccctcttgtctcctgggaagagcttgctcccgcccagctctcctgccactggcctttcagggttgggctgggcccagagtgccttttagtcgcttctcacggtggcctgatggctcaacccagtcccaaacgggcccagtgacactgccgactgcaccccagctcaggcccccactgcaccagcaatgctagaaaaccaagccaataaaagtgattttctttttttc

SEQ ID NO: 187315 - DNA, 1310 bp, Homo Sapiens
gggcaggacgtgaataaatccgagtcataagttaaggtgaaagacttagtagtgttaatactcttggtgagaaaagacaacacagtcttggaggagagtgggcttggagtctggtggaaggaagaaagaaacccccagaagggcctcggttgcaggcactgccttgaggccatcagagggggttttcacggtacatgatagggaggagtgaggcaggtgggcactggagggctgtttcctctggcacagttgaactagagggtcactttccactcataattggtttcctaggtctaagtcaccacacctggggctgaagcaagtcttgcctgtgcaccaagcgtggccttggaccctggagagatgcaaggctcagttctccagtgttgaagtggaaggactcccaactgaaggagatctttctctccccacctccagctcttttcccttacaaatgaccagggtgcaagtcgagaggcagaggcacctcctggtgcaactccaccacagtcttacagagaactcatcttggtgggacccaaagcccagccttggcatgaagcagacttattccacccatcggagggcacccagtctggtgactgaatggtggcgtgcaagtgggagtcagcagtggctctggatgccgtaatactcagatgccattcatctctgtgtgatcgtcctggctggagagctggtgaggagggactgcttcctcctggcatgcactgttcaccaaccacaccacgtgggctgatagatttttggtttgacaggtgtggaaagaatttttaaaaccagccactgtgttctccaaacccagagccattggttttgtttgacaagaaagtaccaagagaaccacagctccactgaggctaaggcttgtgtagcacagaatgcagtatgtattgaaacgtataaaccttgtctgactggggagatgggtgagcaaagagctgccgggacccaggtcctctagtcggttgcaggctctgccgatgtctcatccttaagctcctcaaaacctgggactggcttctgtagaaagtatgtagtggcctggatcaccttgtctggtccaatgttgtacactgggtgagtgggctgcagagcgttttcgggcacacccaggaccacatcatgcaacatggctccgctgccgaagtgctgggctatggacaggccgctcaggcagtagcaggtgtggtagaaatcacgcgacttgccaggtttatccagaagcccccccgcagggcactggcagcacatcaggatgtactcctgcagggcctgctgatggccaa

SEQ ID NO: 187316 - DNA, 1780 bp, Homo Sapiens
  misc_feature (1659)..(1679): n is a, c, g, or t
ttgggaagaaagaaagcagtatactatcccatgccacacaaaggcagctcattttgatatagactggggcaaagaagatgattccaatttgttaattggcatctatgaatatggatatggaagctgggaaatgattaaaatggatcctgacctcagtctaacacacaagattcttccagatgatcccgataaaaaaccacaagcaaaacagttgcagacccgtgcagactacctcatcaaattacttagtagagatcttgcaaaaaaagaagctctttctggtgcgggaagttcaaagaggagaaaagcaagagctaagaagaataaagcaatgaagtctataaaagtgaaagaggaaataaagagtgattcttctcctctgccttcagagaagtctgatgaagatgatgataaattgagtgaatccaagtctgatggtagggaaagatccaagaaatcttcagtgtcagatgctccagttcatatcacggcaagtggtgaaccagttcccatttctgaagaatctgaagagctggatcagaagacattcagcatttgtaaagaaagaatgaggcctgttaaagcagctttgaaacaacttgataggcctgagaaaggcctttcagaaagagaacaactagagcatactagacaatgtttaataaaaattggagaccatatcacagaatgtctaaaagagtatacaaatcctgaacaaattaagcaatggagaaaaaacctgtggatttttgtatctaagtttactgaatttgatgcaagaaaattacataaattatataagcatgctattaaaaaacggcaggagtctcagcaaaacagtgatcaaaacagcaacttgaatcctcacgtgattagaaatccagatgtggaaagattaaaagagaatacaaatcacgatgatagcagcagggacagttattcctctgatagacacttaactcagtaccatgatcatcataaagaccgacatcagggagattcttacaaaaaaagtgattccaggaaaagaccctattcttcttttagtaatggtaaagaccatcgtgattgggatcactacaagcaagacagcagatattacagtgacagagagaaacacagaaaactggatgatcacaggagtagagatcacaggtcaaatttggaaggaagtttaaaagatagatctcattctgatcatcgttctcactcagatcatcggttacattcagaccaccggtcaagttctgaatatacgcaccataaatcttccagggattataggtatcactcagactggcaaatggaccacagagcttccagcagtggccctaggtcaccactagatcagagatctccttatggctccagatctccatttgaacattcagttgaacacaaaagtacaccggagcatacctggagtagtcggaaaacataacaaaaactgatacttcgtctttctggacttttcttttagccatatatcataaaccaacacagtaattgccttacatgacttgaaagatataaacagatcttctatcagtagcagtattgttacttctttccaggatgcaaggtctattatcccaacagaagagaaaatattttttatatttaaggattatgctgcactgtactacaaattgtagtacnnnnnnnnnnnnnnnnnnnnnaaagaaatggaaaatgtttactattacaggggacctcaacactgccctcccatacaggctgggataaaactgtttttaagtcagtgaattttagactgacc

SEQ ID NO: 187317 - DNA, 1605 bp, Homo Sapiens
cagcccccaagtctgacaactccccttcagcaccccattgctgaagggcacagtactttctggcagtggcggggtgatggccttgtccctggggctcgagctggtctctgtgcaagagtcttcaagccgtgaagtgctgaaagaatctgagcagtgtcctggagaagccaccaaagggacactttggctgctgtctgacatgcaggtgacacaggtggcatcttccaccaggatgcctgcccggtccggcaactcttcactgggggtggtcagtgccaggcaggaggccagggagatgtggtgtgcagagatatttggcttactgtccttggtggggctggacagaaggctcttcaggcagctcacgtaggtctttggtggtggtgagccctctgctggtaggcctggcaaggggaggccagcatccggcggggcaacagctgcctctgctgtggcaggctccgcagtgtctgggcccaagacagttttctggtgaactgggacacagctctcttccttctgcccttggagctgactggcctgacacacacgacctgcaaccttgccaaccgtggtggccagcacctgttcggttgcttctgagatcacttgggagattatctggaaggcagcccgcttaatctcctcatttctatccaagccctcctcatttctatccaagctctcctcatttctatccaagccctcctcatttctatccaagccctcctcatttctatccaagctctcctcattgcccagttctccctcgacacctctatcctgggctttggcgtctgcgactgggggtgctggcgccgcatcgtcctttgccagctctgtgtgagccgactcgatgaacctacttgccaacttctctgctacatactcttcctcctgcactggccccaccacctgggatgagctgctcttccccttatcttcttccccctctaaagaggccaggctggggcccttgctgttctccaattccaagacatgctcccgagacaacagagcttcttcaagcaccttttcccccaacacggcatcaccagtcccttcggccccacctgtctctcttgccctctccccagagctacgcttctctgcggggactacggggtagcctggctggaccttccttggcaccctgctgaagggggaatcttgcttacacacctcagctgatttgctggagaatagtacaccctttggggatgaaagggggcactctagaggaatcgatttggcttcaccacctgtcagggctagctccagctttgtactgtcgtctctgcgtgttcctggtcgcaatctcatgtctgtggtgttaggaagaatgcccgaggactctgatcttcggcaaggtgggtgtgtctggagcaatgctgggggctctgcaggcagcttgctcacggtggacagttccttttctggaggctctgtgacactggggggtgtggacactactttgggacagacgtcttccacggggagaggttccttgatggcagggtcagccctcagctgcacagcaccagcctccacctgctgctcatcatggctgctgacatggccttttttacgagagaaaaaccccaa

SEQ ID NO: 187318 - DNA, 1515 bp, Homo Sapiens
  misc_feature (305)..(321): n is a, c, g, or t
  misc_feature (430)..(447): n is a, c, g, or t
ccagcaaagggagtctaccacacatcatgcagaagaagtaacactgtcctgggacatggtgtctgtcttctaattcctagcagggcaaacaatgaactgaaaagaaggagaaaccccagcccaattctatttgccatgactgccccactgcagttcacaggtaatgatgggctagagaaagtgaacaggggatgggctgctgctcactcccagctaggcaccagaccatctccacaaagaatgctagaacagagtgatgctgccaccccttggattcataaataagtagattttgatgggtttgnnnnnnnnnnnnnnnnnctctaaggtaagcggtaagccactagtcttgtgccaaagaagatgctatctcttttctatacctcattcctacctccccatccttgttcctctccgtcccccctccacnnnnnnnnnnnnnnnnnngctaagtatttttctagcaagctggtcaatcttcttttctccctcctggctcagcaggctccctccttttaccaagactgctgggacgttgaactccggtgtctgatcatctcacctactctcctcctaactcccaactgaaatccatctcctctcttcctccccaacatccatctctttcccaacatgcctttgcacctagagcaggtgaagaaagcccatgactaaaactaaagactcagaatgaaacaaaaggtgtgacaagttatttgtggggaaggttttcagatatgttccaagagaaaataaggtaaaacaaccttgttcatcagaccaacagtgctggaaagggctcgagtgattctgtaaagggcaactctccccctttccagggacccacagcccatctttgtgtatctttttaaggccagattgagtatcccactcatatataaaactcggtagggttactagcagttagacaaagactatgaaacggtaggaaaaaagaaaaatcaacctcactgattattcacatattgcattatgagtgctcttttttaaacctaaagaataatttatattatttctgtagaaaatcaaatgaacactgtctactcataaaacctaaaggtcacggcacatgtggtttcactttccatcttgagttagcttcagcacacagagaccccctccaaagggtcagtgcaggagagcaggcagaaggcaggcctctctggcccagtgtgtgtctcctttattgctgtagaaatctcagccttgcatacccatttcctcacgacttggaggccaggcgaactgattttcatgggaggattgagtttttcttcaatttgatatttgaaaataaatacttctccaatgatatgaattatgattttcctgttcaaaaaccacctctggcaaaattcacatttacaagccattactcgatgttgtctgtaaaaacaatccaaagttccactttgaaggatctgatggctgaagttcggctacagtcagatgttttgcaccagctgaagttaaggctagcaaccctttctccaa

SEQ ID NO: 187319 - DNA, 1202 bp, Homo Sapiens
  misc_feature (1138)..(1150): n is a, c, g, or t
ttggctctgttgcttctattggcctaaacccactactgccaaagaacccagcaacaaacctcccggctaggagctttagaagtctttatgttcttcctgccatcattcctccttttcccacagggaaagaaaagttggatcactagtggccagcatccccagagttccgttagtaaacttacttcatatgtcccctgtcttcctccatctgagaagtggcccatgtgcttcaaggcccaggagggagatctgtcagctcattcttgccttactccaatgatggcccaggtggaaaagtagcagctgtatcgggcttcctcatcctgcctgttcccccacacctgccaggatatggacatcttgggatatctctttaccactgaagtagaattgattgttcagctggagcccagagaatttaatttaatgttttttctttgtacctgatgtgaattctagcaacctttgttaggaaaaagcacagcctcagatggaggcagcctaaactgtgttcttgttttgttcatggtgtttctaagcgttttgctgaagctgctctcaggcacccccttcttcattgctctctccagaaagggttgctagccttaacttcagctggtgcaaaacatctgactgtagccgaacttcagccatcagatccttcaaagtggaactttggattgtttttacagacaacatcgagtaatggcttgtaaatgtgaattttgccagaggtggtttttgaacaggaaaatcataattcatatcattggagaagtatttattttcaaatatcaaattgaagaaaaactcaatcctcccatgaaaatcagttcgcctggcctccaagtcgtgaggaaatgggtatgcaaggctgagatttctacagcaataaaggagacacacactgggccagagaggcctgccttctgcctgctctcctgcactgaccctttggagggggtctctgtgtgctgaagctaactcaagatggaaagtgaaaccacatgtgccgtgacctttaggttttatgagtagacagtgttcatttgattttctacagaaataatataaattattctttaggtttaaaaaagagcactcataatgcaatatgtgaataatcagtgaggttgannnnnnnnnnnnncctaccggtttcatagtctttgtctaactgctagtaaccctaccgagtttta

SEQ ID NO: 187320 - DNA, 1051 bp, Homo Sapiens
aacacacctggcaactttcaagacacattctaagaatcagtgctatttcctatagctgatcatttgcatgtagctgtatttttatttaatatataaatatatttaatttacatattttaagtgcatttatgtatagttctagtgtcttagttattatagacataaaattcaatgtagaaacagaacatgtaacataattatagcatatctgtttaaaagtttaagtagatatgctatttaaacttttaaatagcatatctatttaaacttttctattgtatactgctttgacacaagcaatccaggaaagctgtcttcttttaatatacacttttaagtttatgatttatgtgtgtattaaccattgtacatttataacttcatattattttatgataaactcaagtatatttctttcttcctccaggcatcctgtttacgctggtctgtggggcttctgggacgtctaaacaaccaaaagtaattcctgatgatttagcccagcagaacctaattgtatcaaacacagaagctcctggagatgacaaagtgtattctgcgaatggcttcacaacccaaactgtgggcgcttctgctcagggagtttgtggcaccgtgggatcaggaatcaaaaacggaggtcaggagaccatcgaaatggtgaaaggaggacaccagacctcggaatcctgccggggggctggccaccatcacaccctggactcctgcaggggaggacacacggaggtggacaactgcagatacacttactcggagtggcacagttttactcagccccgtcttggtgaaaaagtgtatctgtgtaatcaagatgaaaatcacaagcatgcccaagactatgtcctgacatataactatgaaggaagaggatcggtggctgggtctgtaattgttgcagtgaacgacaagaagaagatgggcttgaatttttggataatttggagcccaaatttagacactagcagacgcatgcatgaagagatgagtgtgttctaataagtctctgaaagccagtggctttatgactttt

SEQ ID NO: 187321 - DNA, 889 bp, Homo Sapiens
ttggctggaactcctctacagaattccctcaaagagctctggtctttgctacatttcattatgccagaaaagttttcttcctgggaagattttgaagaagaacatggcaaagggagagaatatggttatgcaagccttcacaaggagcttgagccatttctgttacgccgagttaagaaagatgtggaaaaatctcttcctgccaaggttgagcagattttaagaatggaaatgagtgctttacagaaacaatattacaaatggattttaactaggaattacaaagccctcagcaaaggttccaagggcagtacctcaggctttttgaacattatgatggagctaaagaaatgttgtaaccattgctacctcattaaaccaccagataataatgaattctataataaacaggaggccttacaacacttaattcgtagtagcggaaaattgattcttcttgacaagctattaattcgcctaagagaacgaggcaatcgagttcttattttttcacaaatggtgcggatgttagatatacttgcagaatatttgaaatatcgtcaattcccctttcaaagattagatggatcaataaaaggagaactgaggaaacaagctctagatcattttaatgctgagggatcagaggatttttgctttttgctgtccacaagagctggaggtctagggattaatttagcctctgctgacactgttgttatatttgattccgattggaatccacagaatgatcttcagcacagctagagcccatcgaattgggcaaaagaaacaggtgaatatttatcgtctagttacaaagggatcagttgaagaagatattcttgaaacggcgaaaaaggagatggttttagatcatcttgtaatt

SEQ ID NO: 187322 - DNA, 617 bp, Homo Sapiens
ggtgcatgtggacgcggcccgcgcgctgtggcccctgcggcgcttctggaggagcacaggcttctgccccccgctgccacacagccaggctgaccagtacgtcctcagctgggaccagcagctcaacctcgcctatgtgggcgccgtccctcaccgcggcatcaagcaggtccggacccactggctgctggagcttgtcaccaccagggggtccactggacggggcctgagctacaacttcacccacctggacgggtacttggaccttctcagggagaaccagctcctcccagggtttgagctgatgggcagcgcctcgggccacttcactgactttgaggacaagcagcaggtgtttgagtggaaggacttggtctccagcctggccaggagatacatcggtaggtacggactggcgcatgtttccaagtggaacttcgagacgtggaatgagccagaccaccacgactttgacaacgtctccatgaccatgcaaggcttcctgaactactacgatgcctgctcggagggtctgcgcgccgccagccccgccctgcggctgggaggccccggcgactccttccacaccccaccgcgatccccgctgagctggggcc

SEQ ID NO: 187323 - DNA, 1284 bp, Homo Sapiens
ttggcttccaggccagcttagagggaggactagctcggatcacccagggtcagccactggaggtggcctttgggtcccaggtcactctgaggaacgtctttgggaaacctgtgccctgctggcttcattcccaccaggacacctaccccatgatatatgagaacggccgaggcagctcccaccagcaacaggtgacctgttaccccttcaaagacgtcaataactggtggattgtaaaggatcccaggaggcaccagctggtggtgagcagccctccgagacctgtgaggcacggggacatggtgcagctggtccacggcatgaccacccgctccctgaacacgcatgatgttgcagcccccctgagcccccattcacaggaggtctcctgctacattgactataacatctccatgcccgcccagaacctctggagactggaaattgtgaacagaggatctgacacagacgtctggaagaccatcctctcagaggtccgctttgtgcacgtgaacacttccgctgtcttaaagctgagcggggctcacctccctgactgggggtatcggcaactggagatcgtcggggagaagctgtcccggggctaccacgggagcacggtgtggaacgtggaggagcaccgatacggcgcgagccaggagcagagggagcgggaacgggagctgcactcacctgcgcaggtggacgtcagcaggaacctcagcttcatggcgagattctcggagctgcagtggaggatgctggcgctgagaagtgatgactcggaacacaagtacagctccagcccactggagtgggtcaccctggacaccaatattgcctactggctgcaccccaggaccagcgctcagatccacctacttggaaacatagtgatctgggtttcgggcagcctcgctctggccatctacgccctgctgtccttgtggtacctgctccgacggcgaagaaatgtccatgacctccctcaggatgcctggctgcgctgggtgctggctggggcgctgtgtgccggtggctgggcagtgaactacctcccgttcttcctgatggagaagacactcttcctctaccactacctgcccgcactcaccttccaaatccttctgctccctgtggtcctgcagcacatcagcgaccacctgtgcaggtcccagctccagaggagcatcttcagcgccctggtggtggcctggtactcctccgcgtgccacgtgtccaacacgctgcgcccactcacctacgggacaagtcactctcgcc

SEQ ID NO: 187324 - DNA, 2177 bp, Homo Sapiens
  misc_feature (205)..(213): n is a, c, g, or t
  misc_feature (550)..(578): n is a, c, g, or t
  misc_feature (956)..(967): n is a, c, g, or t
  misc_feature (1680)..(1692): n is a, c, g, or t
ttggcctctacaaagctactccctgttattgtgtgcaagtttacaccaggatgctcacttgatttgtgaatatttttcattccatcaacaagggagtttaaatactatatgtgagactgacaaaaaccttaatgtaatttacttataatgccagaaggaaaacactattttcataccctactttttctgtacctaaattttcttnnnnnnnnntctagtatagcactacattcttttttaagtgatgcagaccttagtttctttagcccctttattttgaatacaatgctacatatgaatgttgaagctgatacattgcacagttctgtagacatcactacaccgatgtagtttctcaaattttagcaatatgctctacataaaatcactacagagatactagtggggaagacgattaacacacctcttacagtaatactgcctgttattggtatagcagtggtatttgcagactgggatcataaggagcccttaaatacttgttattgactggggttatttttatgctgtagcaaatgtgacaggctcnnnnnnnnnnnnnnnnnnnnnnnnnnnnnggtattactctgaaacaaaatttaagttggagtttcagggatttagggagtagttttcattctacatgaactgaggtaatattatggtaactccaatatttggttaaaaaaactatacaaatcagaatagtactaaaatactgtagaattttagcatttttattttgcactttgtgtggattgaggtgttcagaaataccaaccataaaaatgtaatctagttggcaaaggtgtgcgctaaaacacggaaccgaacatgcattgatttggataacttttgagggtttttgtcaaatagcatgtgaagagttacatttttcttaaaagattggtggtcccaatgtcagagttcttggaacagataactgaatgatagannnnnnnnnnnnaaagataaaactttacaacctgcacatttgttatgcatactaaatggtgtgttaaaattagggtttctttgcctctctacactacactaatctgcctaaaggtggttgtttcatatttataatgctaattatcatacctacctactttaaattttaggtagaaaattatctgatttaaatacaaacatatttttctcacattgagtaatatgcataatgtagttccaaatgtatttcattactatagtcacaatatccaactaaaaattacgctatctagaattgtaccaaccaaaatctcgtattggcagatcttgacaggctggacctgcaagatgtggcttgaattttaaccatttattacataatctctagtgatcatgcatctagttatcataagaaataatttaaaaggttttgttgctgaaagcagtaagtggtgcagtaaaatacttaagttattcaaagaatgttatctttcttgcaagagtaatttaagcacatgggaaagattctagactttttgtttcttgcaacaacagtgccctctgctgctagaaacctttttctacttactatcatttttattgtggcttgagctcagtcaatctggtgcagatgaggctggacaactactaaccaataaaatcaggagtttgtacaaaagttaaatggaacattataattattttaagtaatgttaattgaaaaannnnnnnnnnnnngacaatataaaaaacattttaaatttcctagaaatgtcttcagggtaatgccaatttaagatctctcttaacttgtggccaagaaattctagattttccagctgactttggtataatatatatttatcaggaacttctctcagcagagagtacccattcttcgagttcaaagcacaattttaaacatgtaaaatggatatataatttgccaaaggtaattaatttattctttttttcttaaagaagaaaaagacattggttgttgttacaaaaagtctaaattactgttggttgaaacacagcagctgtggagttcagtccaggcatgaagactaaatctgctttaccaagtaaatgtaaattgcatgtttcagtcctctaccatcctgcactgtgagcagcactatacctgtgcgttgtctgaagcccttccgtatattctccagctaaatggtcgtctggtagcctttgcatttaacaaacta

SEQ ID NO: 187325 - DNA, 4376 bp, Homo Sapiens
ttggagaagattacagaccactgtttgaaaattttgttcaagaccttctttcaacagtcaataagcctgaatggccagctgctgaactactccttagtttgttagggagactgttggttcatcagttcagtaacaagtcaacagagatggctttaagagtggcatctcttgattaccttggaactgttgctgcacggctaagaaaagatgctgttacaagcaaaatggatcaaggatctatagaacgcattttaaaacaggtttcaggaggggaagatgaaatccaacaattacaaaaagcattgcttgattacttggatgaaaacactgagactgatccttcactagtgttttctcgtaaattctatatagcccagtggtttcgagacacaactctggaaacagaaaaagcaatgaaatcacaaaaagatgaagaatcatctgaaggaacacatcatgcaaaggaaattgagacaactggccaaattatgcatcgagctgaaaaccgaaaaaagtttcttagaagcattatcaaaaccacaccttctcagtttagcacattaaagatgaactctgatactgtggactatgatgatgcttgcttgattgttcgatacttggcctccatgaggccgtttgcccagagctttgatatttatttgacacagatcctacgagttcttggtgaaaatgcaattgctgttcgaacaaaagccatgaagtgtttgtctgaggttgttgctgtagaccccagtattctagcaaggcttgatatgcaacgaggtgttcatggacgattgatggataattcgactagtgtccgagaagcagcagtagaattactaggtcgatttgtcctttgtcgacctcagcttgctgaacagtattatgatatgctgattgaaagaatattggatactggtatcagtgtcaggaaaagagtaataaagattctcagagacatttgtattgaacaaccaacatttccaaaaatcacagaaatgtgtgtaaaaatgattcgcagagtcaatgatgaagagggcattaagaaattagtaaatgaaacattccagaaactctggtttactccaactccacacaatgacaaagaagcaatgacaaggaaaattttaaacattaccgatgtggttgcagcatgcagagatactggatatgactggtttgagcaactgcttcaaaacttgttgaagtctgaagaggattcctcatataaacctgtgaagaaagcttgtactcaacttgttgataacctagttgagcacattcttaaatatgaggaatctctagctgactctgacaataaaggtgtgaattctggaagattggtagcttgcataaccactttgttcttattcagcaaaataagaccccagctcatggttaaacatgcaatgactatgcaaccataccttaccactaaatgtagtacgcaaaatgatttcatggttatctgcaatgttgcaaaaatcctagagctagttgtaccactgatggagcatccaagtgaaacttttcttgccactattgaggaagatctaatgaagctcatcatcaaatatggcatgactgtagtgcaacattgtgtgagctgtcttggagctgttgtaaataaagtgacacaaaattttaaatttgtgtgggcttgtttcaatagatactatggtgccatttcaaaattaaaaagtcaacaccaagaggacccaaataacacttcacttctaacaaacaaaccagcacttcttagatcccttttcaccgttggagcactatgtcggcattttgattttgatctggaagattttaaaggcaacagcaaggttaacataaaagataaagtacttgaactattgatgtattttacaaaacactcagatgaagaagtacaaacaaaagctatcattggtctaggatttgcctttattcagcatccaagtctaatgttcgagcaagaagtgaagaatctatataataatattttatctgataagaactcctcagtcaatttaaaaatacaagtgttaaaaaacctccagacctacctacaagaagaagatacacgtatgcagcaggcagatagagactggaagaaagttgcaaaacaggaagacttaaaagaaatgggtgatgtttcctcagggatgagtagttccatcatgcagctttatctcaaacaggtgcttgaggcattttttcacacccagtcaagtgtacgccactttgccctaaatgtcattgcattgactctaaatcaaggtcttattcatccagttcagtgtgtgccatatttaattgctatgggcacagacccagaacctgctatgcggaacaaggctgatcagcaacttgtggaaatagacaaaaaatatgctggattcattcatatgaaagcagtggctggtatgaagatgtcttaccaggtacaacaggcaatcaacacatgcctaaaagatcctgtaaggggtttcagacaagacgagtcctctagcgctttgtgttcacacctttactccatgatccgtggaaaccgccaacacagacgagcctttcttatttctttactcaacctctttgatgacacagcaaaaacagacgtgactatgctcttgtatatagcagacaatctagcctgttttccataccagacacaggaagagccgttgtttataatgcatcatatagacattacactctcagtttctggtagtaacctactgcagtcattcaaggagtctatggtaaaggacaaaaggaaagagagaaaatcatcacctagtaaggaaaatgagtcaagcgacagtgaagaagaagtttccaggcctcggaagtcacggaaacgtgtagattcagattcagattcagattcagaagacgatataaattcagtgatgaaatgtttgccagaaaattcagctcctttaatcgaatttgcaaatgtgtcccagggtattttattacttctcatgttaaaacaacatttgaagaatctttgtggattttctgatagtaaaattcagaagtactctccatctgaatctgcaaaagtatatgataaagcgataaaccgaaaaacaggagttcattttcatccaaaacaaacactggacttcctgcggagtgacatggctaattccaaaatcacagaagaggtgaaaaggagtatagtaaaacagtatctagatttcaaacttctcatggaacatctggaccctgatgaagaagaagaagaaggggaggtttcagctagcacaaatgctcggaacaaagcaattacctcactgcttggaggaggcagccctaaaaataatacagcagcagagacagaagatgatgaaagtgatggggaggatagaggaggaggcacttcaggggtgaggcggaggaggagtcaacgtatttcgcagcgtattacgtaaaatgatttttatgtgcttatatatgtcagtctattaaatgtacaccaagtaatgtaatacttaaaagagaaaacattttgtagatagagattctctacttacccgtttatacatccttttgtagaaagtttaacataaaagacaataaaaaaacagaaatgagatttatccagcataaagggttaatttttctttgaattgtattaatgtgtgttatttttattgttgctaagttttatgtagctatatggttcatatgtatatataattttatatatcaataagagtaaagacacgggtacaaattaagagttatatggttttacaagtatatgttaaccccttggcgctggcggtcacggtgcgtctcattgccggcaatggaagtgtgccgggaaatcccaactcccggcgtcaagggattaaaagcaataaaaacaataatttcactaaaattcttttgtgtaacacttggtcttttttcccccctcccaatgttttagtcattgagaaggtcaaaacgaaattcagactctacggagttggcagcacagatgaatgaaagtgttgacgtcatggatgtcatcgctatttgctgtccaaagtacaaagatcgaccacaaattgcaagagtagtgcagaaaaccagcagtggcttcagtgttcagtggatggcaggctcctacagtggctcctggactgaggctaagcgccgtgatggccgcaaactggtgccttgggtagacactattaaagagtcagacattatttacaaaaaaattgctctaacgagtgctaataagctgactaataaagttgttcagactttacgatccctgtatgccgccaaggatgggacttccagctaatgaatttgtacatgcagccaaatttacaggaatttttttaaaaggcagaaaacttgaaataccacattctggc

SEQ ID NO: 187326 - DNA, 915 bp, Homo Sapiens
  misc_feature (653)..(661): n is a, c, g, or t
ctttgtacaaaaaagttgggttatatggttttacaagtatatgttaaccccttggcgctggcggtcacggtgcgtctcattgccggcaatggaagtgtgccgggaaatcccaactcccggcgtcaagggattaaaagcaataaaaacaataatttcactaaaattcttttgtgtaacacttggtcttttttcccccctcccaatgttttagtcattgagaaggtcaaaacgaaattcagactctacggagttggcagcacagatgaatgaaagtgttgacgtcatggatgtcatcgctatttgctgtccaaagtacaaagatcgaccacaaattgcaagagtagtgcagaaaaccagcagtggcttcagtgttcagtggatggcaggctcctacagtggctcctggactgaggctaagcgccgtgatggccgcaaactggtgccttgggtagacactattaaagagtcagacattatttacaaaaaaattgctctaacgagtgctaataagctgactaataaagttgttcagactttacgatccctgtatgccgccaaggatgggacttccagctaatgaatttgtacatgcagccaaatttacaggaatttttttaaaaggcagaaaaacttgaaataccaacattctggcnnnnnnnnntcagttttatgaagagtaagtggaacctgggatgcaggaacaaaagaaggaaatgttgggcaaacatttttgtgggagctcccttcgctgttgtgcagcagaaacagattctcagttcatttttactcccactgtattatagttaacaaaaattgtttatatcttgggaaaaaaactttctgtttaaaaaaataaaccaagtgaatgttgggaaattagtctgttatgttcttaataaagtgttcttggagttt

SEQ ID NO: 187327 - DNA, 1842 bp, Homo Sapiens
ctttgtacaaaaaagttgggacaaaacacttcatacccaggtggaatgacgccaggactgatgacacctggcacaggtgagctggacatgaggaagattggccaagcgaggaacactctgatggacatgaggctgagccaggtgtctgactccgtgagtggacagaccgtcgttgaccccaaaggctacctgacggatttaaattccatgatcccgacacacggaggagacatcaatgatatcaagaaggcgcgactgctcctcaagtctgttcgggagacgaaccctcatcacccgccagcctggattgcatcagcccgcctggaagaagtcactgggaagctacaagtagctcggaaccttatcatgaaggggacggagatgtgccccaagagtgaagatgtctggctggaagcagccaggttgcagcctggggacacagccaaggccgtggtagcccaagctgtccgtcatctcccacagtctgtcaggatttacatcagagccgcagagctggaaacggacattcgtgcaaagaagcgggttcttcggaaagccctcgagcatgttccaaactcggttcgcttgtggaaagcagccgttgagctggaagaacctgaagatgctagaatcatgctgagccgagctgtggagtgctgccccaccagcgtggagctctggcttgctctggcaaggctggagacctatgaaaatgcccgcaaggtcttgaacaaggcgcgggagaacattcctacagaccgacatatctggatcacggctgctaagctggaggaagccaatgggaacacgcagatggtggagaagatcatcgaccgagccatcacctcgctgcgggccaacggtgtggagatcaaccgtgagcagtggatccaggatgccgaggaatgtgacagggctgggagtgtggccacctgccaggccgtcatgcgtgccgtgattgggattgggattgaggaggaagatcggaagcatacctggatggaggatgctgacagttgtgtagcccacaatgccctggagtgtgcacgagccatctacgcctacgccctgcaggtgttccccagcaagaagagtgtgtggctgcgcgccgcgtacttcgagaagaaccatggcactcgggagtccctggaagcactcctgcagagggctgtggcccactgccccaaagcagaggtgctgtggctcatgggcgccaagtccaagtggctggcaggggatgtgcctgcagcaaggagcatcctggccctggccttccaggccaaccccaacagtgaggagatctggctggcagccgtgaagctggagtccgagaatgatgagtacgagcgggcccggaggctgctggccaaggcgcggagcagtgcccccaccgcccgggtgttcatgaagtctgtgaagctggagtgggtgcaagacaacatcagggcagcccaagatctgtgcgaggaggccctgcggcactatgaggacttccccaagctgtggatgatgaaggggcagatcgaggagcagaaggagatgatggagaaggcgcgggaagcctataaccaggggttgaagaagtgtccccactccacacccctgtggcttttgctctctcggctggaggagaagattgggcagcttactcgagcacgggccattttggaaaagtctcgtctgaagaacccaaagaaccctgggctgtggttggagtccgtgcgggctggagtaccgtgcggggctgaagaacatcgcaaatacactcatgggccaagcgctgcagagtgccccaaactccggtatcctgtggtctgagccatcttcctcgaggcaaggccc

SEQ ID NO: 187328 - DNA, 1579 bp, Homo Sapiens
ttggctgcgtctttccctcttccgctgcctcattcctttccttcctagccttggtcgtcgccgccaccatgaacaagaagaagaaaccgttcctagggatgcccgcgcccctcggctacgtgccggggctgggccggggcgccactggcttcaccacgcggtcagacattgggcccgcccgtgatgcaaatgaccctgtggatgatcgccatgcacccccaggcaagagaaccgttggggaccagatgaagaaaaatcaggctgctgacgatgacgacgaggatctaaatgacaccaattacgatgagtttaatggctatgctgggagcctcttctcaagtggaccctacgagaaagatgatgaggaagcagatgctatctatgcagccctggataaaaggatggatgaaagaagaaaagaaagacgggagcaaagggagaaagaagaaatagagaaatatcgtatggaacgccccaaaatccaacagcagttctcagacctcaagaggaagttggcagaagtcacagaagaagagtggctgagcatccccgaggttggcgatgccagaaataaacgtcagcggaacccacgctatgagaagctgacccctgttcctgacagtttctttgccaaacatttacagaccggagagaaccatacctcagtggatccccgacaaactcaatttggaggtcttaacacaccctatccaggtggactaaacactccatacccaggtggaatgacgccaggactgatgacacctggcacaggtgagctggacatgaggaagattggccaagcgaggaacactctgatggacatgaggctgagccaggtgtctgactccgtgagtggacagaccgtcgttgaccccaaaggctacctgacggatttaaattccatgatcccgacacacggaggagacatcaatgatatcaagaaggcgcgactgctcctcaagtctgttcgggagacgaaccctcatcacccgccagcctggattgcatcagcccgcctggaagaagtcactgggaagctacaagtagctcggaaccttatcatgaaggggacggagatgtgccccaagagtgaagatgtctggctggaagcagccaggttgcagcctggggacacagccaaggccgtggtagcccaagctgtccgtcatctcccacagtctgtcaggatttacatcagagccgcagagctggaaacggacattcgtgcaaagaagcgggttcttcggaaagccctcgagcatgttccaaactcggttcgcttgtggaaagcagccgttgagctggaagaacctgaagatgctagaatcatgctgagccgagctgtggagtgctgccccaccagcgtggagctctggcttgctctggcaaggctggagacctatgaaaatgcccgcaaggtcttgaacaatgcgcgggagaacattcctacagaccgacatatctggatcacggctgctaagctggaggaagccaatgggaacacgcagatggtggagaagatcatcgaccgagccatcacctcgctgcgggccaacggtgtggagatcaaccgtga

SEQ ID NO: 187329 - DNA, 981 bp, Homo Sapiens
  misc_feature (693)..(736): n is a, c, g, or t
aaaaaagttgggaacatagtgtctttccatcaattgtggacctaaagaggtggggaagcaaggacaagaggcaaagagccacactgcccttggcatcatccaaagcattgtctggttgacaccaggtcctggttttgtgtcttttgtcaatacctgaatccttgacaaaagaaaaagtggttttgatgatttaaagaaataagggtgattttgacagaaaatatattttaaaaattttgaccaattgcaatagttatcctcaagccaatttccagaacctgccaccagggggaggtggtgcagcatgaatcattctgaatgctttgtctttgaagtgttcccctattgctgttaccatctcagaggaagtaactgggcatggtgagactcctaaaatgacaggagtttttttggccaaagctggcatctgacttgccacattcctctgagtctggagtagccgcaggggtgggagaatgccagcccagagtcagtccatcggggttacatttccaaggtctgctgccttcatctatgtaatggccgtgttactttcagatctttcagcttcccagagtgttgtgggaatcttggtcattgaatgtaaagggacttagtaaagggtatagatatttttcaaaaatgaaaataactttttttcttataagtgataagcttttataaagatcatannnnnnnnnnnnnnnnnnnnnnnnnnnnnnnnnnnnnnnnnnnncttcattagagatattttgatagataccttttcagtgtctatttacaaattttttcttttaatatagatagggtctcactatattgcccagctcactcctgagctcaagagatcctcccaccatagcctcccaaatattggaaatacaggcatgagccactgctcctgaccaattcacaaatttttttaagaacaaacgtgctatcatcgatacatactgttaggttgtctttttttaaaaaacc

SEQ ID NO: 187330 - DNA, 1100 bp, Homo Sapiens
ttggcacaaagtacagaccattgtgtgtgacaaagcccatcgtgtgtctgtgtgtgtctttatccacgtggatggacgtctctttcttgctctgccccaagacacaccctagcccctccttattctcaaaagggggagctggggagcctccccctaccctggggcctcccctgcccctccccgccctgcctggccgtcaccactccccagagggcacagggctctgctgtgcctcagagcaaaagtcccagagccagcagagcaggctgacgacctgcaagccacagtggctgccctgtgcgtgctgcgaggtgggggaccctgggcaggaagctggctgagccccaagaccccgggggccatgggcggggatctggtgcttggcctgggggccttgagacgccgaaagcgcttgctggagcaggagaagtctctggccggctgggcactggtgctggcaggaactggcattggactcatggtgctgcatgcagagatgctgtggttcggggggtgctcgtgggcgctctacctgttcctggttaaatgcacgatcagcatttccaccttcttactcctctgcctcatcgtggcctttcatgccaaagaggtccagctgttcatgaccgacaacgggctgcgggactggcgcgtggcgctgaccgggcggcaggcggcgcagatcgtgctggagctggtggtgtgtgggctgcacccggcgcccgtgcggggcccgccgtgcgtgcaggatttaggggcgccgctgacctccccgcagccctggccgggattcctgggccaaggggaagcgctgctgtccctggccatgctgctgcgtctctacctggtgccccgcgccgtgctcctgcgcagcggcgtcctgctcaacgcttcctaccgcagcatcggcgctctcaatcaagtccgcttccgccactggttcgtggccaagctttacatgaacacgcaccctgggccgcctgctgctcgggcctcacgcttggcctctggctgaccaccgcctgggtgctgtccgtgggccgagagacacactttgggctgatcccccatcacattccctgaccatcggctatggtgac

SEQ ID NO: 187331 - DNA, 1798 bp, Homo Sapiens
ttggagggaagcaaggaggcggcggcggccgcagcgagtggcgagtagtggaaacgttgcttctgaggggagcccaaggtagggaggcgaggcgacggtgtgcgggagcgggctctccagggacttcccgggtccgcaactggcagggccgttcgattcgcaggggatcccgtttcgtttctgttgttttccctttatttttaggagtgcccggggcgacgggaccccgggagaggggaaagggaacagtctggggtccgggcatcgctgtgggccgggctgggtttagggggacggcggtgcgggctgggccggtttgggcgcggcgggggccggatgatggggcgagtccggaccttggcgggcgagtgctcggcgcaggcgcaagcgcagagtctcctcgcggtcgtcctctcggcccctccctctggggggacccccagtgccaggctgtcagtgcgcagccccagcccgcgggacccctggggactctgggcgcctgttctgcagatgaccggttctaacgagttcaagctgaaccagccacccgaggatggcatctcctccgtgaagttcagccccaacacctcccagttcctgcttgtctcctcctgggacacgtccgtgcgtctctacgatgtgccggccaactccatgcggctcaagtaccagcacaccggcgccgtcctggactgcgccttctacgatccaacgcatgcctggagtggaggactagatcatcaattgaaaatgcatgatttgaacactgatcaagaaaatcttgttgggacccatgatgcccctatcagatgtgttgaatactgtccagaagtgaatgtgatggtcactggaagttgggatcagacagttaaactgtgggatcccagaactccttgtaatgctgggaccttctctcagcctgaaaaggtatataccctctcagtgtctggagaccggctgattgtgggaacagcaggccgcagagtgttggtgtgggacttacggaacatgggttacgtgcagcagcgcagggagtccagcctgaaataccagactcgctgcatacgagcgtttccaaacaagcagggttatgtattaagctctattgaaggccgagtggcagttgagtatttggacccaagccctgaggtacagaagaagaagtatgccttcaaatgtcacagactaaaagaaaataatattgagcagatttacccagtcaatgccatttcttttcacaatatccacaatacatttgccacaggtggttctgatggctttgtaaatatttgggatccatttaacaaaaagcgactgtgccaattccatcggtaccccacgagcatcgcatcacttgccttcagtaatgatgggactacgcttgcaatagcgtcatcatatatgtatgaaatggatgacacagaacatcctgaagatggtatcttcattcgccaagtgacagatgcagaaacaaaacccaagtccacctaatcatcctgtgaaagtggtttctctatggaaagctttgtttgcttcctacaaatacatgcttattccttaagggatgtgttagagttactgtggatttctctgttttctgtcttacaagaaacttgtctatgtaccttaatactttgtttaggatgaggagtctttgtgtccctgtacagtagtctgacgtatttccccttctgtcccctagtaagcccagttgctgtatctgaacagtttgagctctttttgtaatatactctaaacctgttatttctgtgctaataaacgagatgcagaacccttg

SEQ ID NO: 187332 - DNA, 2234 bp, Homo Sapiens
ttggtgattagagacctactaatgtacatggaccgtgtgtatgtacaacaaaataatgtggagaacgtctacaatttgggattaattatttttcgagatcaagttgtacgttatgggtgtattagggatcatctacggcaaactctattggatatgattgcaagagagcggaaaggagaagtcgtagacagaggcgcaataagaaatgcttgccagatgttaatgattttaggtctcgaaggaagatcagtctatgaagaagattttgaggctccttttttggaaatgtctgcagaattttttcagatggaaagccagaaatttttagcagaaaatagtgcttcagtatatataaagaaagtagaagctagaattaatgaagaaatagaacgagtgatgcactgccttgacaaatcaacggaagaaccaattgtaaaggtggttgaaagggaactcatttccaagcacatgaagactatagtagaaatggagaattctgggctagtacatatgttgaaaaatggaaagacagaagaccttggttgcatgtacaagttatttagtcgtgtgccaaatggtttgaaaacaatgtgtgagtgtatgagttcctatttgagggagcaaggtaaagctcttgtttctgaagaaggagaaggaaagaatcctgttgactatatccagggcttattggatctgaagagtaggttcgatcgcttcctcctggaatcattcaacaatgaccgtctctttaaacaaactattgcgggtgactttgagtattttctcaacctcaactccaggtctcctgaatacctctcattatttattgatgataagctgaaaaagggagtcaaagggctaacagaacaagaagtagaaacaatattggataaagcaatggtcctttttaggtttatgcaagaaaaagatgtatttgaacgttattataaacaacacttggcaaggagacttctcacaaataaaagtgtttctgatgactctgaaaaaaacatgatatctaagttaaagactgaatgtggatgtcagttcacgtcaaaactggaaggaatgtttagggatatgagcatctcaaacacaacgatggatgaattcaggcaacatctacaggcaactggtgtatctttaggtggtgttgatcttacagtccgggtgctcacgacaggatattggcccactcagtcagccacaccaaagtgcaacatcccaccagcaccaagacatgcttttgagatattcagaaggttctacttagccaaacacagtggtcgacagctcacactccagcatcatatgggttctgcagatctcaatgccacattttatggaccagttaaaaaggaagatggatctgaagttggtgttggaggtgcacaagtaactggctctaatacacggaagcacatattgcaagtttccactttccagatgaccatattaatgctctttaataatagagaaaaatacacatttgaggaaattcagcaagagacagatatccctgaaagagagcttgttagagccctacagtccctcgcctgtggtaaaccaacacagcgggttcttacaaaagaacccaaatcaaaggaaatagaaaatggtcatatatttacagttaatgatcaattcacatccaaactacacagagtcaagattcaaacagttgctgccaaacaaggtgaatccgacccagagaggaaagaaacaaggcagaaagtagacgacgacagaaaacatgagatagaagctgctatagtgcggataatgaaatctagaaagaagatgcagcacaatgttctagtagcggaggtaactcagcagttgaaggcgcgattcttaccaagtccagttgttattaagaaacgtattgaaggacttattgagagagaatatttggcacgaacacctgaggatcgcaaagtatacacatatgtagcataaaatgcgttcagaaatttgatttattcttggactgtactcttcgcatggactgggaagttcttttaaatcattaaatattaagacgaccatctcttctattaaattacagtacatgttctagaccattgagatcaagcctttactccctttgagagtttccaacatcagttgattgagcttcagctttacaacgtttatccctgtagagatcatctttacagttcctcgggaaaatgtgaatgtgctgcgttttgttttctttactgtatgaaaac

SEQ ID NO: 187333 - DNA, 987 bp, Homo Sapiens
attccaaaaagtgggaagggcatggggagcagctatccatcccctttcaactctcattatgggtgggataagaacatcttaaaaggcaaggtaactattttaaagtttttaaaactgagttataaaatgcatctgggcttctgaacaaagagggaaacataggaaaaatgataacagattaaagtaaggaattcatccctttgtcgtttgcaaagtctcttaatcaactcaacagttagagagtaaaaatgactacatttgtgactgcaatctgaggacacagtaaaggacatcttggtgaaacacacacacattataacccgagctgctgaggagtttcacatctagggcatgcacatatttcatactgatacagtttacaacaactcaagggagaaagatcataataggtacatgggaaatgtcaccaaatctatatacaaacgcattaacagggagaacacatgaagtcaaagggagacccaaatacaagtttaaaaatacatttgaaaatcattccaaagccaaggaacttatttactgaaaactctgacattctacagaataccttgaaaaccttaagaatgcagttttaaataattcacagtctcaaaagaaaataaatttctggtttatcatcactgcttggctcagtctgcaaaacagaattatctgaacaaaactggtcaacgtggccatagtgaagagccgtgcatgccccctctgggatgccccggccttcaaggccaccccctttcgtgttcttcaggtagcctgcgatgtaggagccggtggagtggcgattcactgcaggggtgggtgctgagggtttgtttctaagaaccactcctgccccattgctggggtttggaactttctgcttgttggcttcctgtttctccttggcacgactagcaatattgcgcactctgctctgacttctggatgacaacttcctgaccagtgcccgggggagctgattgccaa

SEQ ID NO: 187334 - DNA, 937 bp, Homo Sapiens
gcctgagccaccgcgcccggccccttatgggttcttctacactgctgggatctctgttttaagtgctcagcttcatgattgattgctgggcttccattttcccatccagttctggagttcgtagagagtgaagatggtagacttgaacagataaataaacttaacgatcttgtaagagttgtctagctacttaaaaccctcagaagtaagagcttagtctcacgagttgtaagagtgggatttggagcttggtggtggagactgacttcagctgagagatgcacaacagtcatggttttcttaagcctcttatgaaaccatgaatgagagatgaagctaaagaatagaatccagagatcacaaactcatctagagtacttccacaaaatttacaaagatgtgggaactttatggataggatatattttgtttgttgttgttaatatcaactagaggcactttacatagggttaagtgatcgaacccttttgtggttttgaacaccaacatactggcttacactgctgaaatattttgggtttcattattttgcactggatccaccctgtaaatactcttaagtatacatttcaaccactgttttttctactctttttgctgctcattaaaatctttcatgtaggtgccagaaccatatgtaaacagctttttaaaaaattgaagctggtattttgtttaaacaaaaagccatagaacttggtcatgttttccattttaaaatgatttactgaaacaaagtaatactaataaaaacccacaggcaccaaacaggctgcttaaaatggtctgttaaagacattttttggttatggaatataagaaaagttttgcacatctgtaaggggaaaaacagtatatcaccattgggtagagtggacgggactcatgtaaggactcaatttggggaagagcattc

SEQ ID NO: 187335 - DNA, 1410 bp, Homo Sapiens
  misc_feature (135)..(165): n is a, c, g, or t
ttggtgacgctgagtctcttcgggctgcggggggcgcaggcagagcgtggcccccgcgccttcgccgccctggccgagtgctgtgcgccctttgagccgggccagcgctaccaggagtttgtacgggcgctgcgnnnnnnnnnnnnnnnnnnnnnnnnnnnnnnnttctccttccaggagttccttccctccttgaacagctcccctctggacatcagaaagaagctctctgggcctcttcctccaaggctggatgagaattcagctgagccaggcccttgggaggatccgggcacaggctggcgctggcaagggactccaggccccactccgggcagcgatgtggacagcgtgggtggcggcagcgagtctcggtccctggactcacccacttccagcccaggcgctggcacgaggcagctggtgaaggcttcgtccacaggcactgagtcctcagatgactttgaggagcgagaccctgacctgggagacgggctggagaatgggctgggcagccccttcgggaagtggacactgtccagcgcggctcagacccaccagctgcggcgactgcggggcccagccaagtgccgcgagtgcgaagccttcatggtcagcgggacggagtgtgaggagtgctttctgacctgccacaagcgctgcctggagactctcctgatcctctgtggacacaggcggctcccagcccggacacccctttttggggttgacttcctgcagctacccagggacttcccggaggaggtaccctttgtggtcacgaagtgcacggctgagatagaacaccgtgccctggatgtgcagggcatttaccgggtcagcgggtcccgggtccgtgtggagcggctgtgccaggctttcgagaatggccgagcgttggtggagctgtcggggaactcgcctcatgacgtctcgagtgtcctcaagcgatttcttcaggagctcaccgagcccgtgatccccttccacctctacgacgccttcatctctctggctaagaccttgcatgcagaccctggggacgaccctgggacccccagccccagccctgaggttatccgctcgctgaagaccctcttggtacagctgcctgactctaactacaacaccctgcggcacctggtggcccatctgttcagggtggctgcacgatttatggaaaacaagatgtctgccaacaacctgggcattgtgtttgggccgacactgctgcggccgccggacggcccgcgggcagccagcgccatccctgtcacctgcctgctggactctgggcatcagcccagcttgtggagttcctcatcgtgcactacgagcagatctttgggatggatgagctcccccaggccactgagccccgcccaagactccagcccagcccctgggccc

SEQ ID NO: 187336 - DNA, 1709 bp, Homo Sapiens
  misc_feature (424)..(443): n is a, c, g, or t
ttggcaggattaaagtcaagtttacttaggcaacacaagaatatttcacttagatatgaagaaaggaaacactagtctccattcacttgaaatactctcatggcaaatatttatcctctcattaagtgctttttcaccctataggtaagcatttttgtgccaacatgttgtcagaaattaatgtatgttcatctcctctgttcctgcttatttttacttatatatttcagcagaaggtccgtggccattcacttcaattttgacctctgtcccatagtgaagaacatttaaagtaatactactggtcgaatatgaatgactttttaggaactactttttgtctaacctgaaaaagttccacatttggaagacaatttaatgatggtgaagaaataataaacctcactttacttgttaaaagggnnnnnnnnnnnnnnnnnnnngtctgcaacttcagggagaaataagattgtgtttgaatattgtaggtagatgcatttgtaattaaggataatatcgtttaacaacatgtatttggtttccctcaacttacagacatacagctatttaaaactatggcaatacttaagcatctctaaatttaggtgctaaatatctattattctgttgtagtcattaggtgcccttctctgaagttatgtaaaataaaagcatctgatccttcaaggataaagttgagggatcacatggtacgtggcatttgttgttattgttttttaaagagatggaggctggctctgttggtgcggtgccatgatcatagttcactataacctcgaactcctggctcaagtgatctcccacttcagcctcccgagtatctgggattataagcaagagccactgctcccagctcatggtatttgttgatagtcataacatttttcctgtatggtaagacgtatttttctcagtttataaatacgtagcactcaggttgagacgacttggattttattcttagaaatccagaatcccttgaaaaggaaatattttctgtttcttataaataaaagagtaatcttactttcagaaggattttccttagtgaaacatgtgtaacattgaatgcatgttaaataaaaatggaatttctaactttttttcaatagtgctaattatcttttctgaatgattttgaatgtcttcttaaatataccctatttttctattttaaagttaagtgcctcacttgctgtccatagttagacaaagaaaaaccaatttccactgcactagtaccaaaatactactttatacattagtttttcataaaagctgctggaatgtcatgattcagtattacctaaatagatttctgctaaaatcctctccctcctgtcttttttaagttatggaaaaacacaactaaattcatttgatcatcagcacttgttagcaggatttccttttttacctttgccttgtttctttagcccacaaatagtactcagcatactttcattaaaaatttggcacaatatgataattgttaatattctgttcttcgtctgtgttttatttaacttttactagtgtttagaagtgcaagaatattaaatagccccttccttaactgtacatattatcttgaatgtagataaaatgaaaatactgtaaattagagtgtaggaaaactggcatagagttaatatattttaatgggtttacattatactttaaaagta

SEQ ID NO: 187337 - DNA, 770 bp, Homo Sapiens
  misc_feature (76)..(85): n is a, c, g, or t
  misc_feature (329)..(346): n is a, c, g, or t
tacaaaaaagttggactgattcttgtatattaacaattataatgtttgtatatgcaaaactgctagcttgattttnnnnnnnnnncaaatctttaaaatctgctgcaaatttaaataattcccaaaatgaggaattctgtagttctgtgaaaaatttttttcttcagaatactaatattttgatgcatgtgtatcaccttattttgattaaatcttttccaattttgcaaacactacaatatactgcaacacaaaagattttatctgtaaacacaaagcccttcatctaatatttgttgctattgccaatttttcaatgaaatgacctnnnnnnnnnnnnnnnnnntaacctatacggtagttgctttagggggtggggggatgctatctgttagtgcttaaaagggggtaaatgcttgccgctttagaggtggatggtgctcataaaaggccccagtcgggggtatttaaaaaggactgaacagaaatccttagctagtagaatggcagcacgctgtaaaattattactgtattgtgtactggctataagatgtagacacctttctgtaagccaatcatttgtaaccattctagcagtgtcatattaggttaataaggctgctgtgttttaaagggcatttttatttgggttttggtgaaattctttaatttgttgattatattcacataaaatcagcattcattgacacatagctctaatgacatatgtatgaaaaaccataccctggatgacctattcgattattta

SEQ ID NO: 187338 - DNA, 840 bp, Homo Sapiens
actttgtacaaaaaagttggcggccacggtccaggctggacacaaccaaaggcggaggacccgtggcccacgaagctcatctttgaactgtccccgccttctcccgccttgacttgtgaccctaggccctttggggcgcctctgacccagctagccagatcccggacccaaaccatgttccctgtgaaggtgaaagtggagaaatcagagctggagatggccaaagcccggaaccaactggatgctgtcttgcagtgtctgctggagaagagtcacatggacagggagcgtctggatgaggaagctgggaaaacaccctcagacacccacaataaggactgctccatcgcagccactggcaaaaggccatctgcccgcttcccccaccagcggaggaagaagaggagggagatggatgatgggctggctgagggagggccgcagcgatccaacacatatgtgatcaagctgttcgaccggagcgtggacttggcccagttcagcgagaacacgccactgtacccaatctgccgcgcctggatgcgcaacagcccctctgtgcgcgagcgtgaatgctctcccagctcacccctgcccccgctgcctgaggatgaggaggtgggatgggtagtgggtcccagcccagcagcctggtgccagggcagtgggtggataggctcaaaggatcctgcccctaagctagtggggatagacagacacaggtccctcacgtgaatcctggatcaggctaggcacacagatgtgcactcttaggttggggtgtggatcagagtccctagggaagacatacgtaaccacctggcctgcgagacagggaac

SEQ ID NO: 187339 - DNA, 973 bp, Homo Sapiens
ttgggtggtggattccaacgagtgaggactcacttgtatggctctctgctttattacttacagattgcccagagacctgatgaaccagacaccttagaagcagccaagaaaaccatgtgggaaaggctgacagcccctgaagatgtatttagcaaattacagcgagaaaacatagccattattgaaagttatggcgccgccctcatggaagtggtctgtcgagatgcttgtgatggtcatgagattggaaggatgctggccctggctctacttgatagaattgtctccgtggataaacagcagcagtggcttttgtatctttctaacagtggctacttgaaggtcctcgtagacagcttggtagaagatgaccgtactttgcagagcttactcaccccacagcctccccttttaaaagcactttatacttatgaatctaaaatggcatttctcacaagagtggcaaagatacagcagggtgcattagagctgctaagatcaggggtgattgtgagactagctcaatgccaagtctatgacatgcgcccagaaacggacccgcagagcatgtttggcatgagagaccctccaatgttcatccctaccccagtggatcgctaccgccagattctcctcccagctctccagctgtgccaggtcatcctcacatctagtatggcccagcacttgcaggcagcagggcaggtattgcagtttcttatttcacattctgataccatacaagcaattctgcgctgtcaggatgttagtgctgggtctttgcaggaattggctctgctgacaggaattataagtaaagcagcacttcctggaatattaagtgaacttgacgttgatgtaaatgaagggtctctaatggagctacagggacatattggaagattccagcgccagtgcttagactactaagtcgctttggtggctctgacagactgcgtcagtttaaatttca

SEQ ID NO: 187340 - DNA, 912 bp, Homo Sapiens
ttgggtcccgggctgtttcgcgtccggcgtgaggcggctggggccgcgcaggtagtgtccctgcacttcttgcccgggcgcgtgaggccagctccgctgcgcttgtctccagcttccagccctcctcccctaagccgccgccatcatgctgctgcctgtgttcaccctgaaactgcgccacaaaatcagcccccgaatggtggccatagggcgctacgacgggactcacccgtgcctggcggccgccacccaaacgggcaaggtttttattcataatcctcatacacggaaccagcatgtcagtgcatccagggtcttccagagccccctggaatctgatgtttctcttctcaacattaaccaggcagtcagctgtctgactgcaggcgtattgaaccctgagcttggctatgatgcccttttagtggggacacagactaatcttttggcttatgatgtctacaataattcggatttgttctacagagaggtagcagatggggcaaatgcaattgtgctggggacattgggagacatttcttcccctcttgcgattattggtggcaattgtgctctgcaaggtttcaatcatgaaggaagtgatctcttttggacggttactggagacaatgttaattccttggccttgtgtgactttgatggtgatggaaagaaagagcttcttgttggatctgaggattttgatatccgagtttttaaggaagatgagattgtggcagaaatgacagaaacagagatagtcacctctctttgtcccatgtatggcagtcgatttggttatgccctttccaatggcacagttggagtttatgacaaaacatcccgatactggagaattaaatcgaaaaatcatgccatgagcattcatgcttttgaccttaattctgatgg

SEQ ID NO: 187341 - DNA, 1234 bp, Homo Sapiens
cacatttaccttaagaaaatacagacaaaaaagaataaagcatgagccatcacgcctagcctactctctgaatttctaaaagtcagtaggttgaccaaaaagtctagaaactggctttaagtcagtatgggacgtacttacaaagagtccatggttttgcacgtttcggtagacaagtaaatctgagttatttttcaatgacttaccaatatttgaatagtaactaagatcgtcagtgtatctggacttctttttttgaagttctaaaacaattatagtagggatttattattttgggcctccatccagatgtttttccaagatcatttttaaaattcatttgtcttctgtttccagataacatactttccgttctataggaatcttcactgccaatcatagtatctaccagtggctttcttagactattcactccaaagctgggactgatgtcctgccagtagagaatctacagaaataatttgaatgaattaaaaccaaatcttgatagcaggagacagcttcctgatctagatgtacaattagagtttaggttggaaattactttaaaatgtgttttttggggatgtcttcaatctctgtgtaaatacccacatgcttatgcattgtaaaccaagtgtgtattcctgtgtatgaatttgtagaactgatttctgcttcaagagaagctgcacctttaattttataaggtcccctccacctgtaaccctataaatgtctgtaaataaaacactaaaatttgtagtgataggatcaatttgggaatatctgctgagagaccaaaaagttcatttttttaagtaccttggttaaagagtaaagattattcctcttattttttaaagaagaatgcactttaacaaacatagagctgcatgggcaattcaaacaaatctgtgaagtgcagtacccattcagaaatcacacttcctgaaaaccgttcaaaagcagagtccagacgggctgttgatctcactgcctgtaggttgaagctcagattctgatcaattttgagaggagcagggctgcttcaaagagcaatgtgaatacagtcagaagcttcagactggtctgtaaaatggcgggtcccgtatttaccactaactagcaaaactgacagaaaaactcacagagaaaaaatgtaagaatccttcctgctggtgtgcactccttacaatagacttttgcaaatggagttttacagtctatattt

SEQ ID NO: 187342 - DNA, 1305 bp, Homo Sapiens
ttggaccttttttgtcaattgccaaatctcctgctcttcatgaaagggaattggacagcctggctgacttgccggagcggattaaaccaccatatgcaaacagactttcaacatcccatcttaggtcatcttctgtagaagatgttaaactaattataagcgaggggagacctaccatagaagttcgaagatgtagcatgccttctgtcattgggtgaacataccaaacaattccaaacaatatcagaagagagcaatcaaggtagcttattaactgtgccaggagatactagtccttctcccaaacctgaggtattctcaaatgtgcctgaaagagacctttcaaatgtatctaacatacattccagttttgcaacttctccaactggagcttcaaacagcaagtatgtttcagctgatagaaatctcatcaagaatactgccccagtgaacactgtaatggacagtccagtgcatttagagccatctagtcaggttggtgtgatccagaataaatcatgggagatgcctgttgatagactagagacattaagcaccagagactttatctgcccaaattctaacatacctgatcaagaatcctctcttcagagtttttgtaattctgaaaataaggtattgaaagaaaatgctgattttttatccctgcgccagactgaactgccaggaaactcttgtgctcaggatccggcatcctttatgcctccacagcagccttgctctttccccagccaatcactttcagatgctgaatcgatttctaaacatatgtctttgtcatatgttgctaatcaagagccaggtattttacaacaaaaaaatgcagttcagattattagttctgctttagatactgataatgaatctacaaaagatacagaaaatacttttgtcctaggagatgttcaaaaaacagatgcctttgtcccagtgtactctgacagcactattcagaagcatcaccaaactttgagaaagcttatactttacctgtgttaccatcagaaaaggactttaatggaagtgatgcctctacccagctaaatacacattatgcatttagcaaactaacttacaagtcttccagtggccatgaagttgagaatagcacaactgatactcaggtcatttcacatgaaaaagaaaacaaactggagagtttggttttaactcatttgagtagtgtgattctgatttatgtgaaatgaatgcagggatgctcaaaggaacctaaatgaacaagatgtggatgataatttgacaaattaagacctgtctttaatg

SEQ ID NO: 187343 - DNA, 1858 bp, Homo Sapiens
ttggggatgtcttccatgcctggaatcaacaacggtctgtccctgatgctgcgcgcagagcagaatgacttcattcccctgctgtccacagtgactggggcccgggtaatggtgcacgggcaggatgaacctgcctttatggatgatggtggctttaacttgcggcctggcgtggagacctccatcagcatgaggaaggaaaccctggacagacttgggggcgattatggcgactgcaccaagaatggcagtgatgttcctgttgagaacctttacccttcaaagtacacacagcaggtgtgtattcactcctgcttccaggagagcatgatcaaggagtgtggctgtgcctacatcttctatccgcggccccagaacgtggagtactgtgactacagaaagcacagttcctgggggtactgctactataagctccaggttgacttctcctcagaccacctgggctgtttcaccaagtgccggaagccatgcagcgtgaccagctaccagctctctgctggttactcacgatggccctcggtgacatcccaggaatgggtcttccagatgctatcgcgacagaacaattacaccgtcaacaacaagagaaatggagtggccaaagtcaacatcttcttcaaggagctgaactacaaaaccaattctgagtctccctctgtcacgatggtcaccctcctgtccaacctgggcagccagtggagcctgtggttcggctcctcggtgttgtctgtggtggagatggctgagctcgtctttgacctgctggtcatcatgttcctcatgctgctccgaaggttccgaagccgatactggtctccaggccgagggggcaggggtgctcaggaggtagcctccaccctggcatcctcccctccttcccacttctgcccccaccccatgtctctgtccttgtcccagccaggccctgctccctctccagccttgacagcccctccccctgcctatgccaccctgggcccccgcccatctccagggggctctgcaggggccagttcctccgcctgtcctctgggggggccctgagagggaaggagaggtttctcacaccaaggcagatgctcctctggtgggagggtgctggccctggcaagattgaaggatgtgcagggcttcctctcagagccgcccaaactgccgttgatgtgtggaggggaagcaagatgggtaagggctcaggaagttgctccaagaacagtagctgatgaagctgcccagaagtgccttggctccagccctgtaccccttggtactgcctctgaacactctggtttccccacccaactgcggctaagtctctttttcccttggatcagccaagcgaaacttggagctttgacaaggaactttcctaagaaaccgctgataaccaggacaaaacacaaccaagggtacacgcaggcatgcacgggtttcctgcccagcgacggcttaagccagcccccgactggcctggccacactgctctccagtagcacagatgtctgctcctcctcttgaacttgggtgggaaaccccacccaaagccccctttgttacttaagcaattccccttccctgactcccgagggctagggctagagcagacccgggtaagtaaaggcagacccagggctcctctagcctcatacccgtgcccctcacagagccatgccccggcacctctgccctgtgtctttcatacctctacatgtctgcttgagatatttcctcagcctgaaagtttccccaaccatctgccagagaactcctatgcatcccttagaaccctgctcaaacaccatttacttttgtgaacgcttctgccacatcttgtctt

SEQ ID NO: 187344 - DNA, 2038 bp, Homo Sapiens
  misc_feature (73)..(126): n is a, c, g, or t
  misc_feature (229)..(237): n is a, c, g, or t
tcggaccccggccgctgccgccatcactgtcgcccgcccagtcgcccctcagccgcttcccctcgccatggannnnnnnnnnnnnnnnnnnnnnnnnnnnnnnnnnnnnnnnnnnnnnnnnnnnnnctgagggctagtggcggcccgaaacgccgccgcggagccgaggcggagccgctgtcctcgtccccagcggtcccgcccaacgcccgactctgtgacacaactnnnnnnnnncaaaggtatttatggaattccactgagtggtaatggatgatgcagttcaaataactaaggacacatgttcaaagagcataattaactttttaaaagaagctaataagcatggattcctggttcattcttgttctgctcggcagtggtctgatatgtgtcagtgccaacaatgctaccacagttgcaccttctgtaggaattacaagattaattaactcatcaacggcagaaccagttaaagaagaggccaaaacttcaaatccaacttcttcactaacttctctttctgtggcaccaacattcagcccaaatataactctgggacccacctatttaaccactgtcaattcttcagactctgacaatgggaccacaagaacagcaagcaccaattctataggcattacaatttcaccaaatggaacgtggcttccagataaccagttcacggatgccagaacagaaccctgggaggggaattccagcaccgcagcaaccactccagaaactttccctccttcagatgagacaccaattattgcggtgatggtggccctgtcctctctgctagtgatcgtgtttattatcatagttttgtacatgttaaggtttaagaaatacaagcaagctgggagccattccaattctttccgcttatccaacggccgcactgaggatgtggagccccagagtgtgccacttctggccagatccccaagcaccaacaggaaatacccacccctgcccgtggacaagctggaagaggaaattaaccggagaatggcagacgacaataagctcttcagggaggaattcaacgctctccctgcatgtcctatccaggccacctgtgaggctgcttccaaggaggaaaacaaggaaaaaaatcgatatgtaaacatcttgccttatgaccactctagagtccacctgacaccggttgaaggggttccagattctgattacatcaatgcttcattcatcaacggttaccaagaaaagaacaaattcattgctgcacaaggaccaaaagaagaaacggtgaatgatttctggcggatgatctgggaacaaaacacagccaccatcgtcatggttaccaacctgaaggagagaaaggagtgcaagtgcgcccagtactggccagaccaaggctgctggacctatgggaatattcgggtgtctgtagaggatgtgactgtcctggtggactacacagtacggaagttctgcatccagcaggtgggcgacatgaccaacagaaagccacagcgcctcatcactcagttccactttaccagctggccagactttggggtgccttttaccccgatcggcatgctcaagttcctcaagaaggtgaaggcctgtaaccctcagtatgcaggggccatcgtggtccactgcagtgcaggtgtagggcgtacaggtacctttgtcgtcattgatgccatgctggacatgatgcatacagaacggaaggtggacgtgtatggctttgtgagccggatccgggcacagcgctgccagatggtgcaaaccgatatgcagtatgtcttcatataccaagcccttctggagcattatctctatggagatacagaactggaagtgacctctctagaaacccacctgcataaaatttacaacaaaatcccagggaccagcaacaatggattagaggaggagtttaagaagttaacatcaatcaaaaatccagaatgacaagatgcggactggaaacctttccagccaacatgaagaagaaccgtgtttttacagatcattcccatatgaattc

SEQ ID NO: 187345 - DNA, 1477 bp, Homo Sapiens
  misc_feature (126)..(141): n is a, c, g, or t
  misc_feature (247)..(255): n is a, c, g, or t
  misc_feature (679)..(695): n is a, c, g, or t
  misc_feature (786)..(817): n is a, c, g, or t
  misc_feature (883)..(939): n is a, c, g, or t
  misc_feature (1021)..(1047): n is a, c, g, or t
  misc_feature (1212)..(1221): n is a, c, g, or t
ttggatatttttagataaaattaaatgctcttatttttccaacagctaaactactcttagttgaacagtgtgccctagcttttcttgcaaccagagtatttttgtacagatttgctttctcttacnnnnnnnnnnnnnnnntcctgttgtattaacatttaaaaacagaattgtgttatgtgatcagttttgggggttaactttgcttaattcctcaggctttgcgatttaaggaggagctgccttnnnnnnnnntaaaggccttattttgcaattatgggagtaaacaatagtctagagaagcatttggtaagctttatcatatatatattttttaaagaagagaaaaacaccttgagccttaaaacggtgctgctgggaaacatttgcactcttttagtgcatttcctcctgcctttgcttgttcactgcagtcttaagaaagaggtaaaaggcaagcaaaggagatgaaatctgttctgggaatgtttcagcagccaataagtgcccgagcacactgcccccggttgcctgcctgggccccatgtggaaggcagatgcctgctcgctctgtcacctgtgcctctcagaacaccagcagttaaccttcaagacattccacttgctaaaattatttattttgtaaggagaggttttaattaaaacaaaaaaaaattcnnnnnnnnnnnnnnnnnccaattttaccttctttaaaataggttgttggagctttcctcaaagggtatggtcatctgttgttaaattatgttcttaactgtaaccagnnnnnnnnnnnnnnnnnnnnnnnnnnnnnnnnattattaaaagcaagtttctttgtattcctcaccctagatttgtataaatgcctttttgtccatcnnnnnnnnnnnnnnnnnnnnnnnnnnnnnnnnnnnnnnnnnnnnnnnnnnnnnnnnnataaatgagagattgcaaatgtagtgtatcactgagtcatttgcagtgttttctgccacagacctttgggctgccttatatnnnnnnnnnnnnnnnnnnnnnnnnnnntttgacacaaaaacaatgcaagcatgtgtcatccatatttctctacatcttctcttggagtgagggaggctacctggaggggatcagcccactgacagaccttaatcttaattactgctgtggctagagagtttgaggattgctttttaaaaaagacagcaaacnnnnnnnnnnatttaaaaaaagatatattaacagttttagaagtcagtagaataaaatcttaaagcactcataatatggcatccttcaatttctgtataaaagcagatctttttaaaaagatacttctgtaacttaagaaacctggcatttaaatcatattttgtctttaggtaaaagctttggtttgtgttcgtgttttgtttgtttcacttgtttccctcccagccccaaaccttttgttctctccgtgaaacttacctttccc

SEQ ID NO: 187346 - DNA, 2393 bp, Homo Sapiens
  misc_feature (524)..(561): n is a, c, g, or t
  misc_feature (1050)..(1065): n is a, c, g, or t
  misc_feature (1171)..(1179): n is a, c, g, or t
  misc_feature (1603)..(1618): n is a, c, g, or t
  misc_feature (1709)..(1740): n is a, c, g, or t
  misc_feature (1809)..(1861): n is a, c, g, or t
  misc_feature (1944)..(1970): n is a, c, g, or t
  misc_feature (2135)..(2144): n is a, c, g, or t
ttggcacagcagccggcggcacccccgcagcagccacaggcgcacacgctgaccacgctgagcagcgagccgggccagtcccagcgaacgcacatcaagacggagcagctgagccccagccactacagcgagcagcagcagcactcgccccaacagatcgcctacagccccttcaacctcccacactacagcccctcctacccgcccatcacccgctcacagtacgactacaccgaccaccagaactccagctcctactacagccacgcggcaggccagggcaccggcctctactccaccttcacctacatgaaccccgctcagcgccccatgtacacccccatcgccgacacctctggggtcccttccatcccgcagacccacagcccccagcactgggaacaacccgtctacacacagctcactcgaccttgaggaggcctcccacgaagggcgacgatggccgagatgatcctaaaaataaccgaagaaagagaggaccaaccagaattccctttggacannnnnnnnnnnnnnnnnnnnnnnnnnnnnnnnnnnnnncttcttcttcttcttccttaaagacatttaagctaaaggcaactcgtacccaaatttccaagacacaaacatgacctatccaagcgcattacccacttgtggccaatcagtggccaggccaaccttggctaaatggagcagcgaaatcaacgagaaactggactttttaaaccctcttcagagcaagcgtggaggatgatggagaatcgtgtgatcagtgtgctaaatctctctgcctgtttggactttgtaattatttttttagcagtaattaaagaaaaaagtcctctgtgaggaatattctctattttaaatatttttagtatgtactgtgtatgattcattaccattttgaggggatttatacatatttttagataaaattaaatgctcttatttttccaacagctaaactactcttagttgaacagtgtgccctagcttttcttgcaaccagagtatttttgtacagatttgctttctcttacnnnnnnnnnnnnnnnntcctgttgtattaacatttaaaaacagaattgtgttatgtgatcagttttgggggttaactttgcttaattcctcaggctttgcgatttaaggaggagctgccttnnnnnnnnntaaaggccttattttgcaattatgggagtaaacaatagtctagagaagcatttggtaagctttatcgtatatatattttttaaagaagagaaaaacaccttgagccttaaaacggtgctgctgggaaacatttgcactcttttagtgcatttcctcctgcctttgcttgttcactgcagtcttaagaaagaggtaaaaggcaagcaaaggagatgaaatctgttctgggaatgtttcagcagccaataagtgcccgagcacactgcccccggttgcctgcctgggccccatgtggaaggcagatgcctgctcgctctgtcacctgtgcctctcagaacaccagcagttaaccttcaagacattccacttgctaaaattatttattttgtaaggagaggttttaattaaaacaaaaaaaaattcnnnnnnnnnnnnnnnnccaattttaccttctttaaaataggttgttggagctttcctcaaagggtatggtcatctgttgttaaattatgttcttaactgtaaccagnnnnnnnnnnnnnnnnnnnnnnnnnnnnnnnnattattaaaagcaagtttctttgtattcctcaccctaaatttgtataaatgcctttttgtccatccctnnnnnnnnnnnnnnnnnnnnnnnnnnnnnnnnnnnnnnnnnnnnnnnnnnnnntataaatgaaaaattgcaaatgtagtgtatcactgagtcatttgcagtgttttctgccacaaacctttgggctgccttatatnnnnnnnnnnnnnnnnnnnnnnnnnnntttgacacaaaaacaatgcaagcatgtgtcatccatatttctctacatcttctcttggagtgagggaggctacctggaggggatcagcccactgacagaccttaatcttaattactgctgtggctagagagtttgaggattgctttttaaaaaagacagcaaacnnnnnnnnnnatttaaaaaaagatatattaacagttttagaagtcagtagaataaaatcttaaagcactcataatatggcatccttcaatttctgtataaaagcagatctttttaaaaagatacttctgtaacttaagaaacctggcatttaattcatattttgtctttaggtaaaagctttggtttgtgttcgtgttttgtttgtttcacttgtttcctccaagcccaaacctttttgtttctctccgtgaaactaac

SEQ ID NO: 187347 - DNA, 1247 bp, Homo Sapiens
  misc_feature (164)..(179): n is a, c, g, or t
  misc_feature (285)..(293): n is a, c, g, or t
  misc_feature (698)..(711): n is a, c, g, or t
  misc_feature (715)..(730): n is a, c, g, or t
  misc_feature (821)..(852): n is a, c, g, or t
  misc_feature (918)..(974): n is a, c, g, or t
  misc_feature (1056)..(1082): n is a, c, g, or t
ttggctgtgtatgattcattaccattttgaggggatttatacatatttttagataaaattaaatgctcttatttttccaacagctaaactactcttagttgaacagtgtgccctagcttttcttgcaaccagagtatttttgtacagatttgctttctcttacnnnnnnnnnnnnnnnntcctgttgtattaacatttaaaaacagaattgtgttatgtgatcagttttgggggttaactttgcttaattcctcaggctttgcgatttaaggaggagctgccttnnnnnnnnntaaaggccttattttgcaattatgggagtaaacaatagtctagagaagcatttggtaagctttatcgtatatattttttaaagaagagaaaaacaccttgagccttaaaacggtgctgctgggaaacatttgcactcttttagtgcatttcctcctgcctttgcttgttcactgcagtcttaagaaagaggtaaaaggcaagcaaaggagatgaaatctgttctgggaatgtttcagcagccaataagtgcccgagcacactgcccccggttgcctgcctgggccccatgtggaaggcagatgcctgctcgctctgtcacctgtgcctctcagaacaccagcagttaaccttcaagacattccacttgctaaaattatttattttgtaaggagaggttttaattnnnnnnnnnnnnnnttcnnnnnnnnnnnnnnnnccaattttaccttctttaaaataggttgttggagctttcctcaaagggtatggtcatctgttgttaaattatgttcttaactgtaaccagnnnnnnnnnnnnnnnnnnnnnnnnnnnnnnnnattattaaaagcaagtttctttgtattcctcaccctaaatttgtataaatgcctttttgtccatcnnnnnnnnnnnnnnnnnnnnnnnnnnnnnnnnnnnnnnnnnnnnnnnnnnnnnnnnnataaatgaaagattgcaaatgtagtgtatcactgagtcatttgcagtgttttctgccacagacctttgggctgccttatatnnnnnnnnnnnnnnnnnnnnnnnnnnntttgacacaaaaacaatgcaagcatgtgtcatccatatttctctacatcttctcttggagtgagggaggctacctggaggggatcagcccactgacagaccttaaatcttaattactgctgtggctagagagtttgaggattgctttttaaaaaagacagcaaac

SEQ ID NO: 187348 - DNA, 1505 bp, Homo Sapiens
ttggcaacgagtccgggaaggtccccggggaggagttcgatgcaacagctctcggggcggtcggcctggccttagctctttgccacctcgtggccctcaccatctggacaacagcagccctggcccaggttctgaggcccgtggtatcaatggaggcccttcccgcatgtccccaaaggcacagcggcctctgagaggtgccaagactctgtcttcgcccagtaataggccttctggagaaacttctgttccacctcctcctgcagtgggccggatgtatcccccgcgttctcccaagtctgctgcccctgccccaatctcagcttcctgtccagagcctcccatcggctcggcagtgccaacctcttcagcctccatccctgtgacctcatcagtctcagatcctggagtgggctccatttctccagcttctccaaagatctccctggcccccacagatgtaaaagaactctctaccaaggaacctgggagaactctggagccccaggagctggctcggatagctgggaaagtccctggtcttcagaatgaacagaaacgattccaactggaagaactgagaaagtttggggcccagtttaagcttcagcccagtagctcccctgagaacagcctggatccttttcctccccggatcttaaaggaggagcccaaaggaaaggagaaagaggttgatggtctgttgacttcagagcccatggggtctcccgtctcctccaagacagagtccgtatcggataaggaggacaaaccacccctggcaccatcaggaggcactgaggggccagagcagcccccaccaccttgtccaagccaaactggcagccccccggtgggcctcatcaagggagaagacaaagatgagggccctgttgctgaacaagtaaagaaatcaacgttgaaccctaatgctaaggagttcaatcctacaaagcctctgctgtctgtgaataaatccaccagtaccccaacttctccggggccccggactcattcaactccctccatcccggtgctgacagcaggccagagtgggctatacagcccccagtacatctcctacatacctcagatccacatgggaccagctgtgcaggcacctcagatgtatccatatcctgtatccaattcagtgcctgggcagcagggcaagtaccggggagcaaaaggctcccttcctccgcagcgctcggaccaacaccagccagcctcagccccgccgatgatgcaggccgccgcggctgctggcccgcctctggtggctgccacgccctattcttcctacatcccctacaaccctcagcagttcccaggccagccagccatgatgcagcccatggcccactacccctcacagccggtgtttgcccccatgcttcagagcaacccacgcatgctgacgtcgggcagccatccccaggccatcgtgtcatcctctacccctcagtacccttctgcaaagcaacctaccccccaagcccttt

SEQ ID NO: 187349 - DNA, 1911 bp, Homo Sapiens
  misc_feature (464)..(472): n is a, c, g, or t
ttggttgaaagtggcaaggctgggggagggtgtcgggtagagggaagagggcagggggctaggggaggactcagaggccatctgcagggccaagccacaggaagggctgagctggaggtgggcagggctgctccaggcaggtcagagcagtgcagggggaggagaggagaaagggaggaagctgggctgtgtggtccccatgaaggcattcagagtccacctgcagacagcgagagccccaggaaggtttgcacagctgtgccccaagcaccttggcctcctctcagctcgccgaggaggcacgctagagccgccttcccggtgggagccctctgtcccacagggagcggggagccagctttgctggggccctacctgcatgcccagccttacccctcattctcacagcacagatgaggttgagaccatgcagtcaatgcattgcttaaggtctcttatttacnnnnnnnnnccttaaacatagtcgctgtcattcagacattcagagaatggttggccacaaacaatgaccaagtattgcttggcttaacttgaaggcctgctgtctccttctgggggtcagggacgcagctccaccctcaccactagcccaccctgcccgtgggcataaccttgacgaagagagagaatgattggcatctgcttttctcttttctttgctaataattctgttcctggctgccgagagtgaagtttcaccatgtggaggtttggctcctatcacctggtggtctgattcataccctagcctgaggctccactggaagatctcgcagcctcagtgtatgggaaaccctttccccaggcttgtcccagcactgccgctccccacccctgagccaggaccccagaggatggccatgccccgtgcctggcagaggtctggtgccagcactgggagctgctccgcccttgccttggggccgagggagccctcgtccacccctgcacagcagctgggcacagaggagcgctcttccatcttgaccaggactgcaccaagaagcaccaggtgtcttcagcctccaacctccggggcgaccttctcttccagccacagtcccatgagggcccctagccagggacactggtctgtaaattgtaatcctttctccagcccagctctccacttgttccttgtgtgagctgagcaggcagtgcacctctgagtgtcccttttgtaaggcccaggggttgcactgagtctgcagaggccgcgacctcctagaacgctgtgggtgcaggtgagccggcgtgtcctggggagatgctgccagcacacaggggccctcctgctgccagcaggttggggtggttaagtcttattagtgtctattcttaaaattaagtgggctggagaagaatggagctccacatgccagcaccgtatatggaatacaaaagctggggaagcagggcctgccttacaggtgtggctgactctgagcccaggcctgcaggggtggagggcagtccctcagaatcccagaggcagtcccagcctcagaacccaggataggaaatgggtgtgtttagtggggaaagggacggggtgcagacggcagggccagtatggggccccctccctctcctctcctctcctatggtgagcccagcgtgggcaccgggccgtctcagccatgttcccagggctgggaggacagctctggcccttcttaggcctagcctcgtcccaagctaaatgtaagccagttgggctgtgttaaaggaagcagtgtttttggttcgattctgcctctgtagctcaaggggggcagcccccagagtcctgtgcattctgccaaggctccatagctttgccaaatgcacggagctctgccattccggtgcagtgcaggccttgcgaagggtttatctgcgttcgtctcg

SEQ ID NO: 187350 - DNA, 2941 bp, Homo Sapiens
  misc_feature (615)..(671): n is a, c, g, or t
  misc_feature (1122)..(1373): n is a, c, g, or t
  misc_feature (1714)..(2030): n is a, c, g, or t
  misc_feature (2081)..(2143): n is a, c, g, or t
ttgggttctccagaagccattcatctgccatcgcaagaccaaaggaggggatttgatgttggtccactatgaaggctatttagaaaaggacggctccttatttcactccactcacaaacataacaatggtcagcccatttggtttaccctgggcatcctggaggctctcaaaggttgggaccagggcttgaaaggaatgtgtgtaggagagaagagaaagctcatcattcctcctgctctgggctatggaaaagaaggaaaaggtaaaattcccccagaaagtacactgatatttaatattgatctcctggagattcgaaatggaccaagatcccatgaatcattccaagaaatggatcttaatgatgactggaaactctctaaagatgaggttaaagcatatttaaagaaggagtttgaaaaacatggtgcggtggtgaatgaaagtcatcatgatgctttggtggaggatatttttgataaagaagatgaagacaaagatgggtttatatctgccagagaatttacatataaacacgatgagttatagagatacatctacccttttaatatagcactcatctttcaagagagggcagtcatctttaaagaacnnnnnnnnnnnnnnnnnnnnnnnnnnnnnnnnnnnnnnnnnnnnnnnnnnnnnnnnnctgactcctatttaaagaaccccttaggtttctaagtacccatttctttctgataagttattgggaagaaaaagctaattggtctttgaatagaagacttctggacaatttttcactttcacagatatgaagctttgttttactttctcacttataaatttaaaatgttgcaactgggaatataccacgacatgagaccaggttatagcacaaattagcaccctatatttctgcttccctctattttctccaagttagaggtcaacatttgaaaagccttttgcaatagcccaaggcttgctattttcatgttataatgaaatagtttatgtgtaactggctctgagtctctgcttgaggaccagaggaaaatggttgttggacctgacttgttaatggctactgctttactaaggagatgtgcaatgctgaagttagaaacaaggttaannnnnnnnnnnnnnnnnnnnnnnnnnnnnnnnnnnnnnnnnnnnnnnnnnnnnnnnnnnnnnnnnnnnnnnnnnnnnnnnnnnnnnnnnnnnnnnnnnnnnnnnnnnnnnnnnnnnnnnnnnnnnnnnnnnnnnnnnnnnnnnnnnnnnnnnnnnnnnnnnnnnnnnnnnnnnnnnnnnnnnnnnnnnnnnnnnnnnnnnnnnnnnnnnnnnnnnnnnnnnnnnnnnnnnnnnnnnnnnnnnnnnnnnnnnnactctgtctcgaaaaaaagaaaagaaacacggttaataacatataaatatgtatgcattgagacatgctacctaggacttaagctgatgaagcttggctcctagtgattggtggcctattatgataaataggacaaatcatttatgtgtgagtttctttgtaataaaatgtatcaatatgttatagatgaggtagaaagttatatttatattcaatatttacttcttaaggctagcggaatatccttcctggttctttaatgggtagtctatagtatattatactacaataacattgtatcataagataaagtagtaaaccagtctacattttcccatttnnnnnnnnnnnnnnnnnnnnnnnnnnnnnnnnnnnnnnnnnnnnnnnnnnnnnnnnnnnnnnnnnnnnnnnnnnnnnnnnnnnnnnnnnnnnnnnnnnnnnnnnnnnnnnnnnnnnnnnnnnnnnnnnnnnnnnnnnnnnnnnnnnnnnnnnnnnnnnnnnnnnnnnnnnnnnnnnnnnnnnnnnnnnnnnnnnnnnnnnnnnnnnnnnnnnnnnnnnnnnnnnnnnnnnnnnnnnnnnnnnnnnnnnnnnnnnnnnnnnnnnnnnnnnnnnnnnnnnnnnnnnnnnnnnnnnnnnnnnnnnnnnnnnnnnnnnnnngaagcagacctacagcagctactattgaataaatacctatcctggattttnnnnnnnnnnnnnnnnnnnnnnnnnnnnnnnnnnnnnnnnnnnnnnnnnnnnnnnnnnnnnnnaagttatcaaatcttcattttctaagagtagccctttatagtgtacaaaatgatattaagtgcattattatcttcgcttttcatggctctgagtcataaaacaagctggtggatctcactgtacctaatttatagacgaggaaattgtcattcaaaaagattgactgttatgcccagggtcagcactaacctgcagaaccagtattcagtccccaagttcagtgtcttctactgccctctactaatgaaaagtgaaaatttccctggggtctaattctctcttcagtttgctgtgccgttgtttatctttgagtcttcattctctgaagatggctttctgcctgtttctggtacattagaattctcactatgatatagaaatggcttcagtttcatagcataatcttgcagttagctctgaattgcctcaaaaaccctgaacaacgcgaggttccagatgtgttttacttctttcattcatatttacccccatttgttgtttaaaaagaattatgaacaattattacatcatatgtagaccactttcactgattatatgttgacattttcctcagtaaaacataaagttcttaacaagactatactgtaacacctttctccaacaaaatcagctgtatgttgaaaactattaagtcattgctaatgttttaagccataatacagacagccttatactctatgatgggagaagggaaagtagtttgtccgatggtgctactctgtataaacattactgatgctatctatagtagggcaagaaagtaaaagagttttgat

SEQ ID NO: 187351 - DNA, 1546 bp, Homo Sapiens
  misc_feature (333)..(381): n is a, c, g, or t
ggttagaagaacccgaagaacctaaagtgctaacaccagaagaacaattagcagataaactgcggctaaagaaattacaggaagagtcagacctcgaattagcaaaggaaacttttggtgttaataatgcagtttatggaatagatgctatgaacccatcttcaagagatgactttacagagtttggaaagttactaaaagataaaattacacaatatgaaaagtcactatattatgccagttttttggaagtcttagttcgagatgtgtgtatttcattggaaattgatgacttgaaaaaaattaccaattcactgactgtgctttgcagtnnnnnnnnnnnnnnnnnnnnnnnnnnnnnnnnnnnnnnnnnnnnnnnnngtgtggttcctggagggggattaaaagccaccatgaaagatgatctggcagattatggtggttatgatggaggatatgtacaagactatgaagacttcatgtgacattttatcttttcttggtgtcatctttatgttgcccacaatcccttgaacatgtagcacaacttcctttcctttcagttctgccaaatgctacaatcagaagtgcagtatcttttgtgctggttatttaaccccttgacacttaggtgctaatgtgcaaatgagggaacttggatcttgctgccaaggggttaaaattgggaacctaagttgctactaaatcatagttcaaaacctaataatgttgtcgttgttgctatctgatttcatagcagcagtcactaaattggaaacaaaaggttgcaacgtgacaaaaaaaattgtgtagtatttaccagcaccattcagtaatacagccttaaccatacctccttgaactacttcataacttgtcaagaaaagcagtttgcagcaagggcatgtggtgtgcacctagtattaaaattgctttgtcttaaaattgaacatgaggatattaaaaatacattgtgaagaagactgcttatctcagagtgaagatactgcggctgaaaagcactagtttgatataaaattaaaatgaccaaaaccctccaactttgaagctaaagaaggtaaacctttccattattgcattacatgttgtggaatctctcgagtgcaaagactgtctagttatttatcaggctatttctactgatgaactgcttcaggtgggggagggaaacttatttttatttgcctgatttaagtgtctgagaaacaaatctttgttctcttaggctgcaatggaacaactttaccagggttttggcatttcctttcctttcctttataaaacatgctcagcaaactgcaccagttaactacagtttggtaaattgttatgttaacaattatgacatctgcaatgttttataaagcaactaatttaataaaatcactgttgtgaggacttaaattttgtgttacctcccaagagatactttttgagagtatagaacacagctcttgggagtacagtttctctacgttctctactaaatcttaataaatgcttgacatagttacagctttaaaac

SEQ ID NO: 187352 - DNA, 786 bp, Homo Sapiens
  misc_feature (132)..(154): n is a, c, g, or t
  misc_feature (317)..(412): n is a, c, g, or t
ttggcgcacagtcagccacggtcccatcctgctccgcgccggtcaacgagagcaaacccagtgactcacctccgccgtgctaactcctcgctagctctccctctcacacacgctcacacccggctcgagatnnnnnnnnnnnnnnnnnnnnnnngggactcggactcctgggacgccgacgctttctccgtggaagacccagtgcggaaggtggggggcggcggcactgccggcggggaccgctgggaaggcgaggacgaggacgaggacgtcaaggataactgggatgacgatgatgatgaaaaaaaagaggaagnnnnnnnnnnnnnnnnnnnnnnnnnnnnnnnnnnnnnnnnnnnnnnnnnnnnnnnnnnnnnnnnnnnnnnnnnnnnnnnnnnnnnnnnnnnnnnnnttaaaaagaggttagaagaacccgaagaacctaaagtgctaacaccagaagaacaattagcagataaactgcggctaaagaaattacaggaagagtcagacctcgaattagcaaaggaaacttttggtgttaataatgcagtttatggaatagatgctatgaacccatcttcaagagatgactttacagagtttggaaagttactaaaagataaaattacacaatatgaaaagtcactatattatgccagttttttggaagtcttagttcgagatgtgtgtatttcattggaaattgatgacttgaaaaaaattaccaattcactgactgtgctttgcagtgaaaaacagaagcaagaaaagcaaagcaaagcc

SEQ ID NO: 187353 - DNA, 921 bp, Homo Sapiens
ttagatccaatttagtttcgacttcagtaggagtgaaataagaaccaaaacagaaataaaacttcaggaaccctgtaaatgcctctatgaagagtgtaaggtgtatttcaaagcatagttccagtatcaaaaattgtcttgcattttctcatcagcaggtcagtttgagaaagcacgaacaaagttatagtagttaattttgccttctccatgagagcacatcctgagtaactccttaaccaaggagtcatccactgggacgttaagcgattcacagattttaaagaacatgtctctgtccacatatcctgaagcttccttgtcataaatttgaaatgcctcacgaatgttgtctttgcatgagtgatctttcagttgcttctgaattgtgtctattaatgcttccaattcctgcacgcctggatccttttcagtttgcttgctttctgcttctggagcaggcgcttctcgctttcggacatggttctgaattgacgcgagtgcttctggtgaatactgggcagcgttgctctccatgtatttcaaaacatactcgtctgtatcaaggatgatgaaccggtgaccaaacacttcaatcacagcaccaatgaagaagtcactggggccatagtagacagggttgtccactgtagagtatggtttaacaactttagtcctgccaaggtacttgcccccaatgataccagaattgcgaacaggaggctcaaagatactgatcatgtcggtagctagaaagtaagagaagacaaatctgcggtctttgtcttctgggatgggggattccagtacagccaaataacgaagcaccttgttatcattcaccagcattttaataacgtctttttttggagcttttggaatgagagcaaaacaattctgagccaacttttttgtacaaag

SEQ ID NO: 187354 - DNA, 2376 bp, Homo Sapiens
  misc_feature (2324)..(2333): n is a, c, g, or t
ttggcactatgtgagtgacagtggggatggagtctacgctgggaggcctctgtcagttatacagatggttgccttcttggagcaaagagccagtgctctgctagctagctgttcaaaaaactgcacaaactcacctgcaattgtgaggttttctggccaatccagaggtgtgcctgcagtgtctgagtcctattctgccccaggagcttgtgaagaacccacagaaaggggaaatcttgaggttggtgaaccacagagcgaaccagtccgtgtccttgacatggtagccaagttggagtctgagtgcctgaagcggcagggccagcgtgagcctgggagcctctcaaggaataacagcttccgtcgaaatgtgggcagagtattgcttgcaaatagcactcaggctgatgaaggcaaaacaaagaaaggcgtcttggaggcacctgacactcaggtgaatcctgtggggtctgtatctgtggattgtggcccttcaagagctgatcgttgttctcctaaggaggaccaggcctgggacggtgcttctcaggactgccccccattgccagcaggagtgagtttccacatagacagtgcagagttagagccgggttcgcaaactgccgtgaaaaacagcaacagatatgatgtggaaatgacagatgaactcgttgggttacctttttcctctcatacctattcccaagcctctgaattgcccacagatgctgttgattgtatgagcagagagcttgtgtcccttactagccgaaatcctgatcaaagaaaagaatctttgtgcattagtatcactgtgtccaaggtagacaaagaccagccttccattttaaactcctgtgaagacccagttccagggatgttgttttttttgccacctggtcagcacttgtcagactattcccagttgaatgaaagcacaacaaaagagtcttcagaggccagccagcttgaagatgctgctgggggtgacagtgcatctgaggaaaaaagtgggtctgctgagccatttgtactgccagcctcttctgtggaaagtacattaccagtgcttgaggcatccagttggaagaagcaggtgtcgcatgacttcctggagaccaggtttaaaatccagcagcttttggagcctcagcagtacatggcttttctgccccaccacattatggtaaaaatcttcaggttacttcccaccaagagtttagtggcccttaaatgtacctgctgctatttcaagtttatcattgagtactacaatatcaggccagcagattctcgctgggttcgagatccacgctatagagaggatccttgcaaacagtgcaagaaaaagtatgtgaaaggggatgtgtccctgtgccgatggcaccccaagccctattgccaggcattgccctatgggccagggtattggatgtgctgccaccggtctcagaaaggattccctggctgtaagctggggcttcatgacaatcactgggttcctgcctgccacagctttaatcgggcaatccataagaaagcaaaagggactgaagctgaagaggaatactaaagtccatgtgagaggcaacaaaaggaccggtttctaaagctgcaaaacacctagatacaccgttcaaatgagcgtagccccctgagtcatcactctagaagaatctgtacatcatcaggactgcattgctcaggcattttctaaactctaaatttacgagctgtacaaaaaaattggtcttgttgtttatagtggcatctcatgtttgaacccgggtggtatcccacagttggattcagttggctgtgaataactgcctgttttcctaaatcaaacccatcctcaaaggatgaagactcaccaccatccaggacattcagaagagttcactgcagatgctgcaggtagtcctcaaaaatgggttccagaaatgttttgagcactggcaacatatttgaaataagtgaatattgtcctgtgaaaagaatagcaggacttttagatgaaaagtattcttaaaaagaaaagtcaggcaccccaccttagacctcgtatgcttgatcctgtgagattgatgtttgtggctggaggtggatttcatgccctatggtgtttacagtgtatataatggttgtgttttcatggggctatgaaagtgcacgttaaacctgagcgcctttacctttagatgagtgctttggcccctctgtgaatagcacgattaaaatccagttgtatataatggacagctaacggaacaatataatcaccacaatgcagctaggatagtgttgcggctataattttgtgnnnnnnnnnnaattgtctagtctaaaatttgtacatcttgtataaaatatgaa

SEQ ID NO: 187355 - DNA, 1260 bp, Homo Sapiens
ttggctgaatggcatgtggagaaaagcagcggaaagttacaggctgctatggcatctgtcattgtgcgtccatcttctagtacaaaaactgatagtatgccagcaatgcagttagcttctaaagatcgagttagtgaaagatcttcagctggggcacataaaacagattgcctcaaactagcagaagccggagaaactggaagaatcattttgccaaatgtgaattcagacagtgttcacacaaaatctgaaaaaaactttcaggctgtctcacagggcagtgttcccagttcagtcatgtctgctgtaaatacgatgtgtaataccaaaacggatgtaatcacatctgctgccgatactaccagtgtttccagctggggtggttcagaagtaatttcctctttatcaaataccattttggcctctacatcatcagaatgtgtatcttcaaaaagtgtcagtcagccagtggctcaaaaacaagaatgcaaggtcagcaccacagcaccagttacattagccagtagtaagacaggaagtgttgttcaacccagttctgggttctcaggcacaactgattttatccatttaaaaaagcacaaggcagcattggctgcagctcagtataaaagtagtaatgccagtgagactgaacctaatgctataaaaaatcagacactttcagcctcccttcctctggatagcactgtaatctgtagtacaattaacaaagcaaactctgtaggaaatgggcaagcttcccagacaagtcaaccaaactaccatactaaactgaaaaaggcctggctcaccagacactcagaagaagataaaaatactaataaaatggaaaattcgggaattctgtatcagaaattattaagccatgttctgtcaacttaatagcctctacatctagtgatatacaaaatagtgtagatagtaagatcatagttgataaatatgtaaaagatgataaagtcaacaggagaaaagccaaaagaacttatgaatctggctctgaaagtggagactcagatgaaagtgaaagcaagtcagagcaaaggactaaaagacaacctaagccaacttacaaaaagaagcaaaatgatttgcaaaagagaaaaggtgaaatagaagaagatttgaaacccaatggtagttctcagcacgagtgccaaagaaagaagtaaactgaagttgcaaagcaacagtaatactggcattcctcgttcagtattgaaagattggcgtaaagtc

SEQ ID NO: 187356 - DNA, 1717 bp, Homo Sapiens
ttggagcaatccttccgcctcgacatcccaaagtgctgaggtaacaggcgtaagccactgcgcccggcctcctatttttcatcaaataaaatacaaccgttcagagcagcatgctcagcaaccacgaggaccagtcccagcgcatccaaggtgccgggagggaaaggaacagaactcccccaggtaagccggtttccccacgccaaggcgcagtcgctcaccacccaaatcgtcgctggggagagacccacccggcgactgcgcgcttcgcactcgagtctgcgttaggaagcctctgaccctttcccgggcccctgcgcgtggaagcctcggacacaactcggagaaccagcgaaccccggcagcacagaattcgaaccgccgcgggagccgttgggacgcgcctacccggtcactgccccgccccggcgcagactgcgtgaggcgccgccgaaggcgcggggcttgccggggatcgtggtcggcgagcgcgcccgagcccactagcggagcccgcccgggactacatttcccacaattaccgccatgatgcccattggtgggggaagccatgggaaccggaggccgtcagggggagaggcgggcggcgctcacgcctggcctgagggggccgagactgaggcggttgcggaatagactgctagccccgcccagagtccctaccctttggagaactgcgcttctctttcggagggagtgttcgccgccgccgcggccgccacctggagtttcttcagactccagatttccctgtcaaccacgaggagtccagagaggaaacgcggagcggagacaacagtacctgacgcctctttcagcccgggatcgccccagcagggatgggcgacaagatctggctgcccttccccgtgctccttctggccgctctgcctccggtgctgctgcctggggcggccggcttcacaccttccctcgatagcgacttcacctttacccttcccgccggccagaaggagtgcttctaccagcccatgcccctgaaggcctcgctggagatcgagtaccaagttttagatggagcaggattagatattgatttccatcttgcctctccagaaggcaaaaccttagtttttgaacaaagaaaatcagatggagttcacactgtagagactgaagttggtgattacatgttctgctttgacaatacattcagcaccatttctgagaaggtgattttctttgaattaatcctggataatatgggagaacaggcacaagaacaagaagattggaagaaatatattactggcacagatatattggatatgaaactggaagacatcctggaatccatcaacagcatcaagtccagactaagcaaaagtgggcacatacaaattctgcttagagcatttgaagctcgtgatcgaaacatacaagaaagcaactttgatagagtcaatttctggtctatggttaatttagtggtcatggtggtggtgtcagccattcaagtttatatgctgaagagtctgtttgaagataagaggaaaagtagaacttaaaactccaaactagagtacgtaacattgaaaaatgaggcataaaaatgcaataaactgttacagtcaagaccattaatggtcttctccaaaatattttgagatataaaagtaggaaacaggtataattttaatgtgaaaattaagtcttcacttttctgtgcaagtaa

SEQ ID NO: 187357 - DNA, 1535 bp, Homo Sapiens
cagtccatgctgctggcacaagtcacttggccagctcctcagccaccgctttgcgcatcttgtccttgaggtaggcgcctttctgccattcagacttgagttccagccactcatagaatgggacgtccactatcaggaagcctgcagccactatgtgtcgccgggcccagaacaaagcgacccagcaagtccttgcttcggctgttgaagttggggaactcccaccgcaagaacgctagcctcttagaccctggaggtggtgactggctcccagttggctgggcaaggtgaggtgccacaaagtcccttacgggcagaaactcgccgtcactgtccagcagcacctcagcatccagcacccagccatactgcgtggccacctcgaggctgcccttgtcggcgctccccagcagccccttcagcgtctcctgcagctccttttgcaggggggtcaccttcctgtcaagggctgagggcccaggggccacagccgaggcaggcagaaggggacccgagtactcggggtactccagcagggcagtggcgttgatgtggagcagcttctggaaggtgttctgatccttctgagacttgccccctagaaattggatgtgaaattcagggtggaggacggcttgcagctctgcttcccgtgcctgctgcagcacacacagggcccacaccaggtccacctgcagggctggctccaggcctggcagctctgaccccagcttctcatgtaccaggctgaagaactgatcctcttggtctggatggaagttcagacgcgcaaaagccagaagtacgctgcacaggtggggcagggtgatgtcctgcgctctgttcaggacgtggtgggcaaaggcctcaaacaggggcagggtgagccacttgagtaaggcgaaggacttggcacagtgggccacctcaccagaagtcaggctgggcatgagggatagcaggtcggtggccaggcgctgggacacctgggtctggtgaaagctgagtttgccataggcataggccacgtccaagagcacatctttcgtcagagagaagggcttctgcaccaggtggtaggagatggcccgcagcaagggcacggaccgccggctctgagctgccagcatcaccagcaccttccgcagctcattggggccaaagtgctccaccaactccaggcacttgtcttccaggcggttcattagtggctccgagaggtgtcccaccttcatcatgacggtcactaatgtgtgggaatcttcaatttctgtccaacgcctttccaggtgtgtgagcagctcagccagcagctcctgcgagtgctgctcctgtgagagggtggcacaggactctgccaggaaggccaggtgcttgtacttgagcttccgcatgcgccagcggacctcctgctccaccgactgcagctccttggaggccttggggatgcccagagcatacaggcttcccagcagcttcgagagggtaccatgccagtactcgaggcaatctgacccaacttttttgtacaaagt

SEQ ID NO: 187358 - DNA, 1192 bp, Homo Sapiens
  misc_feature (332)..(346): n is a, c, g, or t
  misc_feature (988)..(997): n is a, c, g, or t
aaacaggtatgagaaaaaatatattttagagtttcaaagaactcaaactgttatttttcagactaggcactgaaacattttttctacaaaaacttgccagagattgtctcttcgctgtatagttccattatcaagctgggctacagacaacagacagctaactagctccatcctcctgagaaacactgtgcatagaaatgagactctcacactgttcgctgtcttctggaactctctgaattcgatgttttctgcatataaaagcaaatattcttctgattcccaccatcacaggatcccaattattataatggcataggagagttacaatnnnnnnnnnnnnnnntacagggatagctcctgcaaaaaataaccaagaaaactgcaccttttgcatacacatgtcagctattatggacagaggtattgtaaggcttagtgcaagtgtgcctatcaatgatgaggtaagaaagcagccccacaaccacaggaactctgagagtactgttccaataaggccattaatgataatgcacattaatactactttattgggaaactcgaagtcctcaaatccagtataatgaagtaaaaagaaacctggccataagagcagcagattaaacaaacctacaaaaccaaagaacattggaatatccaacttgtcttctctatctacttttctcttaatcataacaatatagacagcatagagcatggctccagcaagagaccaaatggaacctactgtgtctcttccagcaggtttttcagaccctgccaggtttaccagtacaacgcctccaatgcttaaaattacagctaatagtttagaaagggtaaatctatctccactgttacttggaaatactgcagcaaggattaaggtaaaaagtccggaagttgaagataaaatattaactatagcaacttgtgtgtctgaaagtgcttcttgatatgacaaatttgccaaaaaccacacaaagcnnnnnnnnnngctaattttcgctacttgagttgcagtaagtttccccacagttttcagtatggattcttgttctttcacaggatatgacatgcgagacaactttgcttccaatgcatgacttgacggaagctgtcgaatctccatgatattactgaacctcacacgagactttttgggggttttttcagtatcaatgtttgccaa

SEQ ID NO: 187359 - DNA, 1730 bp, Homo Sapiens
ttggcttttaaataaatttgataagactattaaagctgaacttgatgctgcagaaaaactccgtaaaaggggaaaaattgaggaagcagtgaatgcatttaaagaactagtacgcaaataccctcagagtccacgagcaagatatgggaaggcgcagtgtgaggatgatttggctgagaagaggagaagtaatgaggtgctacgtggagccatcgagacctaccaagaggtggccagcctacctgatgtccctgcagacctgctgaagctgagtttgaagcgtcgctcagacaggcaacaatttctaggtcatatgagaggttccctgcttaccctgcagagattagttcaactatttcccaatgatacttccttaaaaaatgaccttggcgtgggatacctcttgataggagataatgacaatgcaaagaaagtttatgaagaggtgctgagtgtgacacctaatgatggctttgctaaagtccattatggcttcatcctgaaggcacagaacaaaattgctgagagcatcccatatttaaaggaaggaatagaatccggagatcctggcactgatgatgggagattttatttccacctgggggatgccatgcagagggttgggaacaaagaggcatataagtggtatgagcttgggcacaagagaggacactttgcatctgtctggcaacgctcactctacaatgtgaatggactgaaagcacagccttggtggaccccaaaagaaacgggctacacagagttagtaaagtctttagaaagaaactggaagttaatccgagatgaaggccttgcagtgatggataaagccaaaggtctcttcctgcctgaggatgaaaacctgagggaaaaaggggactggagccagttcacgctgtggcagcaaggaagaagaaatgaaaatgcctgcaaaggagctcctaaaacctgtaccttactagaaaagttccccgagacaacaggatgcagaagaggacagatcaaatattccatcatgcaccccgggactcacgtgtggccgcacacagggcccacaaactgcaggctccgaatgcacctgggcttggtgattcccaaggaaggctgcaagattcgatgtgccaacgagaccaagacctgggaggaaggcaaggtgctcatctttgatgactcctttgagcacgaggtatggcaggatgcctcatctttccggctgatattcatcgtggatgtgtggcatccggaactgacaccacagcagagacgcagccttccagcaatttagcatgaattcatgcaagcttgggaaactctggagagaggctgcctttctggttccatctccttgggtgtgaggatagaatttcgaacaccaagagtcaattcccttgacttgcagcccgagtaattcaaagcctcctcctaaggtcagaagacactaaagggaatatttgcctcgctgcaattcatttagaaacaccctgctgtgtgtcatctcatgacagcactggtcttctgccagtatttaaagtgaacatttgatagcttctaccttaccagccaaagatattttttccacatagaataggtctaattcaatgtataatgagaacatatgtagaaactgtgaatggattgctttagtttgtaatttttctatgcagttatatttttctagtgtagctagactattttgtcatcatgtaccactacatttttgtttattttaa

SEQ ID NO: 187360 - DNA, 2091 bp, Homo Sapiens
  misc_feature (1333)..(1348): n is a, c, g, or t
  misc_feature (1429)..(1503): n is a, c, g, or t
ttggatttgaattcagattgcctagctatttgaacatctcaaagttatatatactgggtattaaaattaaaagcaagttatatcagtgaagtaagatccttttgaatgtacaaagacccacactattgagacagcttttagatacttttttgtccattctaaaagtaagcaaacatgattgccttcttgttttctgtatgtataacccgtaaatatccattttgacataggaagaactttggttaagagtaagttctctaattgtgtttgttttaaggaatgaaacttggttaagattttgactacttcattattaaaaattgatagaattttagctcctgagatatttacaactgggagaaatgtctatttaggtgtttacattaagcggtatgaaagttgttaccacataggcactggtacgaattctcaataagaatgcagtggaacagttaagtagaactgtaactacgttggcactggtacgaattctcagtgagaatgcaatgaaacagtcaactgcagtgtttctttttgatgtcttttattttacaactgggccaaaggcacattatgtatataattagtttatatttacacactagcatatagggaatatttctgcacttgaccctatttgaattctgagcattatttataagtataaaatgatgatatataagtgaattttgtgctcttgtttgtattttattaaggaaaatgaaaataatctggcatcagtttcattttgctaaatatctagtcttcttcaaacagtatcttggtgggtgacttggctacctgaaaaatcttaggaggaatagctcacaatacaataaatctgtagattctgcttagagcaaattatggtacttttattcagacttgtttcctttctagttaacagaaatagtgacatttagaggttttaatcagaagttaggtttttctgattcaggaacatcgtaggccagccatttgtaatttttaactttgagaaacaaattttgtgagaataggtagtgggttgctggtagttaattggatttaatatttgtattaaggattaactggaaaaaatgtgtctcagtgctaattcttggacctttaatacagtgtgcttatctgttacggcctccttttatctctcttctccaatattaaaaaaaatggaaatcaaattattatgctgaagggaaaaatatacctgtataagaatggtgtgtttggctaatgtttctaagttgcacacagtttattaacaactgaacaaaacatttttatcatttaaaaatctatttttatgatttaatatctcatatgtgacagttgnnnnnnnnnnnnnnnnggaactcaatctgttaacagtctgggacatccggtatagtaaccagagtttttgagcctgccgtattgggcttaaatttcnnnnnnnnnnnnnnnnnnnnnnnnnnnnnnnnnnnnnnnnnnnnnnnnnnnnnnnnnnnnnnnnnnnnnnnnnnngtttatttttgaagggtattaggataattaaaaataatgtaatgtgcctagcacactacctgaaaacgatggcatttgttcttattaatgtctttaaaatatgcaaggaccataagtttttcctcttgcagatgaggaaagtaaaaaataatacgaacatgtaattcagcttctcagattcaagccaatgttttttgcatcaacttttctatattgtatgtatgtatataaatacatagattaaggaaataggaaactgaaactctgtggaatataaactttttaaaaataatttcatcaggttttttgtatgttactgacccatatggattttagtaacatcttgcttagtcatgttgttataaaacattcaaattctgatatacattgcttgaaaatgagtgagtacctcagagaaatttgatagactcaaacagatagtatgagaaatatctttgaaagaaatatggaggaaggttaagaggggagtagtaaaattaatgcgataggtaacatgtttgtaaccatatagtatccttttagatacaaaagcttattttcattattattataataaaacagttaatg

SEQ ID NO: 187361 - DNA, 1086 bp, Homo Sapiens
  misc_feature (110)..(124): n is a, c, g, or t
  misc_feature (141)..(156): n is a, c, g, or t
ttgggtgctttcatttcaattgatatcaaattcgcataacatgcaattaaccattgtaaagggtacagtttagttgcatttagaacattcataatgttgtacatccaccnnnnnnnnnnnnnnnattgagactccgtctcnnnnnnnnnnnnnnnnccggatgtctaggccaatgataattatttttgatgcagtgtggattagttcttttgttaaccccactgtcttggggaatgatgccagctgggaaattgagtttttgactgaaacatggagccttcactgctttttttctggttcctatgaagatttggaacatagaaaacacaaaaactcaccttaaaatttgagcaggtcgttgatggcaaaaataattttaaggaaaaaggaatattcttatgtagttattctaaagtttaaggagcgttgttgaccataatattgcttagttttcttactgctgttaagtaagtaaattgtttcaaagtaggttttgtgtgtgtgtgcctagtgtaaaagaactgaaattttgatgcttacagcacttggctcgtgcatttgtatcaaaatttgcctgcctctttatgagggaggcctgcttttcacacctcagtttatttaatacgaggcaagttgtaagacaacactcattctaggtgattctgtggtgccatgaaatttaaggtaatttggggaaaaggattagtcagttttaagcaagagtcacatcttttgagctttcgattatcagtgtagtacctgactaaaaatgaagtaatacccttaaaccatttataatttctagtatttctctgaaagatcgttttggggacaaaagtgacttgacatgtccaatttcatttcagaataaaaagctagcatctttaaaaatctcagattgcttgcttacagatacaagtaagaattatggacaaacgattccttttaaaggattacttttttcaatttcggttttagtaatctaggctttgcctgtaaagaatacaacgatggattttaaatactgtttgtggaatgtgtttaaaggattgattctagaacctttgtatatttgatagtattttc

SEQ ID NO: 187362 - DNA, 2211 bp, Homo Sapiens
  misc_feature (248)..(264): n is a, c, g, or t
ttggcacctaaccccttcaaaaggactatattacagttgaacccatggtagtttggatcctactgatacttgatgaggatctttacgtagtgttttatgttagttttgggtgatgtagttgagtcctccacttactgagtttacctactgtgtatgactgggctcaatgataaatagaatggttatatcaacactcaaatgagggctgacacacttcacctctccttttacttaagatctctctgcannnnnnnnnnnnnnnnngaagccaagtaagcaagaagaaaaatgagagataatgcttcagtgagagaggaaaggtgctacatagagtatgagctgttaagttacatcccaggggaaagacctgggaactattgtattattctcttgaaaatttggcccagtaagctgctacatccagttcaactaacaaaatcctgtataccacagagaagaataaagaaaaccaaactgacaaacatccttcttttatttaagaccaaactgcagctggaatacccagtacagttctgcttactacacttcaagaaagatctgaaagcggaaaaagaaccaaagaagggcagttcaagcgaccaaagggtgggtggaaggtgctgcagtatgaatactgtacgaatattttgactctggtctgaaaagataaaagaatgttatcgaaaactacatggaataattgaagtcccttcaagtttgaaagtaagcattttaggacaaataaaaggaaattcaactttgtacttgtggaaactaatccctaaatatgaataggtttatattgattcatgggtaacaggtccataataaattattggaaactaggatgtctgaatatcaaggaagacagccatagtctcttacagtgcctctgttggtctgtctcaaactgaattgggtgggaaaaggtatggtccaatataaaagttccatttttgccattattggcaaatcttgcctttgtttattttggtgccagtgttttctgcttaatcatttgctttgttggcatctgtgtttatttacttgtacaccacatgcagtttacatctgtcttaactactccttcccaggtaaattctaattatatttgacatccagctaagagggcccatctcttctcacctctttcctagtcagtatattcagcaaatatttattgagcccttactgtgggcaaatcattgtactggataattgagaaaaatagataattcccttattcagtaaatgtctactgagcacaatctagtgaatcattacagtatggcctcattgttttgtttgaggtgtgttattcataacaatattttacaccattcgtatcaatgtaattatagaacacaatatacgatcaaggataagtaattgtgtggttatctgccatttaaaagtatccagtatttgatcacattattataaataatgaaaaaatgatttaatctgtaataaactggtttattgtgcagtgactgtaatatactagagttataataaattgtttactctgcctcaccaaacacatgctaggatataacccccaaaataagtatttaactttgcattaggtataaaggagactgggtgctataattagattattttgaggcagacagagagctgttatcctaactgatttagtatgttctgtaattgagaaaatgttcaccaaattatactttttagtgatttacatgtacattttataggggacatgttctgtgtatagcgaataaataacttttatagtatcacaaaatgttttggattccttagtttcttattaggatatgatgtttctttacctatacattgatttcatcacatttgatttttgtcgtcttttttgccacatacttaaaactttccatataaaattaactaaaaatctggaagtggaatttaagcttttaatttgtagcaattttgaaaatatagcagaggtatattttcaagggaggtgtgaaatggaggtattattgtttgtattttattttagaaattttgtttgaacttgcccaagatcacacagcaagtgtcagatcctagttacagcccataatttttcacttgtttcatcttttgttaccatgtttgttgtttaatccaatggggaagtgtttttatagctttattttcatggagatagtacattgatataatgggatctagaatttacttagagtcaaa

SEQ ID NO: 187363 - DNA, 1230 bp, Homo Sapiens
ttgggattaagagataacccagcggtccctgagaagagattggttagtatggcctgaactggtggctgggggaactgtgtctggtcaagttatggcagatgtcacagctttaggtaggtaaaaagggtcctagatgaaaaccttggagtttctttttttcctgatagggttgtttatacttcttgattggtttcttgccattttcactttcagtgatggtgggtgtgcagtagaccaaaagtgtcttctgcccttttgtgctaagggccctggttgactgagtggccccagtcagatgagaggcaagtcctaagcttcttatagacagggatgttgactttgttctgctgcagcctgataaactgggaccactgtgtggttagtaatgcacttgccatttggtgacacagactgaaggctatcctacacctgggccttacctcttcctctactggcatcctaatggcactctgacagcatccagggtgactacagggcccattggaaatggatcatcattctctcttctagtgtctatctttatcataacctgatgtcccaaacttgtgacaagttcttttggcaactgaaggaccaagaagggaaacggtgatgagagagactgcccattataactttcaaaaccccgtctttggggaagaatcatctagggtgacattccttgaagtaaatcccaggagaatctaggccaaagagatgagccaaggttagtgagacaatttatttttattgcctaaactgcagagcattctctacacagcgtaaaggagaagtggggcagctgcaggacatgtagagaaaccaaactgggaaatcttacaaggagttgaaaagattaatgtcccaacctgatgagattacggccttgagacaataaggtggagcaacagaacaatgggaaagaggactgggagaggaatctaagaaccagatggcttcagctctctagaggagctgagcctattcacagtgcctaacctggaagcctgtgaggaacaggcctcaggcccttgccacgacctacttaggctacaatttcctttaaggcagcccctagctctgggaaggaatactggtagccagtggccagtgttcgctgtgggatcaccttctggccctccagcagcatgatggcacgctgtcgcccaaagacagcttgcaccacagctgttctgtgttaagaggagggatgaaccaacttttttgtac

SEQ ID NO: 187364 - DNA, 1032 bp, Homo Sapiens
ccatgcagtccagccccagggcagaggtcagaagtaagcgtcctgccgggcctcggctgagggcctgtccccaccatcatgggggcctgggggcccatctgcctttcgacgcagcgaaagcttccggccttgagctttcttctcctgctctgccgctccttctcatgcttctctcgctccttttcctgcttctctcgctctttctcctgcttctgccgctccttctcccgctccttctcctgtttctgccgctccttctcctgtttctgccgctccttctcctgcttccgggtctccttgctggaacccaagggggtgctattgccagtgggtgagggaagggatggatgcagtccctcagcagtgaccacaggccctggggcaggcccagcactggctctgcggacggggggcggcggggacggggcccctccagctgcccgggagcctcggctcttgaggccagggaggctgaggaggctggaggaggggcccaggggtggctgttgccgccggcgctcctcgtggatggcccgggacccatgcagtcgccgtgagggccgatactgcagctccccccgcgtttcccgccacttcttgagctgggctgcattctcccgctcaatcagtgcttctgtcaccggcagattggtcacctcatgcaccaggaagtcttcctgcatgcactgctggggcaggttacgcagctgctccatggtctcatacatgccttggcaggagcgcagcttctccactgagcccagcgtgtggcgcagcaggaccagggccacccggaagatgatcttaaccccttcacagaaaaacatgtcccagacacgcagcaccgacgcccagggcagggtgcgggcgaagatgcacatgaaccactccgtcatgtagagcacagggtcaatgcgctgccgccgcaggtggcgatgcgccagcggggaggcccggcgcaggagtgcaaaaaagatctccccgtccagctgaatggcctccagccctgcactgtagtaacctgggagccaa

SEQ ID NO: 187365 - DNA, 1177 bp, Homo Sapiens
ttggttagaaaagaaattacctgtaacgtttgaagataagaagcgggagaactttgaacgtggcaacctggaactggagaaacgaaggcaagctctcctggaacagcagcgcaaggagcaggagcgcctggcccagctggagcgggcggagcaggagaggaaggagcgtgagcgccaggagcaagagcgcaaaagacaactggaactggagaagcaactggaaaagcagcgggagctagaacggcagagagaggaggagaggaggaaagaaattgagaggcgagaggctgcaaaacgggaacttgaaaggcaacgacaacttgagtgggaacggaatcgaaggcaagaactactaaatcaaagaaacaaagaacaagaggacatagttgtactgaaagcaaagaaaaagactttggaatttgaattagaagctctaaatgataaaaagcatcaactagaagggaaacttcaagatatcagatgtcgattgaccacccaaaggcaagaaattgagagcacaaacaaatctagagagttgagaattgccgaaatcacccatctacagcaacaattacaggaatctcagcaaatgcttggaagacttattccagaaaaacagatactcaatgaccaattaaaacaagttcagcagaacagtttgcacagagattcacttgttacacttaaaagagccttagaagcaaaagaactagctcggcagcacctacgagaccaactggatgaagtggagaaagaaactagatcaaaactacaggagattgatattttcaataatcagctgaaggaactaagagaaatacacaataagcaacaactccagaagcaaaagtccatggaggctgaacgactgaaacagaaagaacaagaacgaaagatcatagaattagaaaaacaaaaagaagaagcccaaagacgagctcaggaaagggacaagcagtggctggagcatgtgcagcaggaggacgagcatcagagaccaagaaaactccacgaagaggaaaaactgaaaagggaggagagtgtcaaaaagaagatggcgaggaaaaaggcaaacaggaagcacaagacaagctgggtcggcttttccatcaacaccaagaaccagctaagccagctgtccaggcaccctgatccactgcagaaaaaggtccactta

SEQ ID NO: 187366 - DNA, 1679 bp, Homo Sapiens
cccagtgaaggaggcattaaggaacccggggactttatttttaaatgatggggtcaactcacactggaagtttcaagtctcccttgagtgggatgctttggaagcgagcccactgggatcgtcctggacccttcactaattctgcaaaccccacagggcgatctaatttatcttgcagacacagacacagccacaaaagtccagcagcagagcacccagcacccagaagtttcccagatgtttggtggtaactggactcacgacctgacaggctgaccgaattcttcctctccgacatttggggctgaggagtcagtacctatgaattacgactagactacaatgcacaaagcacgtagtcctgtgaattttagctcagtcaagctaagagttgaactgctttttaccaactccttaaaggggtgggtttttgttttgttttaaacctatttaccttcagattctgcatttattagaaaggcaatcaaagaaagaaggcatcacctaggtgcccaggtagaatttcttgtccagtctacagtatcttagtttttgactttctgctagttctttcacctaagaaatattttgaatcaaatttgaaactagcattcaccaaagtgatctattggctggcccggtggtagagagtggaattttcaccttctgcaaaaaaatgctatttacaaaagggtacttcatttcactgtgggcttttggtctgggctcatgaagcacttttatagagtgatggcagccagggtgtactacactccttggcgcctcgggaacgtttggcaagagtcgtttcacgaaaacaggaaaagagatccttctagtgtattcccatctctcgctgtcatgaggccacagacggtttcataaccacaaactgagctgctaactcggtgaggaatgtaccaaagactccattcctcccacggctgaaaaaataggtcatcgggtgcgtggggaatctgcacatttaattgtcattttttaaaagcagcaaagagcaggccttctttggttgttctcagacatctcgtctcagtggaaccttacgagaccaggagttaagacttgggcttcaaacaggttcgcttgcaaagaaaagtcctgggtgtgaaccaggacacgtaaaccagtccgaggcagggtgggagccacaacgggtagggggtaaagaaagggtcccgatccttagtcctcaatgggaccaaaggtcacggcagaaaacaggtgggccatgaagacgaagggcctgacaaagacaagatacatctctgaagtgactgctgaactctacataaaccagcactgctgtgtatagagccatcctgaatgcggccattgaagggggcctgtggcgggccgccagcaaggacacgtgccagggcggagccggggtctctcatacccgcagccctcttactctagcccatttgtctgtctgaccagcaaacattaaaaccattttcctctattggtagggacggactgtgttttttatttttaaataactaccttctacttcattcctgaaactcattggcgcttgctcaaaaggcctcttccgacgccgtgaatgcttcacaattgtgagcttcaaatggtttgttcttttggcagggaggttgaaatcaacttcctccaccaacagaagaacacatagccaa

SEQ ID NO: 187367 - DNA, 2911 bp, Homo Sapiens
ttggcactgactggcacaggtgttgggaaaatgatccacagtctatttctcataaactgttccggtgacatatttctagagaagcactggaagagcgttgtgagccagtctgtctgtgattatttctttgaagctcaagagaaagctgctgatgttgaaaatgtaccacctgtcatttcaacacctcaccactacctcatcagtatctaccgggataagctcttctttgtatctgtcatacagaccgaagtgccacctctctttgtaattgagttcctacatcgagttgctgacacttttcaggactactttggtgagtgttcagaggctgcaattaaggataatgtggtcatagtatatgaactcttagaagaaatgttagacaatggatttccactggctaccgaatctaacattttgaaagaattgattaaaccaccaacaattctacgctctgttgtcaactctattacaggcagtagtaatgttggggacacactccccaccgggcagctgtccaacataccatggcgtcgggcaggggtaaagtacacaaacaatgaagcctattttgatgttgttgaagaaatagacgcaattatagataaatcaggatctacagtctttgcagaaattcagggggtcattgatgcttgcattaaactatctggaatgcctgatctctccctttctttcatgaaccctaggcttctggatgatgtcagctttcacccctgcatccggttcaagcgttgggaatctgaaagagttttgtcatttattcctccagatggaaatttccgactcatatcataccgtgtcagctcacaaaatctagtggcaataccagtgtatgtgaaacatagtatcagctttaaggagaacagttcttgcggcagatttgatataacaattggaccaaagcagaatatggggaaaactattgaaggaattacagtgacagttcacatgccaaaagttgtgctgaacatgaacctgacacccacacaaggcagctatacatttgatccagtcaccaaggtactaacatgggatgtgggaaaaattactccacaaaagctcccaagtcttaaaggactggtaaatttacagtctggagcccccaaaccagaagagaatccgagcctcaacatacagtttaagatccagcagcttgctatttcaggcttaaaagtaaaccgtttggacatgtatggggagaaatataagccatttaaaggagtcaaatacgtcacgaaagctggaaagttccaagtgaggacatgagaagaggccaaaattcctcaggaccagtttgttttccaagtgtcattacgatgtatcactattaggtaccaagtgagtgggaatacatattctagttaaagcatttgtgtctagctacacaccgctaacaaagttacttagttatcaatgtaggattcttaaggagctttaagctaaggaaaccttttagtgacttagcttattttgtatcttttcacttaggaagattttggaggtgatttttttccataggaggataccatctggcggctgcacattgtaacagtaaaggcagaaagctgtagtgataacctctctcctaaaagagttaactggtctcatccagcagaagctatcttaaatctgtgatgtgtcaggtgcagccaaatatcacaccttctgatcttagccatcccaaaccagtatctgtcccgagaggaaattccccccacccccagaagtttacagaaaactgcctcttcaagtgtttgccttattcagcttttcacttgtgccattaagcaagcactgtagcaaaagccacttccacatggccctggcagggagcactgctgctccatgctccattctcactgtacttggtattgtattttttataaataagatttttatgtaaagcttagaatttgatttacagggaccttgctgcagtaaataccatctcaattttgtgccactggttcagctgttagcacagtaaaaaaatcatttgtatcaaaggggcaaatgctttattaaggtagtaaaagggaacattacttctgcttttaggaagttactgcaagcacaagcatttgtgcttttaagcaaattaaagtagtaaaagaaaaacttaagtgaaacctttgccatcttcatgttttataatataaagcttacccaacaccagttaagccatggttaacctaaatgcctcatgccccagttcagcaaaaggaggaaaatgtgcctgcctcacagtcatcagtctttttaaatcttttttgttgttgttcttaagggtttgaatttgtctgcattccttgtctttaggggaaattcccttttcatattgtgtgcttcccaaagctatagtcatagatttcttccagaaactattgtcataattgtcactggagtgcttaaatatacgtactatactgacaaaatacatggaagtgagttataatgaggcagaaacaaaatcctcggtaacattgatgatactctaccgatcaccgtggttttggaaagtcagtcaacagttgtattattgcactcaatttcattgtgacattttatttaacttcttcatcttggtggtccttgcccagttattttgcctcattagacatcaagaaatggagaaagactgaaagttaatatcttaagtgcttgttcttcatgtttccttcttgttatttatgctattctctttgtggctccattcttctttcaatcttctcagcttataaccgtctttccctaatgctaaggatagcccttacactcatcccatctatgctgtcaagggctgctggttggtgctggtacaaggagcccactcagcagttttcttacctttgcctgccctgcctttcatggattaagaaaggcaacgttt

SEQ ID NO: 187368 - DNA, 1619 bp, Homo Sapiens
actttgtacaaaaaagttggatgttttataatataaagcttacccaacaccagttaagccatggttaacctaaatgcctcatgccccagttcagcaaaaggaggaaaatgtgcctgcctcacagtcatcagtctttttaaatcttttttgttgttgttcttaagggtttgaatttgtctgcattccttgtctttaggggaaattcccttttcatattgtgtgcttcccaaagctatagtcatagatttcttccagaaactattgtcataattgtcactggagtgcttaaatatacgtactatactgacaaaatacatggaagtgagttataatgaggcagaaacaaaatcctcggtaacattgatgatactctaccgatcaccgtggttttggaaagtcagtcaacagttgtattattgcactcaatttcattgtgacattttatttaacttcttcatcttggtggtccttgcccagttattttgcctcattagacatcaagaaatggagaaagactgaaagttaatatcttaagtgcttgttcttcatgtttccttcttgttatttatgctattctctttgtggctccattcttctttcaatcttctcagcttataaccgtctttcccttatgctaaggatagcccttacactcatcccatctatgctgtcaagggctgctggttggtgctggtacaaggagcccactcagcagttttcttacctttgcctgccctgcctttcatggaataagaaaggcaacgttttgcagcttccaaatttctgaagaaactaatctcagattggcagttaaagtcaaaatgttgccaaatatttattccttttgcctaagtttggctacccggttcaattgctttttatttttaatgtcttgactcttcagagttcgtacctcaaaagaacaatgagaacatttgctttgctttctgctgaatccctaatctcaacaatctatacctggactgtccagttctcctcctgtgctatcttctcttctatccaagtagaatgtacgccaggagctccttccctctagcaatttctactaaaatgtccaagtagaatgtttccttttacaatcaaattactgtatttattaatttgctagaatccagtaaatcattttggtagctctggctgtgctatcaataaaaagatgaaagcaacaagttgattttttttaggtctactattgattgaacattctccaatgggcaaggctcattgtcaaagcagggtgaacatgatcagattttcttctgcatcatcacacaagctgcgagtgttgctgcaaagcacttctcagtactccttccctaacctcagtatgttaatagccattaatacttggcttaagcatcaccattctggccacagtctgagagattagtgatcaaagctcccttccctatcactaccaccacctactgataacaaagatttctgaatacttagtagtagtaaaatatttttcaagcacagagttacagctaatcctggatcacttgttctaaattcataagggagtatatcaagagcaaatgaagtaaatgattctttcctgcgtgtgggagtcaccatcattttattcaaaggga

SEQ ID NO: 187369 - DNA, 2283 bp, Homo Sapiens
  misc_feature (240)..(263): n is a, c, g, or t
  misc_feature (1411)..(1461): n is a, c, g, or t
  misc_feature (1975)..(1992): n is a, c, g, or t
ttggctcctaactccctcgacctctcctctcgcccggcccgagtgtgaggagaagggcccggcccggcctgcgtcgtgtgtgaggaggaccccgggcgggcccacgggccgtgtggggcctggtccggcccgccgggtgtgtgaagaccggggcccggtgctgcccggccggagggcgagaggaggggaggggcctggtccggcccggccggtgcgtgaggattggggcccgggcccggnnnnnnnnnnnnnnnnnnnnnnnngatggcccagcagcagatgaccagctcgcagaaggccctgatgctcgagctgaaatccctgcaggaggaaccggtggagggcttccggatcaccctggtggacgagtccgacctctacaactgggaggtggccatcttcggaccccccaacaccctctacgaaggcggctacttcaaggcgcatattaaatttcctattgactacccctattcaccacctaccttcagattcttgaccaaaatgtggcaccccaacatttatgagaatggagatgtatgcatttcgattcttcatccgcctgtagatgacccacagagtggagaactgccttctgaaaggtggaatcctactcagaatgtgaggactatcctattaagtgtaatctcactgcttaatgagcccaacaccttctccccagccaatgtcgatgcttcagttatgttcaggaaatggagagacagtaaaggaaaagacaaagaatatgctgaaattattaggaaacaagtttcagccactaaggccgaagcagaaaaggatggagtgaaggtccccacaaccctggcggaatactgcatcaaaactaaagtgccttccaatgacaacagctcagatttgctttacgacgacttgtatgatgacgacattgatgatgaagatgaggaggaggaagatgccgactgttatgatgatgatgattctgggaatgaggagtcgtgacgtgctccttcagtgcccctgtactgccctgccatctcaggccaaagggaggggagcaagtggggacctggccatggcccctcagcaaaaacctattcacagcgggtggggaaacacacacagctcctgctgactccccttatggatctcagtttgctcctttttatggacctttaatggagagagagtaaccctccacagaatgtctgaattcttgcattctttacccttccatcactatattgattctttttttaaaaaatatgaacccaaactcccgcctcacttcgtctctacagaatgttcacagcaaaacacgtttggtctgtttttagattcttgaagaattcaatagtctttcaagatgtttaatgtgtttaaagctgggaacctgttgggagttcacaagtgctgcatatactgggtagcnnnnnnnnnnnnnnnnnnnnnnnnnnnnnnnnnnnnnnnnnnnnnnnnnnncaaatttgccaaggtttagctgctcatttacattagtgtgtgtgcattcgttcagccccatggtggtgaattctgtttctttcctttcctaaggctgggacatggtgggcatcagggactttgtgctaagcctgatgaaatgtgctccttcaatctccatgaaaccatcgtaacatggaggcctcagctgctctgaggagagaaatcagactttgttttttgaaatcgattgggatcgaaagcctgaaataaatattcatactttccatagaactgagcacttggttgctatttattttaaaggcagggttatttccccccagggagtggggcaagcggggaagttgggatgagtgcgtgtgggagcaaagagttaaaaatcactatgctaagtttggttgatgctactggggggaaaaagttgaaactactggtgaccactgttgggagaggaaacatctgttttatagatttagcatggccttcccatcaaaaatacactcgtaccatgacnnnnnnnnnnnnnnnnnnaagtagccacttttaattactcagtattaatcctaggtgcatgtgttaagatttcggttttcatcgagctgcttatactgatagtgaaaaacttggatgtgtgtgagacgagttaccgccttcttcattggatgtgatctgaactttttttctcctttcaacatacttacgctgtggagtgcaagcagaattatgcatagaaattgtggcacgtctgagggagttgactgcagcagtgtttagccagataagctagatcttcctgcaatgcacttgctgcagctttgattt

SEQ ID NO: 187370 - DNA, 1722 bp, Homo Sapiens
  misc_feature (1123)..(1268): n is a, c, g, or t
  misc_feature (1507)..(1515): n is a, c, g, or t
ttggagccgaagcagcagcgcaggttgtccccgtttcccctcccccttcccttctccggttgccttcccgggccccttacactccacagtcccggtcccgccatgtcccagaaacaagaagaagagaaccctgcggaggagaccggcgaggagaagcaggacacgcaggagaaagaaggtattctgcctgagagagctgaagaggcaaagctaaaggccaaatacccaagcctaggacaaaagcctggaggctccgacttcctcatgaagagactccagaaagggcaaaagtactttgactcaggagactacaacatggccaaagccaagatgaagaataagcagctgccaagtgcaggaccagacaagaacctggtgactggtgatcacatccccaccccacaggatctgccccagagaaagtcctcgctcgtcaccagcaagcttgcggggtaacctgagcccccctctcctccccttcctcaaccactggacgtttatatattataggcagggatgaaatgggcacctagtcagatcttctcagcttgctagccagaaatgactgtgattctgctgggggctgctgagaaggtaatgtaggttgaaaaggggctctaagtttatttatttcgttagattgacacttccacacactccctgtagtccaggtagggcccagaaataggaaaggctaggattggataatgctgcaaatgctttttttgtgtgagaaactggagagatgtgatttctccttttgggagagaatgtcccaaaattgattaggctgagccttgggaatagtttggcagtttaacatcccaaggctaacctaacgtagttgggaaaggtagattgaatgagacatgttttctgtgcttctaagtgttctgtcccttaggctgctattgcttcatgtttccattatggcaggtttagagaatccttaaaaagaaaaattgacttgcttgcctaaaactacagtgcccccttagcctccattacttagtatctcttacagtttgctctggctctcaaataatataaagattgatgaacattattcacagaaaatgggcaccttctctctctcttccagcatgttgcttttgaaagtatnnnnnnnnnnnnnnnnnnnnnnnnnnnnnnnnnnnnnnnnnnnnnnnnnnnnnnnnnnnnnnnnnnnnnnnnnnnnnnnnnnnnnnnnnnnnnnnnnnnnnnnnnnnnnnnnnnnnnnnnnnnnnnnnnnnnnnnnnnnnnnnnnnatgtatgtaagattgattctgattctgaagtcttaactgccagcagaaaaactccatactgttcattgtaaaactaaaagtgaggaaggctcgtgggtggtgaacctctgctctgtaatactgggaaagtactacagaggggaaccatttgagggatacatgaggagagagtaaattgaggtttggggattataaattcaggcaagagaaccttatagatatcacagtcttgagggtcnnnnnnnnntacttaggaagctagccatggaagcttcttgcctctgacccagcccactttcccagcctacctctgggccttagctgctaaaagcttctctggcagcggagctgcaacctgaggaaacatgctcagtcatgcacatgtgttgacccatgtttcagatgcagtctgatgccagtatattgttagggaaagaggagaagggtaaactga

SEQ ID NO: 187371 - DNA, 695 bp, Homo Sapiens
ttggagcagcgcaggttgtccccgtttcccctcccccttcccttctccggttgccttcccgggccccttacactccacagtcccggtcccgccatgtcccagaaacaagaagaagagaaccctgcggaggagaccggcgaggagaagcaggacacgcaggagaaagaaggtattctgcctgagagagctgaagaggcaaagctaaaggccaaatacccaagcctaggacaaaagcctggaggctccgacttcctcatgaagagactccagaaaggggtatggggcatagtctcttaccctctttctttggagctaaaggaggttcttcgaatgaagtctgtagaggttctactggatccttttctggagattttgttgttgaacagaagtagaggcgaatttgaaatttgaaaagagcaagtcaaattaatgtaaatccctgatgtggtatcaattccctcctgatttcccatgtaggaaattaaggcctaaattggagcatttgggtgtgtggggaaatgagggaaagatgttagaaactgaaatgcagactgcccccaggcatttgcctgtttgaatgttggaggttttaggattgtgcactttttaagcattagagataaattttgggatgcatcatttcagaagaagatcaaaccatctctcctacagaaataaatcctcaacttgaaatg

SEQ ID NO: 187372 - DNA, 944 bp, Homo Sapiens
  misc_feature (762)..(770): n is a, c, g, or t
gaaactccatctcaaaaactgaaaataaaaataaaaatatgtattctcctaactgaaatatttacttaatctggaaaacaatgtaactatttttaaagtggttacatctattcttgctgaagaacaataaacagaattttttgactaagcataaccaaatttcagaacagtctaatcaatgccaagtatccaaggcaaactctaatacccatccattgtgcaaaaccacaagcacgcaagtattaaataagagcaagctgtcctgagcccatacctaatgaatttgtgtcttaaatattgtacattgtgtttgaggcttgtcaaaactgggattatggcaagaaaggttgcctaactcatacctttctgcctcaaattccaggtgctaaaggctaatggcattttaaacatcttacatttttaaaaatttatattgcctctgccaaacaggcctaatagttaaaagcaagttgagacaaaccaggcagattcagtgtgtggaacaggaaggatgtgctttaaaaaaaggtggaatccctcaaaaaattctatagggagacagcagccttaatctacataattcttcatctcgccaattcagccgcagcctttaaagagttagtgttaatggctttctggtttgaaaacaaaaatgcatctatgtggttgaaagtttgggaggagattcaccaatatctgaggagaagatggagtgaagggaattcttactttttgctttatacctttctataatatttacannnnnnnnnactgtaagtatggatcaaattgcaaaataaagaaaaatgccaaccttagaaaagacaataaatgcacaaaagatataaacaggaacagcaaatatttatattttttccattttgctctttttaaatctatgtttagaactttatatcttgggacttatgtatatatataccttt

SEQ ID NO: 187373 - DNA, 2090 bp, Homo Sapiens
ctttgtacaaaaaagttggctgctgtcctcttcagctcaagatggtggcctgccgggcgattggcatcctcagccgcttttctgccttcaggatcctccgctcccgaggttatatatgccgcaattttacagggtcttctgctttgctgaccagaacccatattaactatggagtcaaaggggatgtggcagttgttcgaattaactctcccaattcaaaggtaaatacactgagtaaagagctacattcagagttctcagaagttatgaatgaaatctgggctagtgatcaaatcagaagtgccgtccttatctcatcaaagccaggctgctttattgcaggtgctgatatcaacatgttagccgcttgcaagacccttcaagaagtaacacagctatcacaagaagcacagagaatagttgagaaacttgaaaagtccacaaagcctattgtggctgccatcaatggatcctgcctgggaggaggacttgaggttgccatttcatgccaatacagaatagcaacaaaagacagaaaaacagtattaggtacccctgaagttttgctgggggccttaccaggagcaggaggcacacaaaggctgcccaaaatggtgggtgtgcctgctgctttggacatgatgctgactggtagaagcattcgtgcagacagggcaaagaaaatgggactggttgaccaactggtggaacccctgggaccaggactaaaacctccagaggaacggacaatagaatacctagaagaagttgcaattacttttgccaaaggactagctgataagaagatctctccaaagagagacaagggattggtggaaaaattgacagcgtatgccatgactattccatttgtcaggcaacaggtttacaaaaaagtggaagaaaaagtgcgaaagcagactaaaggcctttatcctgcacctctgaaaataattgatgtggtaaagactggaattgagcaagggagtgatgccggttatctctgtgaatctcagaaatttggagagcttgtaatgaccaaagaatcaaaggccttgatgggactctaccatggtcaggtcctgtgcaagaagaataaatttggagctccacagaaggatgttaagcatctggctattcttggtgcagggctgatgggagcaggcatcgcccaagtctccgtggataaggggctaaagactatacttaaagatgccaccctcactgcgctagaccgaggacagcaacaagtgttcaaaggattgaatgacaaagtgaagaagaaagctctaacatcatttgaaagggattccatcttcagcaacttgactgggcagcttgattaccaaggttttgaaaaggccgacatggtgattgaagctgtgtttgaggaccttagtcttaagcacagagtgctaaaggaagtagaagcggtgattccagatcactgtatctttgccagtaacacatctgctctcccaatcagtgaaatcgctgctgtcagcaaaagacctgagaaggtgattggcatgcactacttctctcccgtggacaagatgcagctgctggagattatcacgaccgagaaaacttccaaagacaccagtgcttcagctgtagcagttggtctcaagcaggggaaggtcatcattgtggttaaggatggacctggcttctatactaccaggtgtcttgcgcccatgatgtctgaagtcatccgaatcctccaggaaggagttgacccgaagaagctggattccctgaccacaagctttggctttcctgtgggtgccgccacactggtggatgaagttggtgtggatgtagcgaaacatgtggcggaagatctgggcaaagtctttggggagcggtttggaggtggaaacccagaactgctgacacagatggtgtccaagggcttcctaggtcgtaaatctgggaagggcttttacatctatcagagggtgtgaagaggaaggatttgaattctgacatggatagtattttagcgagtctgaagctgcctcctaagtctgaagtctcatcagacgaagacatccagttccgcctggtgacaagatttgtgaatg

SEQ ID NO: 187374 - DNA, 908 bp, Homo Sapiens
gccaactttgtacaaaaaagttggcgaagacatggaccagggctacggaggctacggggcgtggagtgctggacctgccaacacccagggtgcatatggaactggtgtggccagctggcaaggttatgaaaactacaattactatggcgcccagaacaccagtgtcaccacaggcgcaacctacagctacggcccagcctcgtgggaggccgccaaggccaatgatggcggcctggcggccggggcccctgccatgcacatggcctcttacggcccagagccatgcaccgacaattccgactccctcattgccaagatcaaccagcgtttggacatgatgtccaaggaaggaggcaggggcgggagcggcggcggtggggagggcatacaggaccgggagagctccttccgcttccagccgttcgagtcctatgactccaggccctgcctgccggagcacaacccctaccgccccagctacagctacgactatgagttcgacctggggtccgaccgcaatggcagctttggggggcagtacagtgaatgccgagacccagcccgggagcggggctcccttgatggcttcatgcggggccggggccagggccgcttccaggaccggagcaaccctggcaccttcatgcgcagcgaccccttcgtgccccccgctgcgtcctctgagcccctgtccacgccctggaacgagctgaactacgtgggtggacggggcctggggagggccctcccccagccggccacctccgtccctcttctcccagtccatggctcccgactacggcgtgatgggcatgcagggggcgggcggctatgacagcaccatgccctacggatgtggccgctcgcagcctcggatgcgggatcgggatcggcccaagaggagaggg

SEQ ID NO: 187375 - DNA, 2675 bp, Homo Sapiens
  misc_feature (184)..(197): n is a, c, g, or t
  misc_feature (308)..(320): n is a, c, g, or t
  misc_feature (1072)..(1125): n is a, c, g, or t
ttggaatttctaagggacatggtaatccagcattctcaaggacctttcgccaaaatgtgttttccatctatgtcccgattcccctaaattttgcctaaaattcagtatgttccttaagtttttaaaattctgagtgtgtacaaatatcttgacataatgcagttttatttttatcattctggtnnnnnnnnnnnnnntagaagcaaaacacattgtattgccattattttgtatttggtaaaggttaatctaggaagttaccaactgtttaatgctatatgtattgtatacttgtattttcaggatannnnnnnnnnnnngccatacagataaaatttgtaaggttgcccctttgtggcactggtgtgtaaaatacacagactatcactaaaataatagttatatatacatacaggtgtatacttatgcatgcatacataaatccttagtatagaaaaattgcataaagaatagcaatctttaataaacctttttattacattgtgatttagcagttatgctaaaatatgtacttatgctttagtagtttgtttggtcccctctagtatgtgtcactgagaaattttttaaagacatggtagatcgtgtttagaggctttgtatgtgtgtcattttaataagcaagaagatatatttagattagaaatggtttggtctgcctttgaatattgtttattttactttactagttgagacattaaaggaagctgggcaatgcctattttatttctttgttggatattttagttcatacaaagcagagtacttctttagggctggttaattggttcaaataatttttaatttcctttctagtatcttctcaagttggaaaaatatacatacagtcctccttcaccttactctgtatttatattacccataactagcaagaagttcttgttctagattttttgtttgtttagttataacagagtaacataccatttaattacaatttttagccagaaaagtccccactattttactaacttgttaaaagatatctatataattgcctggccttatatttttcagtagattagaccgnnnnnnnnnnnnnnnnnnnnnnnnnnnnnnnnnnnnnnnnnnnnnnnnnnnnnnaaacaagttgtgcttttttaaaaggagttatgtttgggcaaagcctttgtcttcaagcagaatgtcacagaaggcagctactttataagccccaatgggccatggagaccactgtcagaaatgggatattagtctagagagaaggtgatctattcccacatgtcatttctaatgttgagtttccatgactgaacaaagagaatatatttattcagcttcacttgcagatcactagtgaatgtgagatttagagctcattgagtatattgcttcaaggtacaaacccaggatgatgatgctgtcaccactgtctcttaattttgaataatagtttcctttaataggagtattagagataagaaagtatatgaaaatatactgggaatattggattcttggagaaaactgttcagtcacagatatattcttgcctagcagtgaagtgcctttattttcagcatagcaaataaatattagacctgttccaatttgatctacaatttttttctgtgtttttcaccagattgtactcctaaaacttaacaggccatcacaagcaattgtcttttgtttacaagattgatttaatatgagaggatacaaaatgtcatcgttatcctctcttatgaacaactgtagtcaaaataaggtggcacaatttaattgttttgtatcagaaatacactgacccaccttttattgagtcctgccacatgttaggtaccgtgctctgctgtggagacagagcagtgaccccaaggagctcacggtccctgaaggaggtgctagagaagagacttagcttctgatactgccaatttaatgtgagaacatggggtatactgcatcatttccattttcatcaataacatatgttttatgcaccttctttacctgaaacttactaagaatctaccagtaaacaaacatcctgtctttttgcaagtatgaatcacttaacctgctgatagttgaagaacactttaggagttttgtattcttgtatatagtttattttttccatgtgctagccaggtaaagattacacagttcttctggactgttaaattgtgcatggttttggaccccttctgctctactacagagagtgaagaagaaagtattaaagctcactttaccattccatatacttactaaaagcctgtgtaaacatgtcttaatgaatgttgttgaaagcaatgtaaatagttgaaaatataaatttatattacagtttaagaaaaccttatgaggcatcactagccactgttaatatctatttgtattcttataccttttcaatatatttgaacaaatatagtttctggcactatttttatactaggaaaaggagttactatgtatattatgcttagcttttaaggcattttaaataaccatgaatgttgatttcattactttcctttcctccatcacgagagtcatttcagatgactctttcatgacaaaatcactttaaaggaacacttacctccgattcctgtataaagtcatgagatggtcaaggtggttttccattgtgcaaattc

SEQ ID NO: 187376 - DNA, 1687 bp, Homo Sapiens
ttggcgactctgcgccgcccgccgcgatggaggccgccgcccagttcttcgtcgagagcccggacgtggtctacggccccgaggccatcgaggcgcaatacgagtaccggacgacgcgcgtcagccgcgagggtggcgttctcaaggtgcaccccacgtccacgcgcttcaccttccggaccgcccggcaggtgccccggctcggggtcatgcttgtcggctggggcgggaacaacggctccacactcaccgccgcggtgctggccaatcgactgcgtttgtcctggcccacgcgcagcggccgcaaggaggccaactactacggctcgctgactcaggcgggcaccgtgagcctgggcctggacgccgagggccaggaggtgttcgtacccttcagcgcggtgctgcccatggtggcgcccaacgacctcgtgttcgatggctgggacatctcgtcgctgaacctggccgaggcgatgcggcgcgcgaaggtgctggactgggggctgcaggagcaactgtggccgcacatggaggccctgcggccccggccttctgtttacatccccgaattcatcgcggccaaccagagcgcgcgcgcggacaacctcatcccaggctcgcgtgcgcagcagctggagcagatccgcagggacatccgagacttccggtctagcgcggggctggacaaagtcatagtgctgtggacggcgaacacggagcgcttctgtgaggtgattccaggcctcaacgacacagccgagaacctgctgcgcaccattgagctcggtctggaggtgtcgccctccacgctcttcgccgtggccagcatcctggagggctgtgccttcctcaatgggtctccgcagaacaccctggtgcccggagctcttgagctcgcgtggcagcaccgggtttttgtgggcggagatgacttcaagtcaggccagaccaaagtcaagtccgtgcttgtggacttcctcattggctccggcctcaagaccatgtccatcgtgagttacaaccacctgggcaacaacgatggggagaacctatcggcgccattgcagttccgctctaaggaggtgtccaagagcaacgtggtggacgacatggtgcagagcaacccagtgctctatacgcccggcgaagagcctgaccactgcgtggtcatcaagtatgtgccgtacgtgggtgacagcaagcgcgcgctggatgagtatacctcggagctgatgctgggcggaaccaacacactggtgctgcacaacacgtgtgaggactcgctgctggccgcacccatcatgctggacctagcgctgctgaccgagctgtgccagcgcgtgagcttctgcactgacatggaccccgagccgcagaccttccaccccgtgctgtccctgctcagcttcctcttcaaggcgccactagtgccgcccggcagcccgatggtcaatgcgcttttccgccagcgcagctgcatcgagaacatcctcaggggcctgcgtggggctcccgccacagaaccacatgctcctggaacacaaaatggagcgcccagggcccagcctcagcgagttggaccccgtggctgccacctaccctatgttgaacaaaaaaggaccggtacccgctgcccacaaatggctgcccgggtgatgccaatgggcatctgcaagaggagccc

SEQ ID NO: 187377 - DNA, 1265 bp, Homo Sapiens
ctttgtacaaaaaagttggctcatgctcccccctcatgcccaacttctgaggattcgagcagggctgaagtgttttcagcgggatgctcacaggctcctccaactggaattctgaggaggcaatgaagtgggcactatggagtttgtctccctgagccatggatgcctgctccgagggcccgttgtcaccctcaaagctctcccactgcagtggcacaggcgccacgtgcgggtgacagctgcccctcatgggcacttagcgcacactagaggtccagcaccccatcctcgcccactggcacgtcatcctcagactcgggaggacatcacatcggctggggtgagcggcagggccagtggctgcgcaggagaaggctggatggggccatcaacagggtccccgtgggattctaccagagggtgtggaagatcctccagaagtgccacggtctctccatcgatggttatgtcctcccatcctcgacgacccgagagatgaccccgcatgagatcaagtttgctgtccatgtcgaatcggtgctgaaccgcgtgccgcagcccgagtaccggcagctgctggtggaagccatcatggtgctgacgctgctctcggacacggagatgaccagcatcgggggcatcatccacgtggaccagatcgtgcagatggccagtcagctgttcttgcaggaccaggtgtcaattggtgccatggacaccctggagaaagaccaagccacaggaatctgccacttcttttatgacagcgctccgagtggggcttatgggacgatgacctacctaacaagagcagtggcttcttatttgcaggaattgttgcccaattcgggctgccagatgcaatagggtctcacctggaaacatgatcacactctcaatctgtcacgtgccccctagccttactgggaaccttctgtcccccaagatcccctgtgctatcaggaaagcatgtcccatcagaaacactctcggggggcaatggtagcactcaccctgaaactgatgtatgttaaagccacagagatagagctgaggagtcctgtgttcccccgcaaggagcaccccgggatcattttctaggttcatttctctggaacatttgctgtagcatctggtctcacggactctgagaggaattggaaattggtctcttttgagtgcagagggaactgagacgccagcttaaattggctcttgcagagagttacagaaatagtttcgatgagctagtgacacatcctaaa

SEQ ID NO: 187378 - DNA, 2044 bp, Homo Sapiens
  misc_feature (1629)..(1637): n is a, c, g, or t
  misc_feature (1856)..(1900): n is a, c, g, or t
ctttgtacaaaaaagttggctaggaccggcccaccgggtcgcttggtggctccgtctgtctgtccgtccgcccgcgggtgccatcatggcggacgcggccagtcaggtgctcctgggctccggtctcaccatcctgtcccagccgctcatgtgggatatgagcctcttcctccaacaataggacgaaatatttttgggcggcaagtgtgtcagcttcctggtctctttagttatgctcagcacattgccagtatcgatgggaggcgcgggttgttcacaggcttaactccaagactgtgttcgggagtccttggaactgtggtccatggtaaagttttacagcattaccaggagagtgacaagggtgaggagttaggacctggaaatgtacagaaagaagtctcatcttcctttgaccacgttatcaaggagacaactcgagagatgatcgctcgttctgctgctaccctcatcacacatcccttccatgtgatcactctgagatctatggtacagttcattggcagagaatccaagtactgtggactttgtgattccataataaccatctatcgggaagagggcattctaggatttttcgcgggtcttgttcctcgccttctaggtgacatcctttctttgtggctgtgtaactcactggcctacctcgtcaatacctatgcactggacagtggggtttctaccatgaatgaaatgaagagttattctcaagctgtcacaggattttttgcgagtatgttgacctatccctttgtgcttgtctccaatcttatggctgtcaacaactgtggtcttgctggtggatgccctccttactccccaatatatacgtcttggatagactgttggtgcatgctacaaaaagaggggaatatgagccgaggaaatagcttatttttccggaaggtcccctttgggaagacttattgttgtgacctgaaaatgttaatttgaagatgtggggcagggacagtgacatttctgtagtcccagatgcacagaattatgggagagaatgttgatttctatacagtgtggcgcgcttttttaataatcatttaatcttgggaaaattcaggtgtttggtgtctgccttttttgttcttttttccagcacaacataacttaccactgatactccccctttagttattctgaattaggatatttttgctccaaattcttattttacttaaccagaagggaaaaaaagttgtattttcctgaagctacaggcactttgtcatgtgatttttgagtctcaatttaaggctttgtaaaatgaagagtagaattccaagaaaaatgagaaataattttgtaaaacttaacaaaatcactaaattaaactatatgggaggttatgaattactttttcttgggtagaccctaaaatgtcagtagcatgcaccagaatctgactcccattatgcttctaagcacatttcattgaccttgtctctcatacttcaagaaaaggacagtacattgctacattaccctagaaagtctgtgtgaggatctgccccttcagtctgttattgcaaagtaataaaatgtcacctacagggagcctctgagcctactctagttcaagaggctacctgnnnnnnnnntaaataagataaagggtcagcaacaacaaagaaaaagacaattacagaaaataagcaagatttggaaaggaagtataatggcacttttttcctcaaaggaagttcttgttttcacataaaatatgaaaagcagatcctgcaggagtaacccccttctttaagagccaagtatttgccagtgcttaaattacaccataccgttctaattatatataatcnnnnnnnnnnnnnnnnnnnnnnnnnnnnnnnnnnnnnnnnnnnnnccgaaggtgagtagttttgcatttctgatgacagccttggaaagtatatttgtaactccatgtctggtaatgccaacccaagtcgacatgggtcttaggacactgaccacctcacatgccataccctcagttaagcatgttaac

SEQ ID NO: 187379 - DNA, 1034 bp, Homo Sapiens
ttggctctattgcgcagctcgctgccgtgcgtttaacccaggcgaggaggaggaggagaaaattcccccagattcgggcaggcccgcaccccacattccgtcctgttttgagaggaggagggaagagaaataaacgtggcagcgcatagaaggccagcagggagactgctttccagacacctccggcccacacagccgttcaccccccgtcttttcagtcctggaaaaggaattcggtctgtccttaggatgaagctctaactgaactgaagtaaggagaaacagccttgaatctttggagggtctgtcttccttttgggctctgtgcaactgcagctacagtggaaaaaagcaaactgctcttgatcccagaagccctgcctaagcctcagcagaacttgtaagcctaaactgaagagcctcacccggacgagcaggcatcccttaaccttaagcaatccagttccacgccctggatcagtgaataaccccagctgcaccatgagccgcgttcgggatgctggctgtgtagcggcggggatagtgataggggctggtgcctggtactgtgtctacaaatacaccagggggagagaccagaccaagaagagaatggccaagcccaaaaaccgggctgtggctgggactggagccagggctagagctgggctaagagccggattcacaatcgaccttgggtcaggattcagtcccccaaccccagtccgtgctgaagcagaggacagggcccaggatgaagcctctgctctggacacagttggagctgaggcagtggccccagctgcatccagcgctgagctcagagtggggcagcagtcagcccaagaggcagatggagccggggttgggcctaagccgaatcatattggggctgcaatggcttctgcaatagcaccacctcccggggtgacagagcccttggggctgcagaagcccctgcaatggcaggggctcccaaagtggcagagctcccagagaagcggagacttccagggcagcggtgcctcctggga

SEQ ID NO: 187380 - DNA, 1248 bp, Homo Sapiens
ttgtacaaaaaagttggggaatacaggccacttcaaaaatgaaccaaatatccaagacccagctcaagcagaggcctacacgatttactgccaaaacagagtggagtacgagaaaagggtccgagcacaagccaagaagtttgcgccctcataagcagcgaccttgtggcatcgtcagaaggaagggattggtttggcaagaacttgtttacaacatttttgcaaatctaaagttgctccatacaatgactagtcacctgggggggttgggcgggcgccatcttccattgccgccgcgggtgtgcggtctcgattcgctgaattgcccgtttccatacagggtctcttccttcggtcttttgtatttttgattgttatgtaaaactcgcttttattttaatattgatgtcagtatttcaactgctgtaaaattataaacttttatacttgggtaagtcccccaggggcgagttcctcgctctgggatgcaggcatgcttctcaccgtgcagagctgcacttggcctcagctggctgtatggaaatgcaccctccctcctgccgctcctctctagaaccttctagaacctgggctgtgctgcttttgagcctcagaccccagggcagcatctcggttctgcgccacttcctttgtgtttatatggcgttttgtctgtgttgctgtttagagtaaataaactgtttatataaaggttttggttgcattattatcattgaaagtgagaggaggcggcctcccagtgcccggccctccccacccacctgcagccccaccgcgggccaggaccaggctctccatctgcttcggatgcacgcaggctgtgaggctctgtcttgccctggatctttgtaaacagggctgtgtacaaagtgctgctgaggtttctgtgctccccgcatcttcgggctgtagagcgctgggcagctaagatctgcataggtcgggattggcatcgagaccctggcaactgcaccggtgccagctgtcttgggggccacaaggccaggtccagaccagggctgggggctgcctgaggactcctatccgggcagcctgctggcgggggttcccctcttcagtggccaggtcacagggatggagctgcgctgtgcatagggtgccacctcgggtgtctgtcccttgtgtcctcaagagcagccttgctaccacccgtggcaaacgccaggtgctttttctgggagagcccacagccgtggccctccaggg

SEQ ID NO: 187381 - DNA, 1562 bp, Homo Sapiens
tcggaggggaggctttcggagcctcttgggacacttccgggggaaggtgggtaggactcgggtctggagcaatatcattggcccagctgacctctttagtgcaaaacccaatcaagggtgccgaggagaggcaaccgcggggtgggatgggcactcaggaactgggttgattcccaggctggaactggtgccattccccagggccagacatcagagatgggcagtgtggaggggaggagggggcagcagagaggggtcccatcccttcccaccagcagaacctgggcagagagagagtggcgggggagcctcggaaccgcagcagtggacggaccctcgggcctcggtgcatcccccaccctcagggcccggctcactcgaaggtctcccactgcttcctgagctgctccaccgagtctggggccggggccagggccggactcgggctcacgtcttgcttggttttctgtaacaaatcctcaaaggggtctctggcctgttgaggagcagagggctgcagtgttggctccaggccttgagggggcctgggaggcagaagcggggggtctccaggcctcagggccagcccctgcttggtctcagcagccctggcacttgagcgggccaggggcaacgttcggatcctcgacggggcaactgctgggggacccagcggctgtagggggctcgtgtgggtgcccatgggcatctggccaaagaggttgggcatggagagggcggagaggttgggctgagacctgtgaggggcacagaagccagcactggacagcaggaggccggacgcaaaagccggccccagggaagctggaggggccccgaaaggcccggctggtgtggagaccaggggcagggtgggtggggctgctggcatggatgggacaaaggggttgagtggtggctgtgggaatggggtgggtgtccctgcaggggggaagctgaattggggggtgaatggggtggctacattcggggtggcggggcgtgacgggagggtgctgcctgaccaggctgtgctgagcgggtccaggagggcgagcagggcgtcactgctcgtgcctgcagccccggggccagggctgagcggctggagcagttcagtggggccttgggggacaacaccaggcaggagccctggactcagggcagctcgcctgtcccgatccgtctgcagccgctctgagacgtcaccaagtgcggcgccggcagcctggagcttggccgggcggggaatgggcggtggaggcacgatgcccagctctggggtcttcctgccttggggccgggggatggtgatgctgcccagagtaggggtgggcacctcctccttgtcactggggttcaggatgctgtcccggttctggggccttcgaggcagggccagggagttcccgagcagggccgagggcttctcaggggaggcagctgggggcttgctggggatggccatgtcgtcctggcccaggctccagagcttgttgtacgggtgggtaagcttcaaggccactgtcaccccgcggctcctctcactcccgcccagccaa

SEQ ID NO: 187382 - DNA, 1460 bp, Homo Sapiens
ttgtacaaaaaagttggcctgggctgcctcgaaaagggagctgcggcggatacccttgcgtgctgtggagaccctactctcttcgctgagaacggccgctagcggggactgaaggccgggagcccactcccgacccggggctagcgtgcgtccctagagtcgagcggggcaagggagccagtggccgccgacgggggaccgggaaacttttctgggctcctgggcgcgccctgtagccgcgctccatgctccggcagcggcccgaaacccagccccgccgctgacggcgcccgccgctccgggcagggcccatgccctgcgcgctccgggggtcgtaggctgccgccgagccggggctccggaagccggcgggggcgccgcggccgtgcggggcgtcaatggatcgccactccagctacatcttcatctggctgcagctggagctctgcgccatggccgtgctgctcaccaaaggtgaaattcgatgctactgtgatgctgcccactgtgtagccactggttatatgtgtaaatctgagctcagcgcctgcttctctagacttcttgatcctcagaactcaaattccccactcacccatggctgcctggactctcttgcaagcacgacagacatctgccaagccaaacaggcccgaaaccactctggcaccaccatacccacattggaatgctgtcatgaagacatgtgcaattacagagggctgcacgatgttctctctcctcccaggggtgaggcctcaggacaaggaaacaggtatcagcatgatggtagcagaaaccttatcaccaaggtgcaggagctgacttcttccaaagagttgtggttccgggcagcggtcattgccgtgcccattgctggagggctgattttagtgttgcttattatgttggccctgaggatgcttcgaagtgaaaataagaggctgcaggatcagcggcaacagatgctctcccgtttgcactacagctttcacggacaccattccaaaaaggggcaggttgcaaagttagacttggaatgcatggtgccggtcagtgggcacgagaactgctgtctgacctgtgataaaatgagacaagcagacctcagcaacgataagatcctctcgcttgttcactggggcatgtacagtgggcacgggaagctggaattcgtatgacggagtcttatctgaactacacttactgaacagcttgaaggccttttgagttctgctggacaggagcactttatctgaagacaaactcatttaatcatctttgagagacaaaatgacctctgcaaacagaaatcttggatatttcttctgaaggattatttgcacagacttaaatacagttaaatgtgttatttgcttttaaattataaaaagcaaagagaagactttgtacacactgtcaccagggtatttgcatcaaaggaggctggaattgagtac

SEQ ID NO: 187383 - DNA, 1691 bp, Homo Sapiens
  misc_feature (789)..(801): n is a, c, g, or t
  misc_feature (1299)..(1309): n is a, c, g, or t
  misc_feature (1333)..(1382): n is a, c, g, or t
  misc_feature (1417)..(1425): n is a, c, g, or t
ttggcaacatggagcctcttgcagcttacccgctaaaatgttccgggcccagagcaaaggtatttgcagttttgctgtctatagttctatgcacagtaacgctatttcttctacaactaaaattcctcaaacctaaaatcaacagcttttatgcctttgaagtgaaggatgcaaaaggaagaactgtttctctggaaaagtataaaggcaaagtaagttgcatcatctgatttttattgttatcatttttccttgtctctgtttattcctcttaataaaatcaattttttgctgttacatggtcataagttggaatttagtcttcagagtaatggtattagtacatcactttagttattacagttctgatagtttgcttctaaataataaattccgattatctcgttttctttaaaatgctttaattttgtgctgaattgacatgtaaagttgtttggaaaatacttatagttagtaatgtgaacatgatgacatttattaataaaagtattggttctataatctaataactttaaaaagaacttatcaaggatcatagttttatctttaatttaaaaataaactttcatgagtatctaatgcttttttaatggcagtactatttcagggccttaacccaggcatctaggttacagttttcaatagaactgtgtatgtccaaaaatatgaaaaaaacatcaatcagaggttatagtcccccccaaattgtttaggattttaactacttgcagaattttttaaatcttttgcttcactttccggttggannnnnnnnnnnnnccgggaggtttcactagttgtaaacgtggccagtgactgccaactcacagacagaaattacttagggctgaagaactgcacaaagagtttggaccatcccacttcagcgtgtggcttttccctgcaatcagtttggagaatcggagccccgcccaagcaaggaagtagaatcttttgcaagaaaaaactacggagtaactttccccatcttccacaagattaagattctaggatctgaaggagaacctgcatttagatttcttgttgattcttcaaagaaggaaccaaggtggaatttttggaagtatcttgtcaaccctgagggtcaagttgtgaagttctggaggccagaggagcccattgaagtcatcaggcctgacatagcagctctggttagacaagtgatcataaaaaagaaagaggatctatgagaatgccattgcgtttctaatagaacagagaaatgtctccatgagggtttggtctcattttaaacannnnnnnnnnnggagacagtgtctcactctgtcannnnnnnnnnnnnnnnnnnnnnnnnnnnnnnnnnnnnnnnnnnnnnnnnnttttaaacatgctattaaatgtggcaatgaaggannnnnnnnnaatgttatcttgctattaagtggtaatgaatgttcccaggatgaggatgttacccaaagcaaaaatcaagagtagccaaagaatcaacatgaaatatattaactacttcctctgaccatactaaagaattcagaatacacagtgaccaatgtgcctcaatatcttattgttcaacttgacattttctaggactgtgcttgatgaaaatgccaacacactagaccactctttggattcaagagcactgtgtatgactgaaatttctg

SEQ ID NO: 187384 - DNA, 862 bp, Homo Sapiens
  misc_feature (260)..(290): n is a, c, g, or t
tttgtacaaaaaagttggaaaacacagccattaatctggttgtctgaactattttaaattaaggagccagatgtttttagtcaggctatcctgacaagacttgacctaaacttcgtttttattggtcataacagtccaattatattcttggccaattttgtccaacggacaagaaaaaagcaaagtcaacgacaccattatcttgtcaagatcagatggttttactattgtggcagaagcgagaaaactttgtttattgnnnnnnnnnnnnnnnnnnnnnnnnnnnnnnngatactatggggtcaagtgtaactccatggaaatgccacgtctgctcttcagtgaagaagctggtttagagtctcacagaaaacttttgactgtatttatttattgttgcaaaaaagacgcttttttattgctgccctcatttgtcagctaagtattttttcttataaaatccagccccggttacatataatcatctgtatcttatcatgattcctgtaggtaaaagtacaagacgacctctagatgtcttttctttctatgaaaggagctgctatgtacacatgtgcacacacacacaactgggaatcaacaatgagtttattgttcatggtagattaaaattaagcttgcataaaggttgggctaagtggtcctggactacagactctgttgccttgaatataacagtacaatttgtcaattactctgcaccaggctaaagtgagtaaaatctatttgaaggtatcttgtttgtaaacatttgtcagattctaatttttttcttttgtattaaaattcaactatgggatgtatatgaaacaaataaatgggagataattttttctcccac

SEQ ID NO: 187385 - DNA, 1558 bp, Homo Sapiens
ttggcacagacaaatgttactcatgtaacccaactggagagagataccatccttgtatgcttggactgttgtataaaaatagtaaatctccaaggaagattaaaatctagcaggaaattgtcatcagaactcacctttgatttccagattgaatcaatagtgtgcctacaagacagtgtgctagctttctggaaacatggaatgcaaggtagaagttttagatctaatgaggtaacacaagaaatttcagatagcacaagaattttcaggctgcttggatctgacagggtcgtggttttggaaagtaggccaactgataaccccacagcaaatagcaatttgtacatcctggcgggtcatgaaaacagttactgagaattgttgtgctttgacagttaactctagaaagaaagaacactaccactgcaacattaatggatgcttgaagctgtacaaaagctgcagtaacctgtcttcagttactttgtaatttattgtggcatgagataagatggggaaaattttgttttaagtggtatggatatatttagcatattgaaccacacaagtgcttaattcattgttatgtaatctttgtacatataggcagtattttttctgtgaaacttcatattgctgaagacatacactaagaatttatgtagataatgtacttttatgagatgtacaagtaagtgtcttatctgtacagatgtaaatgttgatgaaaatgcaattggggttaatattttaagaattctttagtatattcttgggtgtggctatattacaaaatgggatgctggcaatgaaacaatacatttaacactattgtatttttattatatgtaatttagtaatatgaatataaatcttgtaacttttaaaattgtaatggaggctgtaatcattttataatctttttaattttaatgcaagtacactggtgtttatatttgcacagagtattgatatgtgatgtattaagtcacaaaagtaagctgtgacattgtctataagcatttggctccacaaatgtatttggattgttttctatgtgaagcaaaccaattataattaaccacatgttgtagtaactggtctttttatatttaagcagaatcctgtaagattgcttgtctttgcttaaaaacaatacctttgaacatttttgaatcacagaatagcggtaccatgatagaatactgcaattgtggtcagaattacagtatgcacaaagaattaattagcattattaaagagtcctcactaaacatttcatatgatcacactgaagaactgtaacattccatagagtgaagtggttcaaatttctcttggaatttttacttttgttggccttattttatgatccttttcatatttcttttgacttagagtattaatacatggccaaaataatttagttactacctcatacaaacaatataaatggttactacacatcacaagaacttagttttggtttaagtcattttggattgcttttttccaatggaatatgtatataccacgttttagcaaaatgcacactttt

SEQ ID NO: 187386 - DNA, 1657 bp, Homo Sapiens
ctgctttgtgatttatgagttttcatcatcttctatctcagccttttttttccctccatacctagtgtttctgtatcctgtgttccactacaccatgatgctttttcctgtatcatacaccctagaatgcatattatgcctagatacgtctattttgggaggagtagagaggagaatcttattcaaccccagaaccaaaataaaggaatagatgttgtttgaaaatgttgttattccctgcatagtttggggttacatagcccttaatcataagggagacttgagctgatcatatcgtgtttaggctaaaatttagcctaatttattttttctctcacataaatatgtatgtatatatatcatcttggtttgaatccttgataaagttaatttatgttaaaaataatttacttttaaagaactgacctgtagataagacagcttacgtgattactgtgtacagatttacattgccattatgtattattctttgtaaactttgtgcctttttttaatcagctattccctcgaaggtgtacatggttgtatgtaatgaacaattgcttgctatcaatatctggtaaagcttctcagctttattcccataatttaccagggctttttgattatgcaagacaaatgcaaaagttacctgttgctattccagcacacaaactccctgacagaatactgccaaggaaattttctgtatcagcaaaaatccctgaaaccaaatggtgccagaagtgttgtgttgtaagaaatccttacacgggccataatacctatgtggagcacttcagactagcattgttctattagaatgggttgaaccaatgcagaaatttatgttaattaagcacatagattttcctataccatgtccacttagaatgtttgaaatgctggtagttcctgaacaggagtaccctttagtttgtgttggtgtcagtagaggtagagacttcaaccaagtggttcgatttgagacggtcaatccaaattctacctcttcatggtttacagaatcagataccccacagacaaatgttactcatgtaacccaactggagagagataccatccttgtatgcttggactgttgtataaaaatagtaaatctccaaggaagattaaaatctagcaggaaattgtcatcagaactcacctttgatttccagattgaatcaatagtaattgagctgttcttgcctgctagtgtgcctacaagacagtgtgctagctttctggaaacatggaatgcaaggtagaagttttagatctaatgaggtaacacaagaaatttcagatagcacaagaattttcaggctgcttggatctgacagggtcgtggttttggaaagtaggccaactgataaccccacagcaaatagcaatttgtacatcctggcgggtcatgaaaacagttactgagaattgttgtgctttgacagttaactctagaaagaaagaacactaccactgcaacattaatggatgcttgaagctgtacaaaagctgcagtaacctgtcttctgttacttttgtaatttattgtggcatgagataagatggggaaatttttgttttaagtggtatggatatatttagcatattgaaccacacaagtgcttaattcattgttatgtatcctttg

SEQ ID NO: 187387 - DNA, 1111 bp, Homo Sapiens
ttgggtcacattttcctactaagaaacattaaaatctgacaggcgtgagccaccgcacccggcccttgtgtacatttttataagagaatttttttagctaggagttcagaatttttaaagtaccatttgaatgatcttaatttttctttcatgacaacacattccaaaatgaatcatgcttatgtactaagagggaaaatgtatttaagttaagggtgagagacttaagttataggtgaccttagagacctaaggtgagagacttgacacatggaaggagtaacattagggtctacctctacctcaatttagttagcgatttactacaatttcagagctttaacaaaagataaaaataaatcgtcaccaattgttattgcttctcatctttcatttttcaatgaacaagtaaggtattttcattcttatttttaggattttagtttttagtgtatggtacaaatgaacacagtttatattctaattcttactgcagctcattttaatttttaggatgcaagcacaatttagtattcaaagtgagtagcaacatattcaacttgatcccattgtcttcagttactcttgcccatgaaaaatgttcataaatgaacagggtatttgaccatatgatattagaaaatacagcacattactttatgagaaactacctactgatatgggcttgaaattttggatgaatcattgagcatttctacactagaagtaatttcaaaattgttggtttttataaacaggaaaaaggttgagtagtgggacttttaagcatctctgaaataaaaaacttctttttacagacaagcattatagtttgagttacagacaacagtgtgtatatatgtaatatatatatagtaaaatgaaatttaaatatgaagccaaactttttaaaattagaaactacaaatggttatactgattagtgtctagcctagagtggtaaccatgctttactaattcagttatgaaatacattatttataatgcattagctgtattagctgttgcttttttgatgttcacgatactatgttatctcatttctgcatttaattatagctcgagtattaaagcccactcccttcagaaa

SEQ ID NO: 187388 - DNA, 919 bp, Homo Sapiens
ttgggcttttacctgtggccatgtcagagaaagattttaagaaagagcaaggagtgctaacaggaatgaatgaaacttctgctgtaatcattgctgcaccacagaatttcactccctctgtgatctttcagaaggttgtaaatgtagccaatgtaggtgcagtcccttctggccaggataatatacacaggtttgcagctaaaactgtgcacagtgggtcattgatgctagtcacagtggaactgaaggaaggctctacagcccagcttatcataaacactgagaaaactgtgattggctctgttctgctgcgggaactgaagcctgtcctgtctcaggggtaacctgcttacatctggactttagaatctggcacacaacaaaagtgcctggcatccactactgctgcctttcatttataataatagcccttccatctggcagtgggggaagaatacactcttgacattcttgtctcctgctttagaatgctagtgtgtatctatcatgtatgcaatactttccccctttttgctttgctaaccaaagagcatatattttactgtcagttgtctcaactcttgaatccatgtggcgttttctctgtcctgctgcttcttttggcctcctcgttttccttctctttttcgacaatggtagacatgaatgagatatttaaagttcattggaaatcttcttccctacagcagtaagcaaaaattagcaaagagatagtctaaatggcctctcagcttggtatgtgaaaatgagatcacatactttttaaatccaaatacaaaagcatagtctctgcaagattttgttctttgaatttcttgatattgtaattgattattgataactgtcatcatgaaattatctctcaataataagataaataaactagcatatgaatcat

SEQ ID NO: 187389 - DNA, 1050 bp, Homo Sapiens
  misc_feature (975)..(1005): n is a, c, g, or t
tagtatcactgtcacaaggctggaactggaagggctggggtttgtgaaatacagcgttttcttgcaaaaacagctgaagattgtagtcccggaccaccttgctggagttttctaataaaaactggaatgtgttctgcacagcttggcatgtttctagctcagtccggctgaaggctattaaataatccttgagatgatcatacacatttccatcaagagccttcataatgttaactaaatctgtttgatagtagcgatcctgatgtgcatttgctgccgctagggtaagaagataatcattccttgcgtgggtagctttggaattacactcagatcgccgggcttttaactttacacttgccttctgtaaactgattcttgattgaaaaagactaagtttagattttgcctcgatgtcagctttctctcgtactgcatgagccatctgttcagtctcaaagtatttctttttgcctttagctaaatctttcactgtctcttgtaattcagtttggatctttgtcaactggtccacacacctttttagttgctgttcttttaagcttctcactgtccttgcaggctcagaaatgaagtttttatagttttcacatatattcatccgagactgggctacctgcattgttccctcgagaaaagatttccaaacgggatacatgctcctgtaatcattccgatcatcagcttttactccaggccaatctctcttcaggtattgactagccaacttctgcataccctgtgcatactctctttcaatagcagccttcttctgactgaatgtcctcatatcttcaagcaaatcacattctgcttgatgtttggcttgaagttttgtcatctgctcaacttgaatgtttttcagttcttgtgtaactttcaccttcctcggcggcggctgcatgatgctgaagggacatcaatcctccccgacggcagcgttagcaaggaccnnnnnnnnnnnnnnnnnnnnnnnnnnnnnnncggcccagcgagcgcgcgcgtgtgtgaaaggagcgcttaagccaa

SEQ ID NO: 187390 - DNA, 1379 bp, Homo Sapiens
ccaaaggagaagatatccaccgtctcatcatagctctttccgttcagcatctcaggggccatccagtaggggtttcccaccaccgtgtagcgcttcttgcggtcgttcttgcgcaaggtgcgtttcttggtggtggccttctccatgggggcccttttcctctcttccactatgagccgtgacagcccaaagtctgccaccaccacagtcttgtccaacttgatgaggcagttgtgcgagttcagatcccggtggatgatgcacatagagtgcaaataggccattccggaggcgattcctttggcaaacctgaccttctgctgccaggggaacggatccatactgcgcagaaagtccttcagtgtgcccccctcaatgtactctgtcagcaggttcagcttcttatccttgtacagcacaccaatgaacttgagcacattggggtggtccaggctgcgcatcactttcacctcagtcagaaaagttttctgggtctcctcatcacatcgaattaactctttcatgaccatcactttgcccgtggctttgtgtgtcaccttgatagcctgcccaaagaagcccttccccaggacctccccatggattaggtcacagggccggaagatctgctgtgaatagctgctggaacaacgaagggattctgagcggctgatgtcacggctgaacagcaggggctcctttggggagctggggccaggggacttggagatactgttactgcgccttagggaacgtctcctcagtgtcccctccagattctccttggtgtccagggtgctgagggcgtgggggtgtccggcattctgcatgtgaggagcgagccgggcctccagccgcagctggtccaggcgttgggagacggggtcatgttcaatcaacagctgaagtgtctggctcgtctggctaattgcatcctccacctcctccactcgaagtgtgcggacgggggtcccattgatctccaggatgcggtccccagggtggatggcgtttcgattgttgggactgatgtgcatccggttgaccctgggccagacaagagttgaggcagggtaaagatgtcctaaaaacctgcttgaccaattctgcttgtgcagggaaggtttaccaggtcccaggccaccagtggcccctaaggggcccaggatacccacacagaaaggcaacaccttttccaggatgccccatctcagtgaagggaattgccactcaccctgtggcctaagccagaaacttgaacatcatcttcccaatctggagttccctcatctctcctactcccatctctaagaactctgccttctttccatcattgtagttattcacatctcttacctggatcacggtaatagcttcta

SEQ ID NO: 187391 - DNA, 886 bp, Homo Sapiens
ttggctttcttacctattcaccggcccctgctcaagaatgccagtgtgtgtgtagcctccacagagaggtcgttttctcggagtccagaggggccgcctgagcttctgagaactagggaggagccatcccagccatgagcccctgtgggaatctgctgggggccaagtggcctggagtcctcaggctcccgcagctgctccggagggagaggtgagctcagggcagcctgcctgcagccagaggtgccgggagccccgggcctgtcatggtggccatctacagccggcctgaggcagtcacagacggatttgcagctgagcctgtctatctggtgtgggaagaagatggggagttacttgtcagtcccggcttacttcacctccagagacctgtttcggtgttcagaatgccaggattccctcaccaactggtactatgagaaggatgggaagctctactgccccaaggactactgggggaagtttggggagttctgtcatgggtgctccctgctgatgacagggccttttatggtggctggggagttcaagtaccacccagagtgctttgcctgtatgagctgcaaggtgatcattgaggatggggatgcatatgcactggtgcagcatgccaccctctactgtgggaagtgccacaatgaggtggtgctggcacccatgtttgagagactctccacagagtctgttcaggagcagctgccctactctgtcacgctcatctccatgccggccaccactgaaggcaggcggggcttctccgtgtccgtggagagtgcctgctccaactacgccaccactgtgcaagtgaaagaggtcaaccggatgcacatcagtcccaacaatcgaaacgccatccaccctgggg

SEQ ID NO: 187392 - DNA, 1649 bp, Homo Sapiens
ttggagattttcgagacatgatgccaaccaggtttgaagatctgatggagaaccttcctctgccagaatataccaaacgagatggcaggctcaatctggcctctaggctacctagctactttgtaaggcctgatctgggccccaagatgtacaacgcctatgggttgataacagcagaagatagaagagttggtacaacaaatcttcacttagatgtgtctgatgctgttaatgtgatggtgtatgttgggattcccatcggggagggtgctcatgatgaagaggtactcaagacaattgacgagggagatgccgatgaggtgacgaagcagaggattcatgatggaaaagagaagccaggtgctttatggcacatctatgcagccaaggatgcagagaagatccgggagctgctccgaaaggttggagaagaacaaggccaagagaacccccctgatcatgacccaattcatgaccaaagttggtacctggaccagaccctccgtaagcgactctatgaggagtatggcgtgcaaggctgggctattgtgcagttcctaggtgatgctgttttcatacctgctggagccccacaccaggttcacaatctatacagttgcataaaagtagcagaagactttgtatctccagaacatgtaaagcactgtttccgcctgactcaggaattcaggcatctctctaacactcatacaaatcatgaggataaactgcaggtgaagaacatcatttaccatgcagtgaaagatgcggttggcaccctcaaggctcatgaatccaaactggcaaggtcctaggcatggagaaactccaagctcctctgtgaagcaggtctttcactcacaacacttaacagggaacggcagggctctttgctggagcagaggcccttcacccagagccagtgtggtcagtattccaaactctccagccactctcttctacgctgcctcaacactgaaggttgacacaggaaagtcgtactgttcacacacacagtttgagactccaagccaagagtgccacatccctatcctgtggccttttggaaatccaaattgcctgaacatggcggggctttcctgcacattctcctgatttgagattcacgggcacacctttcttttcttttcctcttgtgcctagttaagtgggaatgtgtttggagataggggaaatcacataactggtacaagtatggggtaattgcttaaacatgcctggtggaagtctgatagcgtctctgcacgtgacctctgacaaagcccatcccaggagacggggtgaagctattccccacactctcctgtgaacactggagtcttgcaagacccagggagaacccactgcttttcccaggaggctccaggattaggaaatgtgtgtatttagtgaaaaataggtttgtagtgaaatagttactatttcatgaaagtagatatttttagaaattttgaaataccacagttgttttcctggattataaggaaaggcacattacatttagtcttcctttcgatataaaactctttgaagaaatatgatttttagaaatcagctacccattatagcacaaaatcagccaaagcagaattttaaaattgggctttttaggattctttttctccccc

SEQ ID NO: 187393 - DNA, 501 bp, Homo Sapiens
ttggcacggggcagcatccggcggcagcggagcctgtggctccccctgcgggctgctcagcggcgtgcacagtcctgccggctggcttggtggggtgccgaggctcaggcagcatgacgacggagacctttgtgaaggatatcaagcctgggctcaagaatctgaaccttatcttcattgtgctggagacaggccgagtgaccaagacaaaggacgggcatgaggttcggacctgcaaagtggcggacaaaacaggcagcatcaatatctctgtctgggacgatgttggcaatctgatccagcctggggacattatccggctcaccaaagggtacgcttcagttttcaaaggttgtctgacactatatactggccgtgggggtgatctgcagaagattggagagtaagtgctgtcttggggattgggatgaagaagcaccagggcaaaggggtttgcaaggaggcagcatagggtgtgcagtccaagcctcatttctggac

SEQ ID NO: 187394 - DNA, 1498 bp, Homo Sapiens
ttggcagggagtcatagcaacgatgaagagaaattatcgtgcaggtcttctccagaacaacttggaagaaggtaatgacctgaaatcattctggaagaagctaactctgttggatgcactttatgaaatagcaatggcatggaacttagtaaaaccagttaccattagcagagcatggaagaagattctccctatggtagaggagaaagagagcctggactttgatgttgaagatatttctgtggctactgtggctgccattttacaacacaccaaaggattggaaaatgtgactactgagaaccttgaaaaatggcttgaagtagacagtactgaaccaggctatgaagtgttaactgatagcgaaatcatcagaagagcacaaggccaggcagatgaatccagtgaaaatgaggaggaggaaatagaactaattccagagaaacatattaatcatgcagctgccctccagtggactgaaaatttattggattatctagaacaacaaggtgatatgattctacctgatagactggtaatacgtaaacttcgagccaccatcagaaataaacagaagatgacaaagtcaagtcaataatgtcatttcaattttattgttctgctcattgtgtttgtgacaaactctttgcaatatggcttaattttctttgtgttctgaattctcagacttggtcctgtgaaatacaggcacaaaatgtatctgaagtggtttgaggattatgtgttttcatcatctgtgtcttttgtccttttatttgtacagataatcagaagatgatactgaatagatataaattacatgtacacatgtattcactttttagaatctgcaattataccttctgtaacagtggcattcccttaattttctagtgaaagttagagataactgaacagactgaagcacttttctgaaatcttttgcttgatttatgaaggctgccatagttatcttttcttgtgttaaccatcttaaatgatgttttgtatattttaatagactgataggatgagaaagatttatattattagatttcaggatgatttataataattcaaaaatgaaattcaataatggggaaataattatgaattatagaaattatgccttcattctcttacatttgtgtgggttgcaagagggggagattattctggaaatgaagtaaatatgggaagttattgccaaatgagagagaaactatgggaaagctgatctataaagaggcattctgatcaattcatttgtaggaaactgggaaataaaaacctggggaactttaggttatttatacaaagggaataaataggctgattttaatttggtaagttgatctttttattatgaatttggtaatagtataggtttattatttattcatctaattttatagtacaggttttgtaatgttacatgtgatgatatgagctcccaccttatatgggggaacatcttgggaatttgagatttaataag

SEQ ID NO: 187395 - DNA, 1328 bp, Homo Sapiens
  misc_feature (555)..(573): n is a, c, g, or t
  misc_feature (1048)..(1067): n is a, c, g, or t
ttggcatgcatgcatgcacacacgagcatacttgtacctttgtctctgggcaaacaggtgggactgttagtgacccatttgggaaaatagagcatctcagagaaggaggtgagttcttcctgcctgtgatttctcttggcgctcccctcctctcccgctctggcttctgtggcggcagtggtgggtaagcactccagtgttctcttaatgaggcactttgcctgtcactcgagcaagcctgggtgttccttcctcctcatgctcctggaatagggaatagggatctcatgcttgcaaactacacaatgctgcaggtgcttcccaggggccacaggctgtcaggaaacgtgttttatgttaagtcacaaacccacttgacttctgggtactggaattaataccagtgggtgagactgagggtgagtgagttagtacatattaatcctggttgttgagcttccagactaccccgtccaaagtttgatgctatgtagtcagtggtttgtggggctggatgccagaaggttctttgagccagtttcaaaggttacttgnnnnnnnnnnnnnnnnnnnaaagtcagaatgttaacagctgtgatatatcctgcagggcttttgcagtttcttctgttctgtgttctgaaatcctgggtagagaatggctgaggaggagattaccagaaaagttgctttgctcagtgctttgccccaggattgcctcaaatctgagtggacttcatcctttgcggcggctctgagcctggcccatcttcctattcccacgtgtagctagtgtctagtgtcagctttgctcagtgtggtggaaacattttgcaaaactgttgtagaaagctgccttatagttggcttgacaaagcataattctctcataacaaactttcaaatcattacagtagcttaactactttagttgatgtgaccgaggaatcccttctagaatcataggtggcaagggagggtttgctagctctccatttgcactggccattgtgaaaaaccaacttctgtattcaaatctttccttcannnnnnnnnnnnnnnnnnnnggcagcgcttgtgctggaacttactcattgtaactgaatcctcagggcttttcttgttttagatcattgactgtgcacgtgacacttaaaataattttctatgtatttaaagaaaaatgcaccaggatggtgtctgtgcacgtgactattataggagcgtctgtagaagtacctggtttggtcagtgcagttgtgcaatctgagggcctggtttcctcctcccctttccccttctccccaccaaaggaaaatatcccctct

SEQ ID NO: 187396 - DNA, 1550 bp, Homo Sapiens
  misc_feature (595)..(612): n is a, c, g, or t
  misc_feature (1087)..(1106): n is a, c, g, or t
tttaaatgttttcactgactcattgaaaatgttaattacacacacatgcatgcatgcacacacgagcatacttgtacctttgtctctgggcaaacaggtgggactgttagtgacccatttgggaaaatagagcatctcagagaaggaggtgagttcttcctgcctgtgatttctcttggcgctcccctcctctcccgctctggcttctgtggcggcagtggtgggtaagcactccagtgttctcttaatgaggcactttgcctgtcactcgagcaagcctgggtgttccttcctcctcatgctcctggaatagggaatagggatctcatgcttgcaaactacacaatgctgcaggtgcttcccaggggccacaggctgtcaggaaacgtgttttatgttaagtcacaaacccacttgacttctgggtactggaattaataccagtgggtgagactgagggtgagtgagttagtacatattaatcctggttgttgagcttccagactaccccgtccaaagtttgatgctatgtagtcagtggtttgtggggctggatgccagaaggttctttgagccagtttcaaaggttacttgnnnnnnnnnnnnnnnnnnaaagtcagaatgttaacagctgtgatatatcctgcagggcttttgcagtttcttctgttctgtgttctgaaatcctgggtagagaatggctgaggaggagattaccagagaagttgctttgctcagtgctttgccccaggattgcctcaaatctgagtggacttcatcctttgcggcggctctgagcctggcccatcttcctattcccacgtgtagctagtgtctagtgtcagctttgctcagtgtggtggaaacattttgcagaactgttgtagaaagctgccttatagttggcttgacaaagcataattctctcataacaaactttcaaatcattacagtagcttagctactttagttgatgtgaccgaggaatcccttctagaagaataggtggcaagggagggtttgctagctctccatttgcactggccattgtgaaaaaccagcttctgtattcaaatctttccttcannnnnnnnnnnnnnnnnnnnggcagcgcttgtgctggaacttactcattgtaactgaatcctcagggcttttcttgttttagatcatggactgtgcgtgacacttaaataattttctatgtatttaaagaaaaatgcaccaggatggtgtctgtgcacgtgactattagaggagcgtctgtagaagtacctggtttggtcagtgcagttgtgcaatctgagggccttgtttcctcctcccctttccccttctccccaccaaaggaaaatatccctcttaatgatttcgtagttcagtttactgaatgattaccacctgtaattcctctttggattgtgtagactcaacatgagacattcctttctgctttctggagggcaccaggggcctttctctttgataaattttttttgtctgttgacaaaacaaaaatctttttttcaaatgtagtgctggtgaaaagg

SEQ ID NO: 187397 - DNA, 1358 bp, Homo Sapiens
  misc_feature (75)..(86): n is a, c, g, or t
ttggatggattttggtcctgggagattatttaggtttttttcttattgtgttgttgcacatatacagttagcagnnnnnnnnnnnnctgttggaattttagaaacaaggatccttcttgtggacggggtaagagtatgactgtaatcagagactctgggtgcagtttagggcagagcagtaatttcatctcttgctctccatgtttctctgtcatcccaggcggagtttaagaaggacaggggagagggcctggcccgagtgctgtgtggggaggagcaggctgatgctgatgctggggcccaggtatgctccctgctccttgcccagtctgaggtgaggcctcagtgtctactgctggtcttggccaacagaacagaaatttccagcaaactccaacttatgaaaaagcaccaatctgacctgaaaaagctggggatcctagatttcactgagcaagatgttgcaagccaccagagctattcccaaaagaccctgattgcactggtcacctcgggagccctgctggctgtcttgggcatcactggctatttcctgatgaatcgccgcagctggagccccacaggagaaaggctgggcgaagacccttattacacggaaaacggtggaggccagggctatagctcaggacctgggacctcccctgaggctcagggaaaggccagtgtgaaccgaggggctcaggaaaacgggaccggccaggccacctccagaaacggccattcagcaagacaacacgtggtggctgataccgaattgtgactcggctaggtggggcaaggctgggcagtgtccgagagagcacccctctctgcatctgaccacgtgctacccccatgctggaggtgacatctcttacgcccaacccttccccactgcacacacctcagaggctgttcttggggccctacaccttgaggaggggcaggtaaactcctgtcctttacacattcggctccctggagccagactctggtcttctttgggtaaacgtgtgacgggggaaagccaaggtctggagaagctcccaggaacaactgatggccttgcagcactcacacaggacccccttcccctaccccctcctctctgccgcaatacaggaaccccccaggggaaagatgagcttttctaggctacaattttctcccaggaagctttgatttttaccgtttcttccctgtattttctttctctactttgaggaaaccaaagtaaccttttgcacctgctctcttgtaatgatatagccagaaaaacgtgttgccttgaaccacttccctcatctctcctccaagacactgtggacttggtcaccagctcctcccttgttctctaa

SEQ ID NO: 187398 - DNA, 1100 bp, Homo Sapiens
gaaaagggcaggcagaatgtttaaataactgctttttttggatactgtttatctggtaatgattgtcccctaaaatcatccagcatttcaacaaacatatctcttatttcggactgctcatcaggattctcttccaagtccattttctcctcagtatttcctaacccattcatggtcagatcttggggctcgccacatcgttgagcatgttcctgaagctgcctaccctttacaagtatttgtccacatttaccacatgcacagatattttcaatgtgtttggctaagtaatgagatgacaggtcctcctcggttattgtaagtccacacagctcacaagatgcattttcagcatcctcttgtactggactgctgttgttagggggcctcatattctctaaaccacctctttcatcagcacttactgacattcgaggttttagagttttcctaccacttttttttatgctgacatcttcttcaacatagtatctataaaatggctcttcaggttcatcttctaattcatcattgtcagtggattcattacagtctttatcagtaactttaataatgttaaagtctttcagttcatctgtaggaatatcttctggctccatcttaataataatccttttcctctcagcagctctgcttttctcttcgcttgctatttcagactccactgtgctactttttctgcttccagtggttgaagctgaatcatcagcagcctggcttgtgtctcctctgtatttgtccgtctgtgcagaaaatgttttggaagaatctttttcaccaaattcagctttgatgttactgtcttttccatctctaatatctactattctatggtaagatcttgtgttttggtataaatgtctgttagtacaggttagcacatgctcatgtaataatttttcacagctaaagccaaatccacagctatcacaggtaaaactccgcccaaagcgtcttgacacacgttcttttggattagataatttggacacggaactttttttacatacatcaaatagtggctcaggaaaattacctaattgtaaagactcttcatcagcctctctattatgtgccaa

SEQ ID NO: 187399 - DNA, 2060 bp, Homo Sapiens
ttggccaggtctgcagtgtgcattaggattattgctggtcttcctagggggtaaaaggatcagagagagaagaattaagtgctaaattggaagaaaaccccaatataattatgtaaaatgtcactacattgattttccaagaggcattgtaggaacatgtcaaaaacagccagccctttaaatattgcagtcagccaaggaaattagatgagaattgtggctattaagagaattcactgagagttattctctagatttttagccgacaattaaccactaaaagctgctgcttttccagggtgggggagggaatgaatacatagaaaaacaaaaaagattgttctggattctcagtgaaaggctataggaagtctgttctggagacatctactttttagatcctgatacatcactgagtgtcatactccactaaaaggaaactctaaccgaaggctggctggtgtgacaatcccgttagttggatcttcacctacagccagattttgttctagtggccctcttcctgtaaacccagatggtgtcatacagaaattgtttctttcagaagcagattggaatctcttgggaccatgagactgagtcccaatatttccacccagggtcatgcccgttgttgtctacttccattttgagatctatagtttgattatctattattacaggaactgtttcttttctttttctaggagtgtttatgagagtgtgatattttaaagtcagacgcagcaaaaactgtttcagggtgaagaaagacccctttcagccctgttttgcagccctgggtgggggcatgagatagacagcaagcttctgatcttgaagcttgtctagaagacacatcttctaggtctcgtggtcatttggtaggctgacctttgagtgagcgaggccactattgagtggatagcaagaacattggaaccaaagcctcggcacaggcctggcactggctgtacatcagctcttacaactaaacaactcaactaagcaactgaaacgaaacaaaggagcattcgttctctgttgttaggaatcattctgctctgttagggaagggctgcaggaagggcagtttcctgaataaaaatctggctgcgaccagtcccatgtgtctggtaagtaagtaagtaagtaagtgccctttgaagggatcattaagacacagggagcatgaacctgagatcagaagcatttctttactaatttagattctgcgaaatagacggacctctccacccccaaacctaaaacaggccaggacttgtctctgtgctgaaagcaaatagcaagactaactcaagccccagcctctttccacactccctgatacctaaggactgctttctcagctagaccagggtgggcatcagcgacgccttctcagctagaccagggtaggcatcagcgtcctctctccatctctatacccctctctctcacatcaggaagatgaaatgtgtagctctagcggcaacctctagccaggagcccagtggcctctcagattgctttttggccaggtctcagcactgctggcatctttacatcttactccttaaaaccgcctctcgctgaggagccactgcattttgaagaatttctcagtgtctgtcaggaaagtgctcctgctcatttggaacgccacacaccacccgcactcacctgtccaggcgaatgagcaggtcctgtagctttacaaatatgccgctgatgccgcttctccccagggtctctcagttttccaggacaaaaagatttagggcctataccctatgggcaaaacacctaaaatgtcaacagtcaaaatgccattctttttggccatcataagagggagtaggtatcactgctgcatgccagttgtttttgactagaatatgccaaccagagcttgttggggcaggagacgtttttccttacaagcagactgcctgtgccctgtgccctgtttgctacttcactgccatggaatgatccgagtactgtatttcagagctgccccttccccagcagcaaacactcgctgagtccatgtctgg

SEQ ID NO: 187400 - DNA, 634 bp, Homo Sapiens
ttggcaaaatccgaaatcatttgcgagccgcaatcgtcgtctgcctgtgtgggggggcccagggcctgccttgcacgttgcagcctctctggccattgcagagctgctggcctcctgcccaggtggagggtcctggggacggcagaggataaagccccctcctcacatccctctattgcggatccacagtggccttactcttaacttggatgagagcaaaaacctgggagaatgatgtgcttctgtagtcggtgacaaaggaagaggcattgctactttatttggtgcacttttggtttctaggaaggtctttgggtcattttaacttctcggcaactcccagactctcagagtgtggggctgggggctggcggctgggctggtgcagggagtgtgctggttagtctccagaccctcacagcagccacgcccccaggcccaccgtgcatggtgtgggcgggacagccggaagcttccggggtggcctccacctcctggctggggcacttatgctcccagagcctttggtgccaggtttgtgggatgggggttagcgtctatgtgtggaaggccaccaatctagggacaggagtcctgggtcaagattcacaaagccacccttggagctggtttc

SEQ ID NO: 187401 - DNA, 2426 bp, Homo Sapiens
  misc_feature (88)..(150): n is a, c, g, or t
ttggcgacgaggcccgggcggcaggagccggcgcggcgaccgcggcgagggcggcggggacggagcagagcacgacgaagacgcacannnnnnnnnnnnnnnnnnnnnnnnnnnnnnnnnnnnnnnnnnnnnnnnnnnnnnnnnnnnnnngggccgcgggcagccaccgagccgcgaagcgacatggtgctgctcaaggagtatcgagtaatcctgcctgtgtctgtagatgagtatcaagtggggcagctgtattctgtggctgaggccagtaaaaatgaaacgggtggtggcgaaggcgtggaggtcctggtgaatgagccctacgagaaggacggtgagaaaggccagtacacacacaagatctaccacctgcagagcaaagtacccacgtttgttcgaatgctggccccagagggagccctgaatatacacgagaaagcctggaatgcttacccctactgcagaaccgttattacaaatgagtacatgaaagaagactttctgattaaaattgaaacctggcacaaaccagatcttggcacgcaggagaatgtgcataagctggagcctgaggcgtggaaacacgtggaagccgtatatatagacattgcagatcgaagccaagtgctcagcaaggattacaaggcagaggaagacccagcaaaatttaaatctatcaaaacaggccgaggacccttgggccccaattggaagcaagagcttgtaaaccagaaggactgcccatatatgtgtgcatacaaactggtgaccgtcaagttcaagtggtggggcctgcagaacaaagtggagaacttcatccataagcaagagaggcgtctgtttacaaacttccacaggcagctgttctgttggctcgataagtgggttgacctgaccatggacgacattcgaaggatggaagaagagacgaagagacagctggatgaaatgagacaaaaggacccagtgaaaggaatgacagcagatgactaaagccgcctttcccctctgcactttttgcaagacagtggtcaacaggaagacccagcagctccaccctcccaagtgacaggccattttcggacgcagccgttctgtgcccattcttcaggcaactttcgattccttactgtagctaattctagatgcccttcagtattgtgaacaaatagaccgtctggtgtcacagagcccgcgtgtgcaggagcctgctcctccgagatacgtggcgtgtaggttgctgtagttacagcgcctccgtctctctccattgtgttccgacccatttctgtgtgttcccccaacctttatttccaagtgacattttcagtctttcaaatagctgccttttgtgatgtggtgatttaaatgatttaagttcatttgttctcaaccttggggtaaactgaggtattttgcttcctgggaagatcttcgcaattttgagtgctcctgtggggagcggggatgagctaaagatacaatgtttccctgccccgcaccgcttccacaaaatagcaatgtggttttgcagctctgacttctgctcccagtaacccatcgttagggcactctagcactatggaggtacccaaggctcagccagtctctatttaagaaaatttaacaaatacgagtaaccctgtcccaatcactgaatctctagttactactcttagaaacacctgtggcttcttggccctcctgttgcccgctctgaatctctctgcagtctacaaaatcgccccagtcaactctccacttggagggaattgtccagtgtggcccctagaattgagtcaccccctagataccaactgtctgaccccgaggagctctgtaagtccctgctcctcctcttccctttggggctggtgctgccactcagcaataatcctcttttctctgtgctttcttaggtccctgtcctctgtctttgaggctggttaggaagcaagagtcctgatctttcatgctgcacaatatgagcatgcaaaaagctttttccagcagaacatgttccctcgtctccagttgccggaaaggaatttggggatcaagaacttagctcgtcctacccccatgttgagttctgccctggaaaacccaaagcaagtagtgatcatagtacagaacccgaccaaagtaggctggtgaggaagtccaggctccaggggaacagacgctgcccagtgttcatagcttcctgcaacttgacagagcctgagtttgcctcttagtgggagaatgagagagagctgtagtgtcacctgacattccccaaaccttgtgaagcacgttggcctaagtgtgccgtgatcccagctcacactagcctgggtgcatctgctaatgggagaccaaatctttgtccgggaagcagaagtggtgggagaatgtatcctgttttgtcagtttgtttg

SEQ ID NO: 187402 - DNA, 1086 bp, Homo Sapiens
  misc_feature (238)..(301): n is a, c, g, or t
ttggctcattgtgcccaggagttctccaaacccgcgctgcggagtccttcctcgggaggcggcgaaggcggtccaccctgcgcgtgatccttcatgcccggcccctgcccctccctccgggtggaacttccccctcaccgccagacttaagctgaggatcgttggatctctggcggggtgcagaactgagcccaggccacagtaccctattcacgctctgtgcttgtgccaaggtttnnnnnnnnnnnnnnnnnnnnnnnnnnnnnnnnnnnnnnnnnnnnnnnnnnnnnnnnnnnnnnnngaaaggagccagaaatgtgaagtgctagctgaaggatgagcagcagctagccaggcaaagggggcaatggcggcttcctgtgttctactgcacactgggcagaagatgcctctgattggtctgggtacctggaagagtgagcctggtcaggtaaaagcagctgttaagtatgcccttagcgtaggctaccgccacattgattgtgctgctatctacggcaatgagcctgagattggggaggccctgaaggaggacgtgggaccaggcaaggcggtgcctcgggaggagctgtttgtgacatccaagctgtggaacaccaagcaccaccccgaggatgtggagcctgccctccggaagactctggctgacctccagctggagtatctggacctgtacctgatgcactggccttatgcctttgagcggggagacaaccccttccccaagaatgctgatgggactatatgctacgactccacccactacaaggagacttggaaggctctggaggcactggtggctaaggggctggtgcaggcgctgggcctgtccaacttcaacagtcggcagattgatgacatactcagtgtggcctccgtgcgtccagctgtcttgcaggtggaatgccacccatacttggctcaaaatgagctaattgcccactgccaagcacgtggcctggaggtaactgcttatagccctttgggctcctctgatcgtgcatggcgtgatcctgatgagcctgtcctgctggaggaaccagtagtcctggcattggctgaaaa

SEQ ID NO: 187403 - DNA, 1420 bp, Homo Sapiens
ttggctttgtccggcttcacgaggaaggcatcatctatcgcagtacccgccttgttaactggtcctgcaccctcaactccgccatctctgacattgaggtggataagaaggagctgacaggtcgcaccctgctctccgtgcctggctacaaggagaaggtggagttcggggtcctcgtgtcctttgcctataaggtccaaggctcagatagcgacgaggaggtggtggtggcaacaactcggatcgagacaatgctgggagatgtggctgtagctgtgcaccccaaagataccagataccagcacctgaaggggaagaacgtgatccacccattcctgtctcggagccttcccattgtcttcgatgaatttgtggacatggactttggcacaggtgctgtgaagatcacccccgcacatgaccaaaatgactatgaagttgggcagcggcacgggctggaggccatcagcatcatggactcccggggggccctcatcaatgtgcctccgcctttcctgggcctgcccaggtttgaggccaggaaagcggtgctggtggcgctgaaggagcggggactgttccgtggcattgaggacaaccccatggtggtgccactttgcaaccggtcgaaggacgtggtagagcctctgctgcggccgcagtggtacgttcgctgcggggagatggcccaggctgccagcgccgctgtgactcggggtgacctccgcatcctgcctgaggcccatcagcgcacatggcatgcctggatggacaacatccgggagtggtgcatttccaggcagctgtggtggggccatcgcatcccagcctactttgtcactgtcagtgacccagcggtgccccctggggaggaccctgatgggcggtactgggtgagtggacgcaatgaggcggaggcccgggagaaggcagccaaggagttcggagtgtcccctgacaagatcagtctccagcaagatgaggatgtattggatacctggttctcctctggcctcttccccttatccattttgggctggcccaaccagtcagaagacctgagtgtgttctaccccgggacactgctggagaccggtcatgacatcctcttcttctgggtggcccggatggtcatgctgggcctgaagctcacgggcaggctgccctttagagaggtctacctccatgccatcgtgcgagatgctcacggccggaagatgagcaagtctctaggcaatgtcatcgatcccctggacgtcatctatggaatctccctgcagggcctccacaaccagctgctgaacagcaacctggatcccagcgaggtggagaagccaaagaagggcagaaagctgacttcccagcgggattcctgaatgtggcaccgatgctctccggtttggattatgtgcctacatgt

SEQ ID NO: 187404 - DNA, 932 bp, Homo Sapiens
tggcacccccgcacttgaaaaaaatgactatgaagttgggcagcggcacgggctggaggccatcagcaagatgaggatgtattggatacctggttctcctctggcctcttccccttatccattttgggctggcccaaccagtcagaagacctgagtgtgttctaccccgggacactgctggagaccggtcatgacatcctcttcttctgggtggcccggatggtcatgctgggcctgaagctcacgggcaggctgccctttagagaggtctacctccatgccatcgtgcgagatgctcacggccggattattagcaagtctctaggcaatgtcatcgatcccctggacgtcatctatggaatctccctgcagggcctccacaaccagctgctgaacagcaacctggatcccagcgaggtggagaaggccaaagaagggcagaaagctgacttcccagcggggattcctgaatgtggcaccgatgctctccggtttggattatgtgcctacatgtcccagggtcgtgacatcaacctggatgtgaaccggatactgggttaccgccacttctgcaacaagctctggaatgccaccaagtttgcccttcgtggccttgggaagggttttgtgccctcacccacctcccagcccggaggccatgagagcctggtggaccgctggatccgcagccgcctgacagaggctgtgaggctcagcaatcaaggcttccaggcctacgacttcccggccgtcaccactgcccagtacagcttctggctctatgagctctgtgatgtctacttggagtgcctgaaacctgtactgaatggggtggaccttgtggcagctgagtgtgcccgccagaccctgtacacttgcctgcacgttggcctgcggctgctctcaccctacatgcccttcatgacggagga

SEQ ID NO: 187405 - DNA, 1209 bp, Homo Sapiens
  misc_feature (255)..(306): n is a, c, g, or t
ttggaacaaaggtgtggtgttgggtggctgtggtgacaaatccattcgtttccgtcccacgctggtcttcagggatcaccacgctcacctgttcctcaatattttcagtgacatcttagcagacttcaagtaaagaagccatttccactacagtgagaaagcccggatcccaacagttgtcaaattgattagtttgcctaattcatgttttcacttaaaagtatcagaggtgaatgcacagtgaagggtgatttnnnnnnnnnnnnnnnnnnnnnnnnnnnnnnnnnnnnnnnnnnnnnnnnnnnnctggtgttgattttcctccctgcagagccaatggtgcacattggtttaagcccagagatcctgcttgagccctggactcatcttcggaagggccatgggaggtcctggctagagttctgcccaaccttgaccaaccccagcaatttttccaaaagccagtcaagggcattacatttgttcctgggactggcagctgggcctcctgggtgccagtccatctcaagtgccatattctgtgatcacggatgttggctccccctcgccctatgcaagcaaacacactctcacctcctctcccagccccccggagctctgagcacgccccacgcatggtgcaggagggactggacagatctgaggaaggccgtaaaatggggacaggaggattcagctcaggcgtgagggaagaggtcctctggccccctgaagatgagaatcacccctctcagtgcacctggggatccccctaaactgtgaattctgccctggacagggctttgcccttggaggatccccaggtggccttacccgtgattcttactcggcatcctccattccccaaactccctcctccctgttaaatgtcaacctagacctggacctgggtgggaggaaactgtagcctgagtgtccacagggacacacgtgagccacagggctagaagcacaggcccgtcaccccaggaggaaaagcccagggtctggggcagcagagccatcgcatcatgtttcccagggcaacttgaggtctgacttttggctccctcgccctaagaggctcttcctctcttttgctcatccaccttcacaccacttgtgagctgacccccaggaacagcttgtctgttccaccagagcagagggaatcattgctggactggatttcttctggagggaagcacc

SEQ ID NO: 187406 - DNA, 1281 bp, Homo Sapiens
ttggctcggcgctccggcagctccacgctcgcgcccgccatgccggagcagttcagcgtcgccgagttcctggccgtcaccgcggaggacctcagctccccggctggggccgccgccttcgccgccaagatgccccggtaccgaggggcggcgctggcgcgggaggagatcttggaaggagaccaagccatcctgcagagaataaagaaggctgtgcgggcaatccatagctccggccttggccatgtggagaatgaagagcagtaccgagaggccgtggaatccttaggcaacagccacctgtcccagaacagccatgagctgtccacaggcttcctaaacttggccgtgttcacccgcgaggttgctgcgctcttcaagaacctgattcagaacttgaacaacattgtctctttccccctggacagtctgatgaaggggcagctgagggacggtcgacaggattccaaaaaacagctggagaaggcatggaaggactatgaagccaaaatggccaagctggagaaggagcgcgatcgggccagggtgacaggagggatccctggggaggtggcccaggacatgcagagagagcggcgcatcttccagctgcacatgtgtgagtatctgctcaaagccggggagagccagatgaagcaaggtcctgacttccttcagagcctcatcaagttcttccacgcccagcacaactttttccaagatggctggaaggctgcccagagcctgttccccttcatcgagaagctggcggcctcagtacatgcactccatcaggcccaggaggacgagctacagaagctgacccagctccgggactccctccgagggacactgcagcttgagagcagagaggaacacctgagccggaagaactcaggatgtggctatagcatccaccagcaccaaggcaacaagcagtttgggacggagaaagtgggctttctatacaagaaaagtgacggaattcgaagagtctggcagaaaaggaagtgtggagtcaagtatggctgcctgaccatctcacacagcacgataaaccggcccccggtgaagctgaccctgctgacgtgccaagtgaggccaaaccctgaggagaaaaagtgcttcgacctggtgacccacaaccggacgtaccactttcaggcagaggacgagcacgagtgtgaggcgtgggtgtcagtgttgcagaacagcaaggacgaagctctgagcagcgcctttcctcggggagctcagcgctggctcggggtcctgggggtc

SEQ ID NO: 187407 - DNA, 1589 bp, Homo Sapiens
ctttgtacaaaaaagttggctcacatcttcttcgagtcagagctagagtagcagatcgactctatggtgtatataaagtacatgggaattatggtcgagttttcagtgaatggagtgccatagaaaaagaaatgggtgatggactgcagagtgctggtcatcatatggatgtgtatgcatcttctattgatgatattttggaagatgaagaacattatgcagatcagttaaaagagtatcttttttatgcagaagcattgcgggctgtgtgcaggaaacatgaacttatgcagtatgacttggagatggctgctcaggacttagcatccaagaagcagcagtgtgaggaactggtaactgggactgtgagaacattctctttgaagggaatgactaccaagctctttggtcaagaaactccagagcagagagaagccagaataaaggtgctagaagaacaaataaatgaaggagaacaacagctaaagtctaaaaatctggaaggcagagaatttgtgaaaaacgcatgggctgatattgaacgcttcaaagaacaaaagaaccgagacttaaaggaggccctcataagctatgcagtcatgcagatcagtatgtgcaaaaagggaattcaagtttggaccaatgctaaggaatgctttagcaagatgtaatcctgtgaattgaatttctcttcaatcaaagtgccccaaaacagaagcacaagtaaataaaagaaatttaagtcactacctagtatacataaacatatacaataagttaaataaattcagctttctttaacttaattgtggtcgtgttaatgtagcacaaaaaatatattttaatgaagattaaatattataatttgaggttttggggactggtgctgattccaaaaagttaatttaataatatataccaacagattgtttgtcacgcttctgaaccaatgactgaatgtcaagatgttcgttaatttctagatgtttgtttcaagaccagctgtttcagatctattaatgtagggaatttttccctaagattgaattcctatatttacttggtaagatccactaatctgttatagggagttgttttctcttgccttatagttgagctatttggtttgacaaagctcagcagaaacttgatgtgaaaaatctacgattttcttctacattcattgatgccccttgtaatgtttgcatacactagaaaatgccttcaatttgtgttttaccagaattttgatactggtcagaaattttatactgccaacaaagaagactcaacttctcagatctataatgggatacattgtcatcctctagcaactcctatatagaaagttttaactgaatatgttacatataagaattaaattcttctcaaataattcttaacctcagtaatgagcctaaatttactctgcttggctctctacacatggcatttcagggtataagatgtagcatttcaatgtgtaagatatatgtactaaacatatgtgttgctatcttcatcattaacatccttcttttctattgcttggctgtaatttttgtaaagataaattatatttgtttttt

SEQ ID NO: 187408 - DNA, 878 bp, Homo Sapiens
ttggctcaaaaaaataataataatcttaaagatgagaaaagccaccccatctggcaccacagctgcatcttgcttgtgagaaatggggaagagttcagggaggacacgtgacctgcacaggatcacagagcatggggcagagccaggactagagctcagggcatctgactccctcttcagtgttcttccccctccatgttgcctgcccctgaagacctttgagttcagtctacacctaagcaggtagacatccgcgaagtcagatgctttccaacatgacacctgaacatcttcctttatgcaacacccaaacatcttggcatccccaccccaggaagtgcggggaggaggttatgatccctgggcgcttcggcagaatggagagctgaggtgtccctcccctgctagtcacctaccaggtgtctgagcagctgcatgctccctggctcaagtgggcactgtaccttttgcctgcctttttgttccctatctccactccctgaggccacttagcctgagacatgatgcaagagctgcaggccggggggctcagtgccatggaagctactccaagttgcattgcctcccgcgcccagatcctgctttccatttcgagaacataaatagattgcccagcccctccagtacaatcccactggaagaaaaggcaatggcgggcttcagccagacctgctgagacctaattgccacggtaacagccaaagacatcaacccaagtgctgggtcaagtgtctcatcatactggcactgttgctggggtgacggcagaattcagaacttcaatttcagtgacgccaagcttgatgtgtttctgttattgttttgaagaaatagctcttgtggaggacttgggagaa

SEQ ID NO: 187409 - DNA, 1404 bp, Homo Sapiens
ttggctgggaagccagacccccacgagagtccagcgatgttccccccacgaagagaaataactggatctttattgatgaggagcaagcctttggggtcagaggacaggcccggggccggggccgtggtttcagagagttcacttttcgtggtcggcctgctggcggaaatgggagcggcctctgtggtgggggggtcctgggggcccgcagcatctactgcagcagtcagcgcagcggccgtggccggggcctgcgagagtttgcgcggccagaggactgccccagagccaagccccgacggagagttgccagtgagacccatagcgagggctcagagtatgaagaacttcccaagcgccgccggcagaggggctccgagaacgggaatgaaggctcgctcctggagagggaggagagcaccttgaagaagggcgactgcagagattcttggcggtccaacaagggttgctctgaggaccacagcggtctagatgccaagagccgaggccctcgggcctttgggcgagccctccctccccggctgagcaattgcgggtatggacggagaaccttcgtctccaaagagtcaccccactggcagagcaaaagtccaggcagctcttggcaggaatatggcccttccgacacatgcggatcccggcgacctacagacagagactatgtcccagattcctacagacaccctgacgcatttggtggccggggctttgaggacagccgcgtggaggacaagagatccttcttccaagatgaacacgtggcagattctgaaaatgcagagaaccggcccttcaggagaaggcgccccccacgccaagataagccccctcgattccggcgcctccggcaagagcgggagtccctgggcctgtggggacccgaggaggagccccacctgctggcaggtcagtggccaggcaggcccaaactgtgttctggggacaagagtggcactgtgggccgcaggtcccctgagctctcctaccagaactcctccgatcacgccaatgaggagtgggagacggcctccgaaagcagcgacttcagcgagcggcgggagcggcgggaaggccctgggtccgagcccgactcccaggtggatggtggcctgtcgggggctagtttgggtgagaagaaggagctggccaagaggagcttctccagtcagagacccgtggttgacagacagagccgaaagctggagccgggagggtttggggagaagcccgttaggccaggtggtggtgacacctcccctcgctatgagagccaacagaatgggacgcctttgaaagtgaaaagatcctcagacgacgccttgcctggaggtcttagtggctgcagcagtgggagtggccactccccctatgccctggagcggg

SEQ ID NO: 187410 - DNA, 1501 bp, Homo Sapiens
  misc_feature (1350)..(1371): n is a, c, g, or t
gcgcccggaggcgaaggcgggcggcccgcgtggcccagccgggccaggcctggcgcctcagtaggggcctccacacggcctcctccaggcgcgcggagggcgccatgttggtgggggagttgctgtggctgccctcggcctccaccacgtcgctctggttcgggaggctggggttgagcagcgcggagccggtggaggcgttggtgcagggcggcaggatgcgcggcggcgagcgctcgccgcccaccatggagaactggtaggagccggccgaggcgccgtagtacaggtggtaggagggcgagctggcttggaacgggcctccctgcgcttgcgacgagccggggtagggcggcggcaggtaggtgtggtagcgcgtggccgagcccatggccgacatgccgatgccgatgcccgaggtgaccggcgtcggggagtaggtgaaggcgcctggatagtgcatgcgggggtcggagatggagggcagcgcggggaactggcgcgggtcgctgaacgctgtcaggtcgggtgccgttgagagtcgactggaaagttctgcagagagggttgtcatgccgctggcacgtccaggtgaaatgggcgttgctgggtgcacagaaggagaggcaatggatcccaggtattggtaggactgatcgtagccacggtggggatggttggatctgccttgtatttcgaggttctcggggcccatccactgtgattttgatggctctgtggtaggtggcgacttgcggtgggtttgtgaagacagtgatggtcagagtgaagcttttccctcttccacttcgaccgacaaacctgaggtcattaaatcttgcaacctggttcttcatggctgcggtagcatttctcagctcagccgagtagttttcatcattgccagccatcacagtgaccagagtgccatctggaacatcccctagggccaccaccttgaaagcgatgggcagggtcttgttgcagcgccagtgcgtaggcagcacggagcagaggaagttggggctgtcggtgcgcaccagctcgcccgggtggtcggccagcacctccaccatgctgcggtcgccgctcctcagcttgccggccagggcagcgccggcgtccggggcgcccagcggcaacgcctcgctcatcttgcctgggctcagcgcggtggaaggcggcgtgaagcggcggctcgtgctggcatctacggggatacgcatcacaacaagccgattgagttaggaccctgcaaacagctcctaccagacggcgacaggggcgcggatcttcagcaagcagctcccgggagaccaacatacacgttcaggggcctttattactgcnnnnnnnnnnnnnnnnnnnnnntggttaggggaggagggagactaagttactaacagtccaggaggggaaaacgttctggttctgcggatcggcctctgacccaggatgggctcctagcaaccgattgcttagtgcattaaaaagtggccaa

SEQ ID NO: 187411 - DNA, 957 bp, Homo Sapiens
ggcagtaatccttgcccctcaacccaatacagacggagcccagagctcagagaatcaggcagggagaaaaggggtggggaccctggaaggccaaggaaacgagacccgtgaggcaaagaactggacttaaggcaggggatgaggaggagctgccggctcttccccaaaagagatgaggcaacaggtctctggagtcgagagaaggcggcaggacaggggtggctggtgacaaaaataaaaacatttgtctaagaccacaggggctgggtcagggtctgcaagccactatgtctgtacaggagtctacataccatccttcactgggaagagcggggacgaaagtgagggtagggttagggagcaggagtcagtgatgggggtctctccaaaacctcagggatctattcagccctcctcctcaggggctgcctaggaagacacattggaagaaaggtaccttcccctaagtccctggaaaagtggtcacagagggtttccacgtggttgcctatggtcacgtgaccatacaaaccaaaaacattaggtggagatttctgggaaaaggatgggatccttctttgctctaaatatatgtggaagcaaatgctcctagcaaggagatttctaactcgggctgtgtggcaggagtatccctgccctagaacccagggtttgttgtggctggggtgagggacaggagggccagttgctgccctggaggagtttggcactgtggctctctggagtcatgtccatgtgccccagagaaaccctgttgggccactgaagagaaatgttttaagaacttggatttgtgagtcggggctcaggaggggaaagtacaatcagcagggccctgtgccctttcaggagagactgtaatctgggaaaagactagggaaagaagagggagagaggcactgattcctgcagggcctagagtaatacaaaagccaa

SEQ ID NO: 187412 - DNA, 1132 bp, Homo Sapiens
ttggcgaacttcaccgacagcgatccccaggtgtttcatttggtttatcagtgtttaatttgatgaatgccatcatgggaagtggcatccttggcttagcttatgttatggctaataccggtgtctttggatttagcttcttgctgctgacagttgctctcctggcttcttactcagtccatcttctgcttagtatgtgtattcagacagctgtaacatcttatgaagatcttggactctttgcatttggattacctggaaagttggtggtggcaggcaccataataattcagaatattggagctatgtcatcttatcttttaattattaaaacagagcttcctgctgctattgcagaatttttgactggagactatagtagatattggtatcttgatggacaaacactactaataatcatatgtgttggcattgtgttccctcttgcacttcttcccaaaataggctttcttggctacacaagtagtttatcatttttctttatgatgttctttgctcttgtggtaataattaaaaaatggtccatcccttgtcctctgacattaaattatgtagagaaaggcttccagatttcaaatgttacagatgattgtaagccaaagctctttcatttctccaaagagagtgcttatgccttaccaaccatggctttttcatttctctgccatacctcaatattgcccatatactgtgaacttcaaagttggccttcaaagaaaagaatgcaaaatgttaccaatacagcaattgctttaagttttctcatttattttatatctgcactctttgggtacctcactttttatgacaaagtggagtcagaattactaaaaggttatagtaaatacttatcacatgatgttgttgtcatgactgtgaagttatgcatactatttgctgtgcttttgacagtccctctaatccacttccctgccagaaaagctgtaacaatgatgtttttctccaattttccattctcatggattcgccattttttgatcactctaccactcaatattatcatcgttttacttgcaatatatgttcctgacattagaaatgcattaggtgtaattggtgccagtacatcatcatgtttgatttttatatt

SEQ ID NO: 187413 - DNA, 1213 bp, Homo Sapiens
catttcacacatactaagttccttctgtaatcgcttattttcttctatcagcttgccgttcatccctcttaaactcttctactatcatctcattttgtttgatttggtttcttaatttccccacttctgctgaagcaccttcatattttactttcaagtctttcaactgatccttcagttcctcggttagtctgtgattccctgaggctgcttcacttgttaagtgttctttaagggcaagaaaatgggtctgcatttgtttaactttaccttctgactcatacatcctcttctgcacatcttttaatgcatcttctaattgctttatctgttcatctgaatcctccttgaccctttcacattctaatgctaaagctttgcattctgccactttgtgtgccagttcattttggagcttcagtcggtcttgttttgctgactcacagaaagttcgcattgcttctaactctttctttaaaatttcattttcagagtatgacgtttgactgggtaaagatagttccagaggtcttaacatagatctgctttgcatatgggctggtatacctggggaagtacactgtgagtctgccatatacatctgaccttgtttaagaagcatatcttcttttcggttactgaaatgacttcctgatcctaaatgatcactctcaaaatatttaaatctatttttcagagcctcaatagtccttaagctttcttcatgttgcttttctttagctgccaaaagggacttcagcttttctctctcgctttccagatcatcagcaaccataacttcctcattcagctgtaactgtaaaccattgactttatccaaaagtattctttgttcttgctgaatttttctcaacctctctttcaaatcttcattttcaatctccaaatcctgaatattttgatgctccctctgatgtgacttcacatttacttcatcttgcatgtgtgtcaaatttcgctgttgcaaagatggccctttcttccaaagttctctccctttgttggtattttccgatgcagtcttcaacaaggttagaatgtccagattgtcaccaattcttgcatagtaagaactatcatggccaagcgcatccagcaagcttatatcagcaccatttttaattaagacttctactgcatctctgcaaccatattcgcaacctagcatgagggcagttctgttttgttccaa

SEQ ID NO: 187414 - DNA, 1568 bp, Homo Sapiens
  misc_feature (551)..(560): n is a, c, g, or t
ttggcaagagcccctgcggccgggcgcgaaaatggcggcggcggcgacggccgggcgctcctgaagcagcagttatggagcttccctcagggccggggccggagcggctctttgactcgcaccggcttccgggtgactgcttcctactgctcgtgctgctgctctacgcgccagtcgggttctgcctcctcgtcctgcgcctctttctcgggatccacgtcttcctggtcagctgcgcgctgccagacagcgtccttcgcagattcgtagtgcggaccatgtgtgcggtgctagggctcgtggcccggcaggaggactccggactccgggatcacagtgtcagggtcctcatttccaaccatgtgacacctttcgaccacaacatagtcaatttgcttaccacctgtagcaccgtgagtgagagcgaggccgagagcgccacggggcggttccctggggcccagctgaaggcccccctgtccccactcgcgttccccatggaggatactgagccttacccctaaccccgatcctctacccaacatgtcagnnnnnnnnnncattttcctcaatatttttcttcttgctttctcttctcctggttcccagcctctactcaatagtccccccagctttgtgtgctggtctcggggcttcatggagatgaatgggcggggggagttggtggagtcactcaagagattctgtgcttccacgaggcttctctctactcctctgctgctattctctgaggaagaggccaccaatggccgggaggggctcctgcgcttcaggtgggtttagcacaggtatggggcgccagctgggtaggtggtcaagcttgtgggcccttgagtttttacaactttcttcggcccttagaccccatcatctccagttcatttcctttctgtccactttaagttctttctcctgaatcccttcattcttcaattatgtgcttgtagagtttgacagttgcctgttataaggcaggtgtgagctgctgactaggctggctggattcccatcctactttctccttcctcttctagttcctggccattttctatccaagatgtggtacaacctcttaccctgcaagttcagagacccctggtctctgtgacggtgtcagatgcctcctgggtctcagaactgctgtggtcacttttcgtccctttcacggtgtatcaagtaaggtggcttcgtcctgttcatcgccaactaggggaagcgaatgaggagtttgcactccgtgtacaacagctggtggccaaggaattgggccagacagggacacggctcactccagctgacaaagcagagcacatgaagcgacaaagacaccccagattgcgcccccagtcagcccagtcttctttccctccctcccctggtccttctcctgatgtgcaactggcaactctggctcagagagtcaaggaagttttgccccatgtgccattgggtgtcatccagagagacctggccaaagactggctgtgtagacttgactatcataatctgcttgaagggggccgtaactttcatgccctgaagacatc

SEQ ID NO: 187415 - DNA, 2542 bp, Homo Sapiens
actttgtacaaaaaagttggctcacctttaaggattaaacacagaactggagatgaaatcacgtaccagtgtagaaatggtttttatcctgcaacccggggaaatacagcaaaatgcacaagtactggctggatacctgctccgagatgtaccttgaaaccttgtgattatccagacattaaacatggaggtctatatcatgagaatatgcgtagaccatactttccagtagctgtaggaaaatattactcctattactgtgatgaacattttgagactccgtcaggaagttactgggatcacattcattgcacacaagatggatggtcgccagcagtaccatgcctcagaaaatgttattttccttatttggaaaatggatataatcaaaatcatggaagaaagtttgtacagggtaaatctatagacgttgcctgccatcctggctacgctcttccaaaagcgcagaccacagttacatgtatggagaatggctggtctcctactcccagatgcatccgtgtcaaaacatgttccaaatcaagtatagatattgagaatgggtttatttctgaatctcagtatacatatgccttaaaagaaaaagcaaaatatcaatgcaaactaggatatgtaacagcagatggtgaaacatcaggatcaattacatgtgggaaagatggatggtcagctcaacccacgtgcattaaatcttgtgatatcccagtatttatgaatgccagaactaaaaatgacttcacatggtttaagctgaatgacacattggactatgaatgccatgatggttatgaaagcaatactggaagcaccactggttccatagtgtgtggttacaatggttggtctgatttacccatatgttatgaaagagaatgcgaacttcctaaaatagatgtacacttagttcctgatcgcaagaaagaccagtataaagttggagaggtgttgaaattctcctgcaaaccaggatttacaatagttggacctaattccgttcagtgctaccactttggattgtctcctgacctcccaatatgtaaagagcaagtacaatcatgtggtccacctcctgaactcctcaatgggaatgttaaggaaaaaacgaaagaagaatatggacacagtgaagtggtggaatattattgcaatcctagatttctaatgaagggacctaataaaattcaatgtgttgatggagagtggacaactttaccagtgtgtattgtggaggagagtacctgtggagatatacctgaacttgaacatggctgggcccagctttcttcccctccttattactatggagattcagtggaattcaattgctcagaatcatttacaatgattggacacagatcaattacgtgtattcatggagtatggacccaacttccccagtgtgtggcaatagataaacttaagaagtgcaaatcatcaaatttaattatacttgaggaacatttaaaaaacaagaaggaattcgatcataattctaacataaggtacagatgtagaggaaaagaaggatggatacacacagtctgcataaatggaagatgggatccagaagtgaactgctcaatggcacaaatacaattatgcccacctccacctcagattcccaattctcacaatatgacaaccacactgaattatcgggatggagaaaaagtatctgttctttgccaagaaaattatctaattcaggaaggagaagaaattacatgcaaagatggaagatggcagtcaataccactctgtgttgaaaaaattccatgttcacaaccacctcagatagaacacggaaccattaattcatccaggtcttcacaagaaagttatgcacatgggactaaattgagttatacttgtgagggtggtttcaggatatctgaagaaaatgaaacaacatgctacatgggaaaatggagttctccacctcagtgtgaaggccttccttgtaaatctccacctgatatttctcatggtgttgtagctcacatgtcagacagttatcagtatggagaagaagttacgtacaaatgttttgaaggttttggaattgatgggcctgcaattgcaaaatgcttaggagaaaaatggtctcaccctccatcatgcataaaaacagattgtctcagtttacctagctttgaaaatgccatacccatgggagagaagaaggatgtgtataaggcgggtgagcaagtgacttacacttgtgcaacatattacaaaatggatggagccagtaatgtaacatgcattaatagcagatggacaggaaggccaacatgcagagacacctcctgtgtgaatccgcccacagtacaaaatgcttatatagtgtcgagacagatgagtaaatatccatctggtgagagagtacgttatcaatgtcgagctcttatgaaatgtttggggatgaagaagtgatgtgtttaaatggaaactggacggaatccatctcaatgcaagattctacaggaaaatgtgggctctctccacctattgacatggg

SEQ ID NO: 187416 - DNA, 1471 bp, Homo Sapiens
ttggcgaagaccttgtgcttgagggagctggcttaagagtatctgtacccttgatcgctcagggcaattcctatccaagtgagaccactgtgaagtatgtcttcaggctccatgaagcaacagattacccttggaggcctgctcttaccccttttgaatttcagaagctcctaaacaacttgacctctatcaagatacgtgggacatacagtgagagaagtgctggatatttggatgatgtcaccctggcaagtgctcgtcctgggcctggagtccctgcaacttgggtggagtcctgcacctgtcctgtgggatatggagggcagttttgtgagatgtgcctctcaggttacagaagagaaactcctaatcttggaccatacagtccatgtgtgctttgcgcctgcaatggacacagcgagacctgtgatcctgagacaggtgtttgtaactgcagagacaatacggctggcccgcactgtgagaagtgcagtgatgggtactatggagattcaactgcaggcacctcctccgattgccaaccctgtccgtgtcctggaggttcaagttgtgctgttgttcccaagacaaaggaggtggtgtgcaccaactgtcctactggcaccactggtaagagatgtgagctctgtgatgatggctactttggagaccccctgggtagaaacggccctgtgagactttgccgcctgtgccagtgcagtgacaacatcgatcccaatgcagttggaaattgcaatcgcttgacgggagaatgcctgaagtgcatctataacactgctggcttctattgtgaccggtgcaaagacggattttttggaaatcccctggctcccaatccagcagacaaatgcaaagcctgcaattgcaatctgtatgggaccatgaagcagcagagcagctgtaaccccgtgacggggcagtgtgaatgtttgcctcacgtgactggccaggactgtggtgcttgtgaccctggattctacaatctgcagagtgggcaaggctgtgagaggtgtgactgccatgccttgggctccaccaatgggcagtgtgacatccgcaccggccagtgtgagtgccagcccggcatcactggtcagcactgtgagcgctgtgaggtcaaccactttgggtttggacctgaaggctgcaaaccctgtgactgtcatcctgagggatctctttcacttcagtgcaaagatgatggtcgctgtgaatgcagagaaggctttgtgggaaatcgctgtgaccagtgtgaagaaaactatttctacaatcggtcttggcctggctgccaggaatgtccagcttgttaccggctggtaaaggataagttgctgatcatagagtgaagctccaggaattagagagtctcatagcaaaccttggaactggggatgagatggtgacagatcaagccttcgaggatagactaaaggaagcagagagggaa

SEQ ID NO: 187417 - DNA, 1379 bp, Homo Sapiens
ttggggagaccactgagacgagcgggagcgcggagcagcagcctctgctgccctgactttttaagaaatctcaatgaactatttgtagagaatcactgatccggcctgcaagcattttgcacggcaaaaatatcgatcagtgttaagtgaagatcacattttatatgcgatcttgacttttttgtcttacattatatttttatagattttgttataaacatggtgctgggaaaggtgaagagtttgacaataagctttgactgtcttaatgacagcaatgtccctgtgtattctagtggggataccgtctcaggaagggtaaatttagaagttactggggaaatcagagtaaaatctcttaaaattcatgcaagaggacatgcgaaagtacgctggactgaatctagaaacgccggctccaatactgcctatacacagaattacactgaagaagtagagtatttcaaccataaagacatcttaattgggcacgaaagagatgatgataattccgaagaaggcttccacactattcattcaggaaggcatgaatatgcattcagcttcgagcttccacagacaccactcgctacctcattcgaaggccgacatggcagtgtgcgctattgggtgaaagccgaattgcacaggccttggctactaccagtaaaattaaagaaggaatttacagtctttgagcatatagatatcaacactccttcattactgtcaccccaagcaggcacaaaagaaaagacactctgttgctggttctgtacctcaggcccaatatccttaagtgccaaaattgaaaggaagggctataccccaggtgaatcaattcagatatttgctgagattgagaactgctcttcccgaatggtggtgccaaaggcagccatttaccaaacacaggccttctatgccaaagggaaaatgaaggaagtaaaacagcttgtggctaacttgcgtggggaatccttatcatctggaaagacagagacgtggaatggcaagttgctgaaaattccaccagtttctccctctatcctcgactgtagtataatccgcgtggaatattcactaatggtatatgtggatattcctggagctatggatttatttcttaatttgccacttgtcatcggtaccattcctctacatccatttggtagcagaacctcaagtgtaagcagtcagtgtagcatgaatatgaactggctcagtttatcacttcctgaaagacctgaagcaccacccagctatgcagaagtggtaacagaggaacaaaggcggaacaatcttgcaccagtgagtgcttgtgatgactttgagagagcccttcaaggaccactgtttgcatatatccaggagtttcg

SEQ ID NO: 187418 - DNA, 2248 bp, Homo Sapiens
ttggctccggagtgacggaagttgtgctcttggtgaatggggttcttccttttttatttaccggtggctgtgcttccaatttaggaagaccccggcgacctgttcctcacccccgcttcgccctcacactttcgggatgtctgcgattcctgctgaggagagcgaccagctgctgatccgaccccttggagctgggcaagaagtaggaagatcatgtattattctcgagttcaaaggaagaaaaataatgctcgactgtgggatccaccctggcctagaaggaatggatgctcttccttatattgatttaattgacccagctgagattgatctcctattaattagtcatttccatttggatcactgtggagctctgccctggtttctacagaagacaagtttcaaaggaagaacatttatgactcatgccacaaaagctatttatagatggcttctttctgattatgtcaaagttagtaacatatcagcagacgacatgctgtataccgagacagatttggaagaaagcatggacaaaattgaaactatcaactttcatgaagttaaggaagttgcgggaatcaagttttggtgttaccatgcaggtcacgtcctaggagccgccatgttcatgattgagatcgcaggcgtgaagcttttgtacactggtgatttctcaagacaagaagataggcacttaatggcagctgaaattcctaatattaagcctgatattcttatcattgaatctacttatgggacccatatccatgagaaacgtgaagagcgagaagcaagattctgtaacactgtccacgatattgtaaacagaggaggcaggggtctcattcctgtctttgctcttggaagggctcaggagctgctcttgattctagatgagtactggcagaatcacccagaactacatgacattccaatatactatgcatcatctttggccaagaagtgtatggcagtgtaccagacatatgtaaatgccatgaatgacaaaatccgcaaacagatcaacatcaataatccctttgttttcaaacacattagtaacctcaagagcatggatcattttgatgacattggtcccagtgttgtaatggcctccccaggcatgatgcaaagtggcttatccagagaattatttgaaagctggtgtactgataagaggaatggtgtcattatagcgggatactgtgtagaagggacacttgccaagcacatcatgtctgaacctgaagaaatcactactatgtctggacagaagttaccactgaaaatgtctgttgattacatttctttctcagctcacacggattaccagcaaaccagtgaatttattcgtgctttgaaaccgcctcatgtgattttagtccatggagaacagaatgaaatggccagattgaaagcagcactgattcgagaatatgaagataacgatgaagttcacatagaggttcataatcctcggaatacagaagcagtgaccttaaacttcagaggagaaaaactagccaaggttatgggatttttagcagacaaaaaaccagaacaaggccagcgggtctcaggaatacttgttaaaagaaactttaattatcacatactttctccttgcgacctgtccaattatactgacctggccatgagcacggtgaagcagacccaagccattccatatactggtccctttaatttgctctgttaccagctgcagaaattgacaggtgatgtggaagaattagaaattcaagaaaaacctgctctgaaagtgttcaaaaatattactgtaatacaagaaccaggcatggtggtattagaatggctggcaaacccttctaatgatatgtatgcagatacagtaacaactgtgatattggaagttcagtcaaatcccaaaataagaaaaggtgcagtacagaaggtttctaaaaaattagaaatgcacgtttacagcaagaggttggagatcatgctccaggacatatttggagaagactgtgtaagtgtaaaggatgactctattcttagcgtcacagtggacgggaaaactgccaaccttaacttggagacacggactgtagaatgtgaagagggaagtgaagacgatgaatccctccgagaaatggtggagctggctgcacagagactgtacgaggccctgacgccagttcactgagactgtgcctgtatatgaactttgaaaaaatacttgactctacttttgttacctaaa

SEQ ID NO: 187419 - DNA, 1229 bp, Homo Sapiens
ttggccaaaatgaatctgtatcagaaatcggtgggaagatatttgagaaggctgtaaagagactctctagcattgatggtcttcaccaaattagctctatcgtcccctttctgacggattccagctgctgtggataccataaagcatcctactaccttgcagtcttttatgagactggattaaatgttcctcgggatcagctgcagggcatgttgtatagtttggttggaggccaggggagtgagaggctgtcttcaatgaatcttgggtataaacactaccagggtattgacaactaccccctggctgggaactgtcgtatgcctactacagcaacattgccaccaagacaccccttgaccagcacacactgcaaggagatcaggcatatgttgaaacaattagactaaaagatgatgaaatactcaaggtacaaaccaaagaagatggagatgtctttatgtggttgaagcatgaagctacccgaggcaatgcagcagctcagcaacgattggcccagatgctgttctgggggcagcaaggtgtggccaagaatcccgaagcagcaattgagtggtacgccaagggcgccctggagacggaggatcctgcgttaatctatgactatgccattgtgctattcaagggtcaaggagtaaaaaagaacagacggcttgccttagagctgatgaagaaagcagcttccaagggattgcatcaggcagtcaatggcctgggatggtattaccacaaattcaagaaaaattacgccaaagcagcaaagtactggttaaaagcagaagaaatggggaacccagatgcgtcatacaatcttggagtcctgcatttggatggcatcttccctggagttcctggaaggaatcaaactttagctggtgaatatttccataaggctgcgcaaggtggacacatggaagggaccttgtggtgttctctctactatatcacaggcaacctggagacattccctagagatcctgagaaagctgttgtatgggcaaaacatgtagctgagaaaaatggctacttgggccatgtcatccgcaaaggcctcaatgcctacctggaaggttcatggcatgaagctttgctgtattatgttttagcagcagaaactggaattgaagtgtcacagacaaatttagcacacatctgtgaggagaggccagacctggccaggagatacttgggtgttaactgtgtttgga

SEQ ID NO: 187420 - DNA, 868 bp, Homo Sapiens
ttggcggacgtcttgcctgtcgctggaggagaggtccgggctctccaggaaggtggctgcggcgacaaaatgaagatattcgtgggcaacgtcgacggggcggatacgactccggaggagctggcagccctctttgcgccctacggcacggtcatgagctgcgccgtcatgaaacagttcgccttcgtgcacatgcgcgagaacgcgggcgcgctgcgcgccatcgaagccctgcacggccacgagctgcggccggggcgcgcgctcgtggtggagatgtcgcgcccaaggcctcttaatacttggaagattttcgtgggcaatgtgtcggctgcatgcacgagccaggaactgcgcagcctcttcgagcgccgcggacgcgtcatcgagtgtgacgtggtgaaagactacgcgtttgttcacatggagaaggaagcagatgccaaagccgcaatcgcgcagctcaacggcaaagaagtgaagggcaagcgcatcaacgtggaactctccaccaagggtcagaagaaggggcctggcctggctgtccagtctggggacaagaccaagaaaccaggggctggggatacggccttccctggaactggtggcttctctgccaccttcgactaccagcaggcttttggcaacagcactggtggctttgatgggcaagcccgtcagcccacaccacccttctttggtcgcgaccgcagccctctgcgccgttcacctccccgagcctcttatgtggctcctctgacggcccagccagctacctaccgggcccagccgtccgtgtcactgggagctgcctacagggcccagccttctgcctctttgggtgttggctatcggactcagcccatga

SEQ ID NO: 187421 - DNA, 1531 bp, Homo Sapiens
  misc_feature (569)..(596): n is a, c, g, or t
  misc_feature (928)..(965): n is a, c, g, or t
  misc_feature (1266)..(1275): n is a, c, g, or t
tcttggccctaagtgctcacccattcctcatgtgaccttgacattccggggaactgggaaacgtgttccttaaaggcaacaacagtcctttctttcctctcacaacaaaggagcatgttctccgtgaatgcacttttcatttacggctctcaaaagaatatgtttctcaaggaatttttaatgcacttttcttgaatgtcagctcccagcaacacaagcatgggtgttgttagggcattcccgggctcgggggcggccgctccaacatgtggtaccagcggccatgtgccctcaaggggagggaggaagagcacaggagggtgggaggaggacaaacagccccttttatagggtcatgggggggctccactcagagtctggcaggaatctgccaggaaaacctcgttctagatagggagaagcagaactgtgtgtggggcaggccgccgtggtcctgagagacagggcccgggccttccactgctcgtttgcacacctcttcggcctatcccaaggaccttcctagcatataaaaacaggggctctcctgatttgtaaacagaacaacnnnnnnnnnnnnnnnnnnnnnnnnnnnntcctccatggcagcccacccaatgaataccccagatttttagggccattgcgggtctgtagctgggtgtagagagagttaagctttcatctcccatgtttacaacactttgtgataaaatagttgagtggagcaatcacatccccactgcgtgcgctcccccgggatgcctcacagctgctctgtgatcacacgtgcaaatgttattattattattttttgcctttggcatcaaagggcaagcctgttcattaaaaaatcttctatattcaacactccatagtgaaaagaatggatacttcaaaattcctaaagcaatcatgtgaaaattannnnnnnnnnnnnnnnnnnnnnnnnnnnnnnnnnnnnnatgggtccttgataattggccagccctgttttgcaaagagatggactatttctgagactagaatgttttctttgaaaatattgaagagtataagagatttaagacaataaaggctgtaatcttaccataaaggaagaaaaacatctatgtgtgtcaatattgttttgagataaagtcacaatgattgatatcaatgctttcaccattttatttcaacttaaaccagtgtcactcacatgaagcttattttataatacatattatccagtgatttcatcttttctgcacagtttaagtacannnnnnnnnnctgtaccttgaagtaagcagaatagttcaagctttcaaaactggtgatgctgtatgcgtgagggatgcttacataatagcaacgctttattgggcaacccgaatccatacatgtctggtgtggtttgatagctgggcttgaaaaagtgcttccagttgaaattagcattagaaatcggttagaacaccaacatttcagggtgagggaggactgctacaaaggaaaagaacatgtctacaaatgcactgaaagccaa

SEQ ID NO: 187422 - DNA, 899 bp, Homo Sapiens
  misc_feature (76)..(106): n is a, c, g, or t
  misc_feature (832)..(857): n is a, c, g, or t
tcaaactttaatgaccttcaggaaccataatcccaataatatatttaataggtaagatctcattcatcaatatacnnnnnnnnnnnnnnnnnnnnnnnnnnnnnnntaactttgattaagacatgtgcccttagtaagggcacttacaattagaaaggtttatcggtagcactttgaggtagcatattttgtaaagtcacagggctgctctgcagtttctcctggatacaaaggtagaggccatcagcttttgcccctggaagaggaaagtgaaattatctgtactcattgccagtgtcagcctgaacacactttctaccacccacccttggccatccctcctctacactttatgcgtcgggggtttagaacaacgtaaaggcattttgctgcttctttcctcttggtacggcagcatcccaggctgtggagccagttgcctcttgccgcatgtgattcaccagcaggagacgcatgcaccctgtggaaagggaagctgggcatcacagcatgctttttaattggctttaacatttcattaagtaagagtgactcattcctgcaaggctttaaagaggttcatttctgagtattctctccacgattctgaccctagaaagcgctccttttttcctccctgggtgtaatcattttggggtatcattaagctttctgggattttcctggcaggagggtgaacagaaaagctttaaaaaatccacacaaaacaataacaaaaaacccaagtgcaagagcaataccaagaacagacttcctttgtgcaagttaaaatgatacaagtttacggttcaggaaaacaacctacttcttnnnnnnnnnnnnnnnnnnnnnnnnnnggaaatattcagttgagctctgcattttaaacacaaatccaa

SEQ ID NO: 187423 - DNA, 959 bp, Homo Sapiens
  misc_feature (785)..(810): n is a, c, g, or t
ttggcttaagtgctgggggaaaaaaaatgtgaactaacttatttaatttatggcattttaaaatgacactgttaacccaacggaaccattttccagtttgatacagaatggggagaaaagaaagcgtttgaaattattgcttggataccagcttcatgcaccttctagttgtacaaaatgttaaagacgttgtttgtatttgtaaggctggtgtattcagagagcagatctcttattcctcactttccacccccgtattttgtaatgaccatgagcaatgtttttactttttgtataatggggtggggtggagtgggggcttctgagagtcagcctgaggtctttagaggaccagctattgtagcaccttggatacttgaagtttaatgctcagttgggtcgggtggcagttgacttggtggctggcatgttcagcagtgcctggggccctgtttctgggcagcctttgaggattttctatgatattgaatgacagttttaagtggcaactcaggcccagctcatgcccttttttgcctggacatgtgctatttttattcacttatatatcaattacttgtaagggttaaactttcaaacaggaagtatattgggacaaaagggctcttggggattagatatccctttaatctgtgaccattgggcaaaaaattttcctgcagcaaaagtctgaggctgttgggaccatttttgcagctttaatccttagcctcttttgactgtatatttgtgtttaaaatgcagagctcaactgaatatttccnnnnnnnnnnnnnnnnnnnnnnnnnnaagaagtaggttgttttcctgaaccgtaaacttgtatcattttaacttgcacaaaggaagtctgttcttggtattgctcttgcacttggggtttttgtaatgtttgtgtggatttttaaagcttttctgttcaccctcctgcaaggaaa

SEQ ID NO: 187424 - DNA, 1505 bp, Homo Sapiens
  misc_feature (115)..(147): n is a, c, g, or t
  misc_feature (150)..(193): n is a, c, g, or t
tgtacaaatatcagagggtgtaaagaaggacattttaacaatcgccttcaattttactccacttaattaccgaaaacttactggagaacatgttccaaatcttcagtatcttgtnnnnnnnnnnnnnnnnnnnnnnnnnnnnnnnnnatnnnnnnnnnnnnnnnnnnnnnnnnnnnnnnnnnnnnnnnnnnnnatttcattcatatatggtattgcattattttattttaaagcactggtgaggggacctcttggtgattcctggatgatcatacacagaggacttacaccatacaaaaatattgggcaccgcagtgccagagaagatgcttgaggttagattttaaggagtggggaattgtgaagcccacagatgcgcacgcaatgaccagcaggaaccggaagccctgggtcacccccactctgcctcatttctgcctccaggatgccactgcctctgcttccaggaaaggcaagggggagggtgcttatccgtgtctctggttccagcttcctgtctttgctccctcccctctcttagagactgtgccttcagcaggactcttaatatctgctgcaacttggagaacctccctgccctgaaatgtgaaccaagcacactttggttccttctccgggcggctctctctgagacccaaggctgcagtccctcagtgctggtggtatcgtgtggggatagcaatacttctctgcccttcattgtctcatctagacatcaagcagggaaaatccagggagattaaattcatggtgacaagtcctgggcagttctggtaaacggtccagttagggagggagtagaaactattgactcaaaagagtttctggctgatctgtggctttgcctccaccatccctaaccaacctctcatcacagctttgtgtgtgggctgagtgctggccttaaccctaggcgtggaagagaaaatgtgaggttgtttagatactcatcaggacctcacaggagctgagacttatcagccagaatgtgttcttcggacagtcgtacacatcttacagaaaaccctccttgtagagttggttgtggtatgtgtttgatgctataaagctcatttttaatgtgtacacctgctctagggacgattcgtttgaaagagagtaagatgcattaacagaaactatcctgggattaggtgaaaaatgtctagcaaaagaaacaaagtctttaatagagtggcctctttcgctcttcgattatgactgctgcagttttaccccagcagtcagctgtctttgtcaaccatacgtttttggagattgggtctagcacatgtcacccttgtccacgttgtttcacatctggttagggggcagattttaaaatgtagttttgtaatgttacatttaagcatgataaatgattagactaccagatgttactagtgctaactttgtattcttagacattaaaatgattgacataaactctttgtgccttgaaaatgaaacaaattataaaaatg

SEQ ID NO: 187425 - DNA, 798 bp, Homo Sapiens
  misc_feature (345)..(360): n is a, c, g, or t
acctagcattccaggcccccattacttcaaaagtgagcttgaaatgttttaagtgaactatggctgcggattttttactgttttatctcagggagcatacagtggagtgattaaagtttggactccttctccttgtgatgaagagaaacagtgagtccagctcttaggaatggcatcagttctcctgcaaacaaaatgctgggatgcagacttttggcacattgtggaagtaggagaactattaatcctgtaatggttttcatgccactgggtcaggaaggctgtcctacactaaaccttactgcatctgaaaacatgtttacatcccaacaagccaccttagcnnnnnnnnnnnnnnnngaaaggaaaatgagattccaagtcaatacctccacagagaggtaactcctaatattcctatgatctctgaaccctatttaaaccctcctaaaataaaaatatcattttggtttttctattatatttaactctaaaggcgggctctgactaatttgcttgggcttgatgctacagtattagcacaagctataagctccctaccaccatataagccttgctcttcggccttccatcattttgaaccctaaacctcatagatttagaacgaaacactgtataaaaacaaacagataaagggttaaaatattacaaataaatagctaaaataatcttccctcccccagtcactcctaagaaacagacaccaaacattacttaagtgtccaaaatgaccaaagtccttcatttgcccatgactcaaacggacaactaccccaa

SEQ ID NO: 187426 - DNA, 1336 bp, Homo Sapiens
ttggactggaatgaagagtcccggatgtagagcaaaggccggccacacggcccaggaaagagaatgtttgtactttgagggtctgggcccgagagatgaggtacggaaggtcgaaagttctggatgttgtaaccggtgatcacgtcggggtccatgatacggatgaaaggtggaccaggcgtgcagcaggtcctcctccttctcgtagctctgcaccttggcacccaggatgggggcacagggccgcagggtgagcgccaggcgtaggaagggctccggctccccccagcgcaggcccagcgagcagatctggatgacagggtcccgctcaggctcagggaagatgcctttgcggccggcgcactcgatatcgaagctgagcacgcgcaagggcgcaatgcgctgccatggcccttccggtgggtgactgaccacgtcagaccacagcacgtccgcctccagctggcactgcgtagccttctccttcagcctcagggcgtatttcccagctgggagctccagccagttgcagccgacgatgtccgtgtccaccatgaaccggatctcaaagtcgacgttggcctcgtagggcgcgaagctgggcgtgcccaggcctgccacacggatgccctgttccaggagacggcgggccggggccacgaggcgcggcagcgccacggtgatgcgcaggaacggggaggggccgtgcccgtggtacccaaacatgctctctcgggagcacagttccacagccagcacggccggcccagtcagctccctccccccgcgactgtcccggctgatggccaagttcagctcccgttgcaggtcacccatgtgctcgggcccgaaaccagggggcgctggggtgtagaagtagggagcgaagccgtggatgtggcagcagacagagaacccctcatcggtgaccccgaaggcgcggagcacaggcacggagccgcgggatggtgggggccccccaggcacaggctgcgctgggcccacataatggtcaatctccaactgttggaagatgaggggctctgtctgggggtccagcgctggtggtgtgggccgaagccagcgaggatctatggctgatggtgggacctgcccgtctgcaaccccctccaggactgactgcagctcctcctcctcctgctcctgcagcctgtgttctgcctccatctcctccatcagtgccaggtcctcctcgaattgggatggccgaggtgcatcatcatcatcccagaggcccccacgggcccgctttgggggcaccccgggccctgggcctggccgccgcttgccatccatcctgtacccagctgggcac

SEQ ID NO: 187427 - DNA, 1777 bp, Homo Sapiens
ttgggttgccttgcctagctaaaaggggaagaagaggatcagcccaaggaggaggaagaggaaaacaagacaaacagccagtgcagaggagaggaacgtgtgtccagtgtcccgatccctgcggagctagtagctgagagctctgtgccctgggcaccttgcagccctgcacctgcctgccacttccccaccgaggccatgggcccaggagttctgctgctcctgctggtggccacagcttggcatggtcagggaatcccagtgatagagcccagtgtccccgagctggtcgtgaagccaggagcaacggtgaccttgcgatgtgtgggcaatggcagcgtggaatgggatggccccccatcacctcactggaccctgtactctgatggctccagcagcatcctcagcaccaacaacgctaccttccaaaacacggggacctatcgctgcactgagcctggagaccccctgggaggcagcgccgccatccacctctatgtcaaagaccctgcccggccctggaacgtgctagcacaggaggtggtcgtgttcgaggaccaggacgcactactgccctgtctgctcacagacccggtgctggaagcaggcgtctcgctggtgcgtgtgcgtggccggcccctcatgcgccacaccaactactccttctcgccctggcatggcttcaccatccacagggccaagttcattcagagccaggactatcaatgcagtgccctgatgggtggcaggaaggtgatgtccatcagcatccggctgaaagtgcagaaagtcatcccagggcccccagccttgacactggtgcctgcagagctggtgcggattcgaggggaggctgcccagatcgtgtgctcagccagcagcgttgatgttaactttgatgtcttcctccaacacaacaacactaagctcgcaatccctcaacaatctgactttcataataaccgttaccaaaaagtcctgaccctcaacctcgatcaagtagatttccaacatgccggcaactactcctgcgtggccagcaacgtgcagggcaagcactccacctccatgttcttccgggtggtagagagtgcctacttgaacttgagctctgagcagaacctcatccaggaggtgaccgtgggggaggggctcaacctcaaagtcatggtggaggcctacccaggcctgcaaggttttaactggacctacctgggacccttttctgaccaccagcctgagcccaagcttgctaatgctaccaccaaggacacatacaggcacaccttcaccctctctctgccccgcctgaagccctctgaggctggccgctactccttcctggccagaaacccaggaggctggagagctctgacgtttgagctcacccttcgataccccccagaggtaagcgtcatatggacattcatcaacggctctggcacccttttgtgtgctgcctctgggtacccccagcccaacgtgacatggctgcagtgcagtggccacactgataggtgtgatgaggcccaagtgctgcaggtctgggatgacccataccctgaggtcctgagccaggagcccttccacaaggtgacggtgcagagcctgctgactgttgagaccttagagcacaaccaaacctacgagtgcagggcccacaacagcgtggggagtggctcctgggccttcatacccatctctgcaggagcccacacgcatcccccggatgagttcctcttcacaccagtggtggtcgcctgcatgtccatcatgg

SEQ ID NO: 187428 - DNA, 2250 bp, Homo Sapiens
  misc_feature (2129)..(2138): n is a, c, g, or t
ttgggaataagagtcactttcagaaaaatagatttgtctcatatatcaaaatcagaagtatgtttccattactaagtggaataagtaagaaattaaagctgatttagaccaattcttacttcataggtaccgaaaacaaatggaagaaatgcaaaaggctttcaataaaacaatcgtgaaacttcagaatacttcaagaatagcagaggagcaggatcagcggcaaactgaagccatccagttgctacaggcacagctgaccaacatgacacagcttgtttcaaatttatcagcaacagtagcagaattgaaacgggaggtttcagatcgacaaagctatcttgtcatatctttggttctttgtgttgtcttgggactgatgctttgtatgcagcgttgtcgaaatacttctcaatttgatggagattatatttcaaaacttcctaaaagtaatcagtatccaagccctaaaaggtgtttctcttcctatgatgatatgaatttgaaaagaagaacttcattcccactcatgagatccaagtctctacagttaactggcaaagaagtagacccaaatgatttgtacattgtagaacccctcaagttttctccagaaaagaagaagaagcgctgcaagtacaaaattgaaaaaattgagaccataaagcctgaagaaccattgcaccccatagccaatggcgacataaaaggaagaaagccctttacgaaccagagagatttttctaatatgggagaagtttatcactcttcttataaaggtcctccatctgaaggaagctcagaaacttcatcacagtcagaagagtcctatttttgtggcatttcagcttgcacaagtctgtgcaatggacagtctcaaaagacaaaaactgagaagagggctttaaaacgaagacgatctaaagtccaagaccaaggaaaattgataaaaactctaatacagactaagtcgggatcattgccgagcctgcatgacataatcaaaggaaacaaagagatcaccgtgggaacatttggtgttacagcagtctcgggacatatctaaaattaattgaacttttcatacagaagacttttttgttgttgttctttgaagaacagtctgtagtatttgaagggtttgggggagggagaaaatattaatgggaaaggcattcagaaattatggtttctacctttttaaaaagtagatgggattgtgtcaatcttggttaatgagctacagttttacaaagctgatcacttcctataaggacaatggtagacattttataaagatgttttttcacaagattaattactgggacaaaagtaatttggaagcccagttccttaggtgggataggaatgaaagcctaaacctcttcctttagctttgttcctatttcttgcaccttcccatatttatgtgccttttgtctatttataatgccactggaagaggagggataactttttctgttatttgatttcttttataactttgttaggtttttgaagctgcaaacactacaatgctttgagggggtctgtgcctgaagctcaggagtgtggatcagacagtctaaagatcctaaaaacttgccaactggatctttgtttagcaaactcactggaaatgaacacttaatggaatttttaagtctgttctgttaggtagatggtgatgctcttgttattttcacttattcagactggattacttcttacttagttactaactcaatgaggaaaaatccctacaggatctttttttgcaaacaactgatatatgcagacaaatttttgacaaattcaccttttaaacacacttaaccatttgtgaaggttttcgttagcttacattttaaacatacacaataaacactaatcctccaaactttcactgtttttattagtatgaatataaaatttgaaggtttggccaattagtacaagtctcatgatataatcactgcctgcatacatatgcacagatccagttagtgagtttgtcaagcttaatctaattgggttaagtctaaagagattattattccttgatgtttgctttgtattggctacaaatgtgcagaggtaatacatatgtgatgtcgatgtctctgtcnnnnnnnnnngtctttaaaaaataattggcagcaactgtatttgaataaaatgatttcttagtatgattgtacagtaatgaaatgaaagtggaacatgttttcttttttgaaagggagaaaa

SEQ ID NO: 187429 - DNA, 412 bp, Homo Sapiens
  misc_feature (165)..(173): n is a, c, g, or t
ttgtacaaaaaagttggcatacatatgccctttataacagttagtgagtttgtcaagcttaatctaattggttaagtctaaagagattattattccttgatgtttgctttgtattggctacaaatgtgcagaggtaatacatatgtgatgtcgatgtctctgtcnnnnnnnnngtctttaaaaaataattggcagcaactgtatttgaataaaatgatttcttagtatgattgtacagtaatgaatgaaagtggaacatgtttctttttgaaagggagagaattgaccatttattgttgtgatgtttaagttataacttattgagctcttttagtagtgataactgtttttaaacttgcctaacacctttcttgggtattgtttgtaatgtgacttatttaacgcctttttt

SEQ ID NO: 187430 - DNA, 1604 bp, Homo Sapiens
ttgggtttcgcctcagaaggctgcctcgctggtccgaattcggtggcgccacgtccgcccgtctccgccttctgcatcgcggcttcggcggcttccacctagacacctaacagtcgcggagccggccgcgtcgtgagggggtcggcacggggagtcgggcggtcttgtgcatcttggctacctgtgggtcgaagatgtcggacatcggagactggttcaggagcatcccggcgatcacgcgctattggttcgccgccaccgtcgccgtgcccttggtcggcaaactcggcctcatcagcccggcctacctcttcctctggcccgaagccttcctttatcgctttcagatttggaggccaatcactgccaccttttatttccctgtgggtccaggaactggatttctttatttggtcaatttatatttcttatatcagtattctacgcgacttgaaacaggagcttttgatgggaggccagcagactatttattcatgctcctctttaactggatttgcatcgtgattactggcttagcaatggatatgcagttgctgatgattcctctgatcatgtcagtactttatgtctgggcccagctgaacagagacatgattgtatcattttggtttggaacacgatttaaggcctgctatttaccctgggttatccttggattcaactatatcatcggaggctcggtaatcaatgagcttattggaaatctggttggacatctttattttttcctaatgttcagatacccaatggacttgggaggaagaaattttctatccacacctcagtttttgtaccgctggctgcccagtaggagaggaggagtatcaggatttggtgtgccccctgctagcatgaggcgagctgctgatcagaatggcggaggcgggagacacaactggggccagggctttcgacttggagaccagtgaaggggcggcctcgggcagccgctcctctcaagccacatttcctcccagtgctgggtgcgcttaacaactgcgttctggctaacactgttggacctgacccacactgaatgtagtctttcagtacgagacaaagtttcttaaatcccgaagaaaaatataagtgttccacaagtttcacgattctcattcaagtccttactgctgtgaagaacaaataccaactgtgcaaattgcaaaactgactacattttttggtgtcttctcttctcccctttccgtctgaataatgggttttagcgggtcctagtctgctggcattgagctggggctgggtcaccaaacccttcccaaaaggacccttatctctttcttgcacacatgcctctctcccacttttcccaacccccacatttgcaactagaagaggttgcccataaaattgctctgcccttgacaggttctgttatttattgacttttgccaaggcttggtcacaacaatcatattcacgtaattttccccctttggtggcagactgtagcaatagggggagaagacaagccgcggatgaagcgttttctcagctttgggaattgcttcgacctgacatccgttgtaaccgtttgcacttcttcagatattttttataaaaaa

SEQ ID NO: 187431 - DNA, 1889 bp, Homo Sapiens
ctttgtacaaaaaagttggcttaaatcccgaagaaaaatataagtgttccacaagtttcacgattctcattcaagtccttactgctgtgaagaacaaataccaactgtgcaaattgcaaaactgactacattttttggtgtcttctcttctcccctttccgtctgaataatgggttttagcgggtcctagtctgctggcattgagctggggctgggtcaccaaacccttcccaaaaggacccttatctctttcttgcacacatgcctctctcccacttttcccaacccccacatttgcaactagaagaggttgcccataaaattgctctgcccttgacaggttctgttatttattgacttttgccaaggcttggtcacaacaatcatattcacgtaattttccccctttggtggcagaactgtagcaatagggggagaagacaagcagcggatgaagcgttttctcagcttttggaattgcttcgacctgacatccgttgtaaccgtttgccacttcttcagatatttttataaaaaagtaccactgagtcagtgagggccacagattggtattaatgagatacgagggttgttgctgggtgtttgtttcctgagctaagtgatcaagactgtagtggagttgcagctaacatgggttaggtttaaaccatgggggatgcaacccctttgcgtttcatatgtaggcctactggctttgtgtagctggagtagttgggttgctttgtgttaggaggatccagatcatgttggctacagggagatgctctctttgagaggctcctgggcattgattccatttcaatctcattctggatatgtgttcattgagtaaaggaggagagaccctcatacgctatttaaatgtcacttttttgcctatcccccgttttttggtcatgtttcaattaattgtgaggaaggcgcagctcctctctgcacgtagatcattttttaaagctaatgtaagcacatctaagggaataacatgatttaaggttgaaatggctttagaatcatttgggtttgagggtgtgttattttgagtcatgaatgtacaagctctgtgaatcagaccagcttaaatacccacacctttttttcgtaggtgggcttttcctatcagagcttggctcataaccaaataaagttttttgaaggccatggcttttcacacagttattttattttatgacgttatctgaaagcagactgttaggagcagtattgagtggctgtcacactttgaggcaactaaaaaggcttcaaacgttttgatcagtttcttttcaggaaacattgtgctctaacagtatgactattctttcccccactcttaaacagtgtgatgtgtgttatcctaggaaatgagagttggcaaacaacttctcattttgaatagagtttgtgtgtacctctccatatttaatttatatgataaaataggtggggagagtctgaaccttaactgtcatgttttgttgttcatctgtggccacaataaagtttacttgtaaaattttagaggccattactccaattatgttgcacgtacactcattgtacaggcgtggagactcattgtatgtataagaatattctgacagtgagtgacccggagtctctggtgtaccctcttaccagtcagctgcctgcgagcagtcattttttcctaaaggtttacaagtatttagaactcttcagttcagggcaaaatgttcatgaagttattcctcttaaacatggttaggaagctgatgacgttattgattttgtctggattatgtttctggaataattttaccaaaacaagctatttgagttttgacttgacaaggcaaaacatgacagtggattctctttacaaatgg

SEQ ID NO: 187432 - DNA, 880 bp, Homo Sapiens
gcagcaataacaccagggaggtaaaccaaagcaagcagtgtaagtgctgttattggaaagatacgatttggaatggaaatagccatacgaaatgtattatctttcttttcataaacataagggtagattacgtctcttataacacaatagaaaaacaagaagacacacagcacagcagacaaatagaaggggaacctccacattggaaatagctgcagggggtacttttcaatttctttggctgccatgagtgatccttgatccattggagtaagtccaagattacgaacaatatccatcactctttgcttggctttgctgtcatttccacacacaaacacctgccgacttgcatccagtgctcctgactggagagcccaggctgagatggtgttaaatgcttttaccacgtgggctcctggcaccaaatgagcaaggtactctgcattagattctggatattgattgattttgaggttgttgctgatgtctaccaatatttttccattgagaacctcagttaattctgtgagaaaatcataatgctctctgtggattgctatgattatgatgccagacttcttggctgcttctgaatagctcaagacttctgcaccactgggcagtagggtggtcttttgggggtttcgacttccaaaaacaacagaataaccacactggagcattttcaatcccagtgatcttccaaaatcaccagttccaaaaatacatacagtctcttgcttttctgaagaattcatagtaagaggaagtgcatctatacaagttttctccataactgagggagaggcgcttccaaggaggaagcgtccagcgccaacggtgcgcgccgcgggccgggcgggtagagggaagccaa

SEQ ID NO: 187433 - DNA, 1180 bp, Homo Sapiens
ttggcggtcaggcccggcgcgggctgcgctctccagctgtggctatggccccagccccgagatgaggagggagagaactaggggcccgcaggcctgggaatttccgtcccccaccaagtccggatgctcactccaaagtctcagcaggcccctgagggagggagctgtcagccagggaaaaccgagaacaccatcaccatgacaaccagtcaccagcctcaggacagatacaaagctgtctggcttatcttcttcatgctgggtctgggaacgctgctcccgtggaattttttcatgacggccactcagtatttcacaaaccgcctggacatgtcccagaatgtgtccttggtcactgctgaactgagcaaggacgcccaggcgtcagccgcccctgcagcacccttgcctgagcggaactctctcagtgccatcttcaacaatgtcatgaccctatgtgccatgctgcccctgctgttattcacctacctcaactccttcctgcatcagaggatcccccagtccgtacggatcctgggcagcctggtggccatcctgctggtgtttctgatcactgccatcctggtgaaggtgcagctggatgctctgcccttctttgtcatcaccatgatcaagatcgtgctcattaattgtaagctgggccaggagggggcctatgggaggaggcatgcccaactacccccactcttttttcagacccagcgttagccagagagaagcccagcctccgcctggagggagtggatgctgtgagcagctgggattcagaggcctgagtgggcctggaccagggctgggagggggcagagagaagggcagctcagcctcaaggctcaccaagagtaaagtaggaatgacagggatctgtcttcttgggcacccccaaccaccagccctagctcccctgctcatgcccgccctgtttccccagcatttggtgccatcctgcagggcagcctgtttggtctggctggccttctgcctgccagctacacggcccccatcatgagtggccagggcctagcaacttctttgcctccgtggccatgatctgcgctattgccagtggctcggagctatcagaaagtgccttcggctactttatcacagcctgtgctgttatcattttgaccatcatctgttacctgggcctgccccc

SEQ ID NO: 187434 - DNA, 2152 bp, Homo Sapiens
ttggctcagagaaccttccagaagggtcacccaggagcaaggggtgagtctcctggaagacaaaaaggagagcagagaagatgaaacccttctagtcgtagagacggaggctgagaacacatctcaaaagcagcccacagagcaaccccaggccatggcagttggcaaggtctctgaagaaactgagaagacgctgcccagtgggacccccaggcctggccagttggagcggccgaccagcctggccctggacagcagggtcagcccaccggcccctggcagcgcccccgagacccccgaggacaagagcaaaccatgtggcagcccaagggttcaggaaaagcccgacagccccggaggctccacgcagatccagcggtacctggacgccgagcggctggccagcgccgtggaactgtggcggggcaagaagctggtggccgccgccagccctagtgccatgctcagccagtccctggacctcagcgacagacaccgggccacaggggccgccctcacgcccacagaggagaggcgcacctccttctccacgagcgacgtctccaagctcctcccgtccctggccaaggctcagcctgcagcagaaaccacggacggagagcgaagtgcgaaaaagccagctgtccagaagaagaagccaggcgacgcatcctccctcccagacgcagggctgtccccgggctctcaggtcgactctaaatccacgtttaagaggctttttctgcataaaaccaaggataaaaaatacagcctggagggcgcagaggagctggagaatgcagtgtccgggcacgtggtgctggaagccaccaccatgaagaagggcctggaagccccctccggacagcagcatcgccacgctgcaggtgagaagcgcaccaaggaaccaggaggcaaagggaagaagaaccgaaatgtcaagattgggaagatcacagtgtcagagaagtggcgggaatcggtgttccgccagatcaccaacgccaatgagctcaagtacctggacgagttcctgctcaacaagataaatgacctccgttcccagaagacgcccattgagagcttgtttatcgaagccaccgagaagttcaggagcaacatcaaaacgatgtactctgtcccgaacgggaagatccacgtgggctacaaggatctgatggagaactaccagatcgtcgtcagcaacctggccactgagcgtggccagaaggacaccaacctggtcctcaacctcttccagtcactgctagatgagttcacccgtggctacaccaagaacgacttcgagccagtgaagagcaaagctcagaagaagaagcggaagcaggagcgtgctgtccaggagcacaacgggcacgtgttcgccagctaccaggttagcatcccgcagtcgtgcgagcagtgcctctcctatatctggctcatggacaaggccctgctctgcagcgtgtgcaagatgacctgccacaagaagtgcgtgcacaagattcagagccactgctcctacacctacgggaggaagggcgagccaggcgttgagcctggccacttcggcgtgtgcgtagacagcctgaccagcgacaaggcctcggtgcccatcgtgctggagaagctcctggaacacgtggagatgcacggcctgtacaccgagggcctctaccgcaagtcgggtgctgccaaccgcactcgggagctccggcaggcgctgcagacagaccccgcagcagtcaagctggagaacttccccatccacgccatcacaggggtgctgaagcagtggctgcgggagctgcccgagcccctcatgaccttcgcacagtacggcgacttcctccgagccgtcgagctgccggagaagcaggagcagctggctgccatctatgccgtcctggagcaccttccagaagccaaccacaactccctggagagactcatcttccaccttgtcaaggtggccctgctcgaggatgtcaaccgcatgtcacctggggcgctggccattatcttcgcaccctgcctcctgcgctgccctgacaactcggacccgctgaccagcatgaagacgtcctcaagatcaccacgtgcgtggagatgctgatcaaggagcagatgaggaaatacaaagtgaaga

SEQ ID NO: 187435 - DNA, 920 bp, Homo Sapiens
ttggctcccgtcagactttcgttcggccctaggatttggtagccccgaagtgtgggctctctccagtaccagactcatttcagtaccagcctttgggaagtcgtgtgaatacctcggtctcttagccacagggatagaatggcggcctgacggagccgcggcgccggcgaagtcgctgaggcgcgagctggaacccccagaccagctcaaacgggagccaaaactcgaagcttggaagaattagcaggaaatggcggatgaggcgttgtttttgcttctccataacgagatggtgtctggagtgtacaagtccgcggagcagggggaggtggaaaacggacgatgtattactaagctggaaaacatggggtttcgagtgggacaaggattgatagaaaggtttacaaaagatactgcaaggttcaaggatgagttagatatcatgaagttcatttgtaaagatttttggactacggtattcaagaaacaaatcgacaatctaaggacaaatcatcagggcatctatgtacttcaggacaacaaatttcgcctgcttactcagatgtctgcaggaaaacagtatttagaacatgcatctaagtatttagcatttacgtgtggcttaatcagaggtggcttatcaaacttgggaataaaaagtattgtaacagctgaagtgtcttcaatgcctgcttgcaaatttcaggtgatgatacagaagctgtagaacatactgaaatgcaaggcttcaacagtgtaaagagataaattattcatgtaaaagtatttcaagtagtgatgatttaattacattgttcgatgtttgtacaggagtaagcatgtatttttatcaatttaacacagatcaaaggagatgaaagacattctgccatgacatacacttaaccaaaactattcaa

SEQ ID NO: 187436 - DNA, 1255 bp, Homo Sapiens
ttggcagggatgagcgggatgtaccacggggacctgacagagaagctcaaggtgctctacaagctacaccttcccccagctctgagcccagaggaagccgagtcagccctggaggcggcccattatttcacagaggacagctcctcagaagaagcactaccacaggaagagcaagaaggaagtggaagtgaggagagaggagaggagaaggggaccagctctccggactatcggcactaccttcgaatgtgggccaaggagaaagaggctcagaaggagacgattaaggatcttcccaagatgaaccaggagcagttcattgagctgtgcaagacgctttacaacatgttcagtgaagaccccatggagcaggacctgtaccacgccatcgccaccgtggccagcctcctgctccgcatcggagaggtggggaagaagttctcagcccgcacaggcaggaagcccagggactgtgccactgaggaggacgagccaccagcacccgaactgcatcaggacgcagccagggagcttcagcccccagctgcaggagacccccaagccaaagcaggcggagacacacacctcggaaaagccccacaggagagccaggtggtggtggaggggggcagcggcgagggacagggctcaccctcccagctgctgtctgacgatgaaaccaaagacgacatgtccatgtcctcctactcggtggtcagcacgggctccctgcaatgtgaagaccttgcagacgacacggtgctggtgggcggggaggcctgcagccccacagcgcgcatcggcggcaccgtcgacaccgactggtgcatctcctttgagcagatcctggcctccatcctgacggagtccgtgctggtgaacttctttgagaagagagtggacattggactcaagatcaaggaccaaaagaaagtggagagacagttcagcaccgccagtgaccatgagcagcctggagtttccggctgatgcctgcagctgtgaggcctggcccaaggtgtcatcagtggggctggcctcatctcctcctgcctttcctcccttatcagtttctctttaaaggtgtgcccctcctgctctcccaggagcagtgagttgtgagtggaaagaagctggtgcagacccagctgccttagacagattccctgggcctgcatctcctggcgccggctgcttctggggcccaggaagaggctgtggctcccaccttccttacacctggtgagagcccgcc

SEQ ID NO: 187437 - DNA, 2035 bp, Homo Sapiens
  misc_feature (400)..(414): n is a, c, g, or t
ttgggtttgtttttgttttttaatccttagaacacacattttaaacttaattgttctcctttgtggaaaaaatgcatatctaaattcaccaatttggacagtgcctatgttgatcctgtgtgaagggaaggaaccaaggaaggaattcagtttactgatgtacacttttttggctttcagaacacaattgaaatttaataatctgtaccatttcctaagttttactttcatgtgttttaaaagtcatatgcattttatacctttcaacagaggaatttaaatgtaaactgagtaattagcagctaattatacaatgcagatacagaaggcagtttgttatcacaatatggtagatgagaggggcagcttccaccttatttttgtatgtctttataggccnnnnnnnnnnnnnnntaaaggttgtgatatttatattcccaagctgagtttctccagtaagcaatggagggattaagagttgcatgcactaaattaattattcttaatgatgggctggctgcctccaaaatgactactgttctgtgtcacctatgttttgcttttcatagggaaaggcaggtatggtgaggtgtggaggggcagctggcaaggggaaaatgttgccgtgaagatcttctcctcccgtgatgagaagtcatggttcagggaaacggaattgtacaacactgtgatgctgaggcatgaaaatatcttaggtttcattgcttcagacatgacatcaagacactccagtacccagctgtggttaattacacattatcatgaaatgggatcgttgtacgactatcttcagcttactactctggatacagttagctgccttcgaatagtgctgtccatagctagtggtcttgcacatttgcacatagagatatttgggacccaagggaaaccagccattgcccatcgagatttaaagagcaaaaatattctggttaagaagaatggacagtgttgcatagcagatttgggcctggcagtcatgcattcccagagcaccaatcagcttgatgtggggaacaatccccgtgtgggcaccaagcgctacatggcccccgaagttctagatgaaaccatccaggtggattgtttcgattcttataaaagggtcgatatttgggcctttggacttgttttgtgggaagtggccaggcggatggtgagcaatggtatagtggaggattacaagccaccgttctacgatgtggttcccaatgacccaagttttgaagatatgaggaaggtagtctgtgtggatcaacaaaggccaaacatacccaacagatggttctcagacccgacattaacctctctggccaagctaatgaaagaatgctggtatcaaaatccatccgcaagactcacagcactgcgtatcaaaaagactttgaccaaaattgataattccctcgacaaattgaaaactgactgttgacattttcatagtgtcaagaaggaagatttgacgttgttgtcattgtccagctgggacctaatgctggcctgactggttgtcagaatggaatccatctgtctccctccccaaatggctgctttgacaaggcagacgtcgtacccagccatgtgttggggagacatcaaaaccaccctaacctcgctcgatgactgtgaactgggcatttcacgaactgttcacactgcagagactaatgttggacagacactgttgcaaaggtagggactggaggaacacagagaaatcctaaaagagatctgggcattaagtcagtggctttgcatagctttcacaagtctcctagacactccccacgggaaactcaaggaggtggtgaatttttaatcagcaatattgcctgtgcttctcttctttattgcactaggaattctttgcattccttacttgcactgttactcttaattttaaagacccaacttgccaaaatgttgggctgcgtactccactggtctgtctttggataataggaattcaatttggcaaaacaaaatgtaatgtcagactttgctgcatttt

SEQ ID NO: 187438 - DNA, 856 bp, Homo Sapiens
aactttgtacaaaaaagttggcccagccatgtgttggggagacatcaaaaccaccctaacctcgctcgatgactgtgaactgggcatttcacgaactgttcacactgcagagactaatgttggacagacactgttgcaaaggtagggactggaggaacacagagaaatcctaaaagagatctgggcattaagtcagtggctttgcatagctttcacaagtctcctagacactccccacgggaaactcaaggaggtggtgaatttttaatcagcaatattgcctgtgcttctcttctttattgcactaggaattctttgcattccttacttgcactgttactcttaattttaaagacccaacttgccaaaatgttggctgcgtactccactggtctgtctttggataataggaattcaatttggcaaaacaaaatgtaatgtcagactttgctgcattttacacatgtgctgatgtttacaatgatgccgaacattaggaattgtttatacacaactttgcaaattatttattacttgtgcacttagtagtttttacaaaactgctttgtgcatatgttaaagcttatttttatgtggtcttatgattttattacagaaatgtttttaacactatactctaaaatggacattttcttttattatcagttaaaatcacattttaagtgcttcacatttgtatgtgtgtagactgtaactttttttcagttcatatgcagaacgtatttagccattacccacgtgacaccaccgaatatattactgatttagaagcaaagatttcagtagaattttagtcctgaacgctacggggaaaatgcattttcttcaaaattat

SEQ ID NO: 187439 - DNA, 1053 bp, Homo Sapiens
ttggcgaatgtctcatttgccaccgagtcttaagctgtcagagctccctcaagatgcattatcgcacccacaccggggagagaccgttccagtgtaagatctgtggccgagccttttctaccaaaggtaacctgaagacacaccttggggttcaccgaaccaacacatccattaagacgcagcattcgtgccccatctgccagaagaagttcactaatgccgtgatgctgcagcaacatattcggatgcacatgggcggtcagattcccaacacgcccctgccagagaatccctgtgactttacgggttctgagccaatgaccgtgggtgagaacggcagcaccggcgctatctgccatgatgatgtcatcgaaagcatcgatgtagaggaagtcagctcccaggaggctcccagcagctcctccaaggtccccacgcctcttcccagcatccactcggcatcacccacgctagggtttgccatgatggcttccttagatgccccagggaaagtgggtcctgccccttttaacctgcagcgccagggcagcagagaaaacggttccgtggagagcgatggcttgaccaacgactcatcctcgctgatgggagaccaggagtatcagagccgaagcccagatatcctggaaaccacatccttccaggcactctccccggccaatagtcaagccgaaagcatcaagtcaaagtctcccgatgctgggagcaaagcagagagctccgagaacagccgcactgagatggaaggtcggagcagtctcccttccacgtttatccgagccccgccgacctatgtcaaggttgaagttcctggcacatttgtgggaccctcgacattgtccccagggatgacccctttgttagcagcccagccacgccgacaggccaagcaacatggctgcacacggtgtgggaagaacttctcgtctgctagcgctcttcagatccacgagcggactcacactggagagaagccttttgtgtgcaacatttgtgggcgagcttttaccaccaaaggcaacttaaaggttc

SEQ ID NO: 187440 - DNA, 2132 bp, Homo Sapiens
atccagatttttgaaaaatacaatgtctaatggttatgaagaccacatggccgaagactgcaggggtgacatcgggagaacgaatttgatcgtcaactacctccctcagaacatgacccaggatgagttacgaagcctgttcagcagcattggtgaagttgaatctgcaaaacttattcgggataaagtagcaggacacagcttgggctatggctttgtgaactacgtgaccgcgaaggatgcagagagagcgatcaacacgctgaacggcttgaggctccagtcaaaaaccattaaggtgtcgtatgctcgcccgagctcagaggtgatcaaagacgccaacttgtacatcagcgggctcccgcggaccatgacccagaaggacgtagaagacatgttctctcggtttgggcggatcatcaactcgcgggtcctcgtggatcagactacaggtttgtccagaggggttgcgtttatccggtttgacaaacggtcggaggcagaagaggcaattaccagtttcaatggtcataaacccccaggttcctctgagcccatcacagtgaagtttgcagccaaccccaaccagaacaaaaacgtggcactcctctcgcagctgtaccactcgccagcgcgacggttcggaggccccgttcaccaccaggcgcagagattcaggttctcccccatgggcgtcgatcacatgagcgggctctctggcgtcaacgtgccaggaaacgcctcctccggctggtgcattttcatctacaacctggggcaggatgccgacgaggggatcctctggcagatgtttgggccgtttggtggggtcaccaatgtgaaagtgatccgcgacttcaacaccaacaagtgcaaagggtttggctttgtgaccatgacaaactatgaagaagccgcgatggccatagccagcctgaacggctaccgcctgggggacaaaatcttacaggtttccttcaaaaccaacaagtcccacaaataactcgctcatgcttttttttgtacggaatagataattaagagtgaaggagttgaaacttttcttgttagtgtacaactcattttgcgccaattttcacaagtgtttgtctttgtctgaatgagaagtgagaaggtttttatactctgggatgcaaccgacatgttcaaatgtttgaaatcccacaatgttagaccaatcttaagtttcgtaagttatttcctttaagatatatattaaacagaaatctaagtagaactgcattgactaaccagtccctctggatggtggtgaacctgaagcatgctttaacctctaagactgtctaacacgcgtttcattcaatgtctccacagactgggtagcaaaaaaatcaccttttagttttagtttttaatctaaagatgttagacagatgctgagtgtgcgttttctcaaccgcttcaacattgtaagcgatgtatgctttggttgacaggaagttccttttccaggcaggtcccgttgccacctcctgctcactcagtcccgggctctgccgagtggtcctgggaatggcggcgggcccgtccagcgtgggccaccactggggccgggggccacgggccgcatgctgggcgggccctccagagaaggacacaaacgtgtttcgtaagcccaggcaccaatgggaatggaccaaagagtttcagggaaactccagtatattccagagtcagatctaagctccaggcacgcctgaagatgtgttgctactctgacatcccgagtttctgtccacacattgcatgcacagcgccccacacattggatactgttgttcacgataatttctcccgttttccagagcatttaacatagcttggaggcgtaaaatggctctgtattttaataacacagaaacatttgagcattgtatttctcgcatcccttctcgtgagcgcttagacctttttctattttagtcggattttgttttggaattttgcttttgtatgaacactcagcagaaaagtacttacttcttgccagttatctattaaccaaaacctttgatttgtagttttaaagattaaccctcaaagttctcttcataactgccttgacattttgggttgttctgttctgttaa

SEQ ID NO: 187441 - DNA, 1899 bp, Homo Sapiens
ttggcactcggcccgctcggcgcgccccttcccagccgcccttccgtaccggctctcgggctcttccggtctccggccgccccttacctgcaggctcttctcccgccgcggcccggcgctctccgagtcgcccctgcggactggtctcgcacagtgcctgggcaccgggcgccagacagacactggccatgacgagcggcgcaaccaggtaccggctgagctgctcgctccggggccacgagctggacgtacggggcctggtgtgctgcgcctatccgccgggagcctttgtgtccgtgtcccgagaccgcaccacccgcctctgggccccagacagtccaaacaggagctttacagaaatgcactgtatgagtggccattccaattttgtatcttgtgtatgcatcataccctcaagtgacatctaccctcatggcctaattgccaccggtggaaatgaccacaatatatgcattttctcactggacagtccaatgccactttatattctaaaaggccacaaaaatactgtttgtagtctatcatctggaaaatttgggacattacttagtggttcatgggacaccactgctaaagtctggctgaatgacaagtgcatgatgaccttgcagggtcatacagctgcagtgtgggcggtaaagatcttacctgaacagggcttaatgttgactggatcagcagacaagactgttaaactgtggaaggctggaagatgtgagaggactttttcagggcatgaagactgtgtaagaggtttggcaattttgagtgaaacagaatttctttcctgtgcaaatgatgctagtattagaaggtggcaaatcactggcgagtgtcttgaagtatattatggacatacaaattatatttatagcatatccgtttttccaaattgtagagactttgtgacaacagcagaggacagatctctgagaatctggaaacatggggaatgtgctcaaactatccgacttccagctcagtctatatggtgctgctgtgtgctcgacaatggtgacattgtggttggtgcgagtgatggcattattagagtgtttacagaatcagaagatcgaacagcaagtgctgaagaaatcaaggcttttgaaaaagaactgtctcacgcaaccattgattctaaaactggcgatttaggggacatcaatgctgagcagcttcctgggagggaacatcttaatgaacctggtactagagaaggacagactcgtctaatcagagatggggagaaagtcgaagcctatcagtggagtgttagtgaagggaggtggataaaaattggtgatgttgttggctcatctggtgctaatcagcaaacatctggaaaagttttatatgaagggaaagaatttgattatgttttctcaattgatgtcaatgaaggtggaccatcatataaattgccatataataccagtgatgacccttggttaactgcatacaacttcttacagaagaatgatttgaatcctatgtttctggatcaagtagctaaatttattattgataacacaaaaggtcaaatgttgggacttgggaatcccagcttttcagatccatttacaggtggtggtcggtatgttccgggctcttcgggatcttctaacacactacccacagcagatccttttacaggtgctggtcgttatgtaccaggttctgcaagtatgggaactaccatggccggagttgatccatttacaggggaatagtgcctaccgatcagctgcatctaaaacaatgaatatttatttccctaaaaaagaggctgtcacattttgaccaagcaaaccctacaccaaatattaggtcactgaaggaacttaatggaactggcccctgaaagaaaaagttaactga

SEQ ID NO: 187442 - DNA, 1793 bp, Homo Sapiens
gtacaaaaaagttggctcgtctaatcagccgatggaagagaaagtcgaagcctatcagtggagtgttagtgaagggaggtggataaaaattggtgatgttgttggctcatctggtgctaatcagcaaacatctggaaaagttttatatgaagggaaagaatttgattatgttttctcaattgatgtcaatgaaggtggaccatcatataaattgccatataataccagtgatgacccttggttaactgcatacaacttcttacagaagaatgatttgaatcctatgtttctggatcaagtagctaaatttattattgataacacaaaaggtcaaatgttgggacttgggaatcccagcttttcagatccatttacaggtggtggtcggtatgttccgggctcttcgggatcttctaacacactacccacagcagatccttttacaggtgctggtcgttatgtaccaggttctgcaagtatgggaactaccatggccggagttgatccatttacagggaatagtgcctaccgatcagctgcatctaaaacaatgaatatttatttccctaaaaaagaggctgtcacatttgaccaagcaaaccctacacaaatattaggtaaactgaaggaacttaatggaactgcacctgaagagaagaagttaactgaggatgacttgatacttcttgagaagatactgtctctaatatgtaatagttcttcagaaaaacccacagtccagcaacttcagattttgtggaaagctattaactgtcctgaagatattgtctttcctgcacttgacattcttcggttgtcaattaaacaccccagtgtgaatgagaacttctgcaatgaaaaggaaggggctcagttcagcagtcatcttatcaatcttctgaaccctaaaggaaagccagcaaaccagctgcttgctctcaggactttttgcaattgttttgttggccaggcaggacaaaaactcatgatgtcccagagggaatcactgatgtcccatgcaatagaactgaaatcagggagcaataagaacattcacattgctctggctacattggccctgaactattctgtttgttttcataaagaccataacattgaagggaaagcccaatgtttgtcactaattagcacaatcttggaagtagtacaagacctagaagccacttttagacttcttgtggctcttggaacacttatcagtgatgattcaaatgctgtacaattagccaagtctttaggtgttgattctcaaataaaaaaagtattcctcagtatcagaaccagctaaagtaagtgaatgctgtagatttatcctaaatttgctgtagcagtggggaagagggacggatatttttaattgattagtgtttttttcctcacatttgacatgactgataacagataattaaaaaaagagaatacggtggattaagtaaaattttacatcttgtaaagtggtggggaggggaaacagaaataaaatttttgcactgctgaactgtgagattttcctgtgtaatttgggtagattttcaagagtgtgaacacaaatttaaaataagctataatcagcaacaacacaatgacaatgacatcttccccttaccttagccactaagaagacaagggctgttactcatataacttgcttttattacttaatgtacaccaaactgttgttgtcaattatcttttatttaacttctccaccttcattgctagatccttcgaacagcactgatacatttcaaggtcttgttttagataactac

SEQ ID NO: 187443 - DNA, 1644 bp, Homo Sapiens
ttggccctcggccgcttctcccagctgtaccctgagagagcccttgctggccacccctgagaacatgcctacctgctgggtgccgtctgtgcgttccagtgaggccaaggggtcctggccgggttggggagccctcccataaccctgtcttgggctccaacccctcaacctctatctcatagatgtgaatctgggggccaggctggaggcagggatggggacagggtgggtggcttagactcttgatttttactgtaggttcatttctgaaagtagcttgtcgggcttgggtgaggaagggggcacaggagccgtgacccctgaggaggcacagcgccttctgccacctctgggcacggcctcaaggtagtgaggctaggaggttttttctgaccaatagctgagttcttgggagaggagcagctgtgcctgtgtgattccttagtgtcgagtgggctctgggctggggtcggccctgggcaggcttctcctgcaccttttgtctgctgggctgagggacacgagggcaaccctgtgacaatggcaggtagtgtgcatccgtgaatagcccagtgcgggggttgctcatggagcatcctgaggccgtgcagcagggagccccatgcccctgggtcgtgagcttgcctgcgtatggggtggtgtcatggagcctcatgcccctgggtcgtgagctcgcctgagtatggggtggtgtcatggagccgcatacccctgggttgtgagctcgcctgcatatgcagggtctgtcatggaacatcccaagtctgtgcagcagggagccccatgcccctgggacatgaacccacctgcgtggaatgctgtttgtgaggtgtctacagggtttatagtagtcttgtggacacagaaatgcacaggggacacttacggacacagaaatgcacaggggaggccgagcataaccaggggtgaggggcaggcagcagttgtagttactgccgcggggcactgctatgtgcagggacagccagcacccagcccatcaccactccctgggctggctggcaggtatggcaccctgggagcccggcatatacccagggcacccctacggctgccgccagtctcatgcccaggtgggtgctctgggctggagcgagggccaggttttgggccgaggcttccccaggcaatcctgtgagctcccttctagcctctgacccagtctggtctggcttgcatggatgtagggcttggggtgggaagttcaggtcctggctttgcctttgcctgatgtggatgagcagctcacatgctcagggccacctgagactgtcactgctctcccctggctactgggaggagtcactgagagcttccttacccctgctgccttgcccagggcacaccctatacctccttatctgctcttcccctccctgccgccttctgggcaggtagcagtccctggcctctccccctggctgatcactctccctcacgcagtggagatctgcgtctggacaccctcagatcctgtcattgcctgcccagagtccttcaggggcacccctctgccttggtgtgcaatccagggctctctctcaggtgccgcaccctctggggtcttctgtccagctccgttgccacatgtgctgtcactga

SEQ ID NO: 187444 - DNA, 1644 bp, Homo Sapiens
  misc_feature (209)..(254): n is a, c, g, or t
tctggccgtgggacacgccgttggaaggggtggggatatgagactgtgtcagcccgtgtcatgtgggatgccttcatgtgtgcagctgggtgtgtctgtgtgagcacggcagagtggggggctcacagcacacaggcgtgtgctgcagaaaagagtccggcggtccatcatcgaggtcacatctgcatcaccttgtcactatcttgttnnnnnnnnnnnnnnnnnnnnnnnnnnnnnnnnnnnnnnnnnnnnnnccaagcggccacggtccttggaaatgtcaccaaactctaagttgccttcaatgtccaagacctgcaggtgcttcagcctccggaaggcactgtccaccacggagcccacagccagcttgttaaacctgagaaagatccccttgaggttgggcgtggagtcgaaggcattggcgggcaccgcactaatcttgttgttctgcaggtacaggtactcaagtgactcggggagcccctcggggatctctgtgagctgattcccggcgatgtccagcagctgcagatgggcgaggtccacccaggcacgggggcccagggctcggctgcgcagtcggttgctggtgaggtacagctcacgcagctgagccatgcccgccagcgcccctcgtgccaaggcagccagctcattgcgcttgaccttcagcacatggacatttcgaggcagcccaggtggcagcgtgtgcagccggttgcccgacaggtccagcgagcgcagcaggcgcagcttgcggaaggcgtcgcggtgcacctgtgggctggtgatgcggttgtagctgaggttgagctcctccaggaagtaggtggtggcaaagtcttcgcggccaatgcctgtgatctggttgtgcaggatcatgagggtgcgcacgcggcgaggcaggccactgggcacgcgctccagcgcgttgttgtacaggtgcaccgtgtgcaaccgcttgaggccctggaaggccagtgggtggatgccctgctcccgcagctggttgctgtgcagcagcaggtactccaggctgcggatgggggtcagcacattcgcgtccacgctccggatggcgttcttctccaagtgcagcagcaccaggctgcgcggcagcccagctgggacccgagacaggttgttgctggacagatccaggtactccaggctggagagcttccagaaggtctcgttgtccaggccctcgtcagtcaggtagttgttctgcaggtatagctcgcgcaggctgctcagctcgctgaaggcccccggggggatctccaccagcttgttgttcttgaggtgcagcttgtacagggcaggcggcaggtgcttgggcacgtggcgcaggaagttgctggacaggatgaggacctcgacgttgctggagccgttgaacatgttgtccggcagcccggcgtctgccagcttgttgttgtgcaggtacacagacctcaagtttggcttctggccaaaggtgagcccatagatcttggtgagatagttggcagcaaagtccacactgatcagggcgtttggcaggaagcggggtgccaaggtcagcttgttattggccaagtacaggtaattgaggttggtcagatgctcaaacgccttctctgggagccctcgggccaa

SEQ ID NO: 187445 - DNA, 938 bp, Homo Sapiens
tgaatatatttagtgtactagtataggagaggtcctaagatgtttgtaactggccagaaaacccagaaaagtccagggtatcatctggatggaacatctgaaggaaactaagtgactagagagtaggaaaagctggaaaggttgaagcacatggaactagtgaaaggacaaggagaaacatgtgtttgcctggagggacaggtacttagacgactgaactggcctctgtgttctaatggttgagcctcagagtacatatttggggtgcggtttggtttgctttgtagagttggtttgttctgcacatgtgtatgttctgccatttccaggacgaaaaggaggttgtgctaaagggaaaggaggatcgatgcacatgtatgccaagaacttctacgggggcaatggcatcgtgggagcgcaggtgcccctgggcgctgggattgctctagcctgtaagtataatggaaaagatgaggtctgcctgactttatatggcgatggtgctgctaaccagggccagatattcgaagcttacaacatggcagctttgtggaaattaccttgtattttcatctgtgagaataatcgctatggaatgggaacgtctgttgagagagcggcagccagcactgattactacaagagaggcgatttcattcctgggctgagagtggatggaatggatatcctgtgcgtccgagaggcaacaaggtttgctgctgcctattgtagatctgggaaggggcccatcctgatggagctgcagacttaccgttaccacggacacagtatgagtgaccctggagtcagttaccgtacacgagaataatttctggaagtaagaagtaagagtgaccccattatgcttctcaaggacaggatggtgaacagcaatcttgccagtgtggaagaactaaaggaaattgatttggaagtga

SEQ ID NO: 187446 - DNA, 1254 bp, Homo Sapiens
ttggcaaggcttgccagctgaatatcttctcagtgccggaacaaaaacaaccaggtttttcaacagagatcctaatttggggtacccactgtggaggcttaagacacctgaagaacatgaactggagactggaataaaatcaaaagaagctcggaagtacatttttaattgcttagatgacatggctcaggtgaatatgtctacagacctggagggaacagacatgttggcagagaaggcagaccgaagagaatacattgatctgttaaagaaaatgctcacaattgatgcagataagagaattacccctctaaaaactcttaaccatcagtttgtgacaatgactcaccttttggattttccacatagcaatcatgttaagtcttgttttcagaacatggagatctgcaagcggagggttcacatgtatgatacagtgagtcagatcaagagtcccttcactacacatgttgccccaaatacaagcacaaatctaaccatgagcttcagcaatcagctcaatacagtgcacaatcaggccagtgttctagcttccagttctactgcagcagctgctactctttctctggctaattcagatgtctcactactaaactaccagtcagctttgtacccatcatctgctgcaccagttcctggagttgcccagcagggtgtttccttgcagcctggaaccacccagatttgcactcagacagatccattccaacagacatttatagtatgtccacctgcgtttcaaactggactacaagcaacaacaaagcattctggattccctgtgaggatggataatgctgtaccgattgtaccccaggcaccagctgctcagccactacagattcagtcaggagttctcacgcagggaagctgtacaccactaatggtagcaactctccaccctcaagtagccaccatcacaccgcagtatgcggtgccctttactctgagctgcgcagccggccggccggcgctggttgaacagactgccgctgtactgcaggcgtggcctggagggactcagcaaattctcctgccttcaacttggcaacagttgcctggggtagctctacacaactctgtccagcccacagcaatgattccagacgccatggggagtggacagcagctagctgactggaggaatgcccactctcatggcaaccagtacagcactatcatgcagcagccatccttgctgactaaccatgtgacattgaccactgctcagcc

SEQ ID NO: 187447 - DNA, 850 bp, Homo Sapiens
ttggctggctcatggcggccttggccttcaccaagagcatctctctcctcttccacagcatcaactactacttcatcaacagccagggccaccccatcgaaggccttgccgtcatgtactacatcgcacacctgctgaagggcgccctcctcttcatcaccatcgccctgattggctcaggctgggccttcatcaagtacgtcctgtcggataaggagaagaaggtctttgggatcgtgatccccatgcaggtcctggccaacgtggcctacatcatcatcgagtcccgcgaggaaggcgccagcgactacgtgctgtggaaggagattttgttcctggtggacctcatctgctgtggtgccatcctgttccccgtagtctggtccatccggcatctccaggatgcgtctggcacagacgggaaggtggcagtgaacctggccaagctgaagctgttccggcattactatgtcatggtcatctgctacgtctacttcacccgcatcatcgccatcctgctgcaggtggctgtgccctttcagtggcagtggctgtaccagctcttggtggagggctccaccctggccttcttcgtgctcacgggctacaagttccagcccacagggaacaacccgtacctgcagctgccccaggaggacgaggaggatgttcagatggagcaagtaatgacggactctgggttccgggaaggcctctccaaagtcaacaaaacagccagcgggcgggaactgttatgatcacctccacatctcagaccaaagggtcgtcctcccccagcatttctcactcctgcccttcttccacagcgtatgtggggaggtggaggggg

SEQ ID NO: 187448 - DNA, 1226 bp, Homo Sapiens
ttggcgcttcctggagttcacgactctgagtgctgcggagctccctgggtcctcagcagtgaggctggcctccctgcgtgacctgcccgcccagctcctggagctgtaccagcagggcttctcgctggcggccctgcaccccttcgtgcagcccacccatgagcgggagaagacgcccctggagcacatctttagagccatcctgatcaagaaaaccgacagatctcagaaaactgatcttcacaatgaaggctacatcttggaattagattgctgttcctccttagaccacccgacagaccagaaactcatcccagaattcattaagaagatccaggaggctgcaagccagggcctgaaattcgttggtgttatacctcagtaccattcctctgtgaactcggcaggcagcagtgctccggtgtctactgccaacagcaccgaggatgccagagatgcaaaaaacgcacgtggggatcacgcgtcactggagaatgagaaaccggggactggggatgtgtgcagtgctccggctgggagaaaccaaagcccagagcccagctcaggccccagaggggaggtgcccctcgccaagcagcccagctcaccctccggagagggagatggtggaaaactttcaccacagggggtgagcaagacactggatggaccggagagcaaccccttggaggtgcatgaagagccactctcagggaaaatggagatcttcacccttttcaacaaaccgaagagccatcagaagtgccggcaatactaccctgtcaccattcctctccatgtctccaagaatggccagacagtgagcggtttggacgccaactggttagagcacatgagcgaccacttccggaaaggaggcatgctggtgaacgcagtcttctaccttggaatagtgaatgattccttacatggcttgacagatggagtattcatctttgaagctgtttccacagaagatagcaaaaccatacagggctatgatgctattgtggttgaacaatggacagtcctggaaggtgtcgaagtgcagacagactacgtgcccctgctgaactcgctggcggcctatggctggcagctcacctgtgtgctaccaactcccgtcgtcaagactaccagcgaggggagtgtatccaccaagcagattgtctttcttcagagaccttgtctacctcagaaaatcaagaagaaagaatcgaagtttc

SEQ ID NO: 187449 - DNA, 2091 bp, Homo Sapiens
ttgggtcggatcgtgctcgtggccagggcgcagtcaggtgtcgcgtggtcctgatctaggaagagactgcggccttatcaccgtctcggtgtctgctttcaccttcaactgcccccctcctcacctggaccgctcaccctcctcctcccctctcaccccgccatccccaccagtccccacctgtctctgtagactgcaagactcatcaagtgacttgctgagcaaaccctgccgagaagagattttcttcaatcacatctgaataaatcacttgaagaaagcttatagcttcattgcaccatgtgtggcatttgggcgctgtttggcagtgatgattgcctttctgttcagtgtctgagtgctatgaagattgcacacagaggtccagatgcattccgttttgagaatgtcaatggatacaccaactgctgctttggatttcaccggttggcggtagttgacccgctgtttggaatgcagccaattcgagtgaagaaatatccgtatttgtggctctgttacaatggtgaaatctacaaccataagaagatgcaacagcattttgaatttgaataccagaccaaagtggatggtgagataatccttcatctttatgacaaaggaggaattgagcaaacaatttgtatgttggatggtgtgtttgcatttgttttactggatactgccaataagaaagtgttcctgggtagagatacatatggagtcagacctttgtttaaagcaatgacagaagatggatttttggctgtatgttcagaagctaaaggtcttgttacattgaagcactccgcgactccctttttaaaagtggagccttttcttcctggacactatgaagttttggatttaaagccaaatggcaaagttgcatccgtggaaatggttaaatatcatcactgtcgggatgtacccctgcacgccctctatgacaatgtggagaaactctttccaggttttgagatagaaactgtgaagaacaacctcaggatcctttttaataatgctgtaaagaaacgtttgatgacagacagaaggattggctgccttttatcagggggcttggactccagcttggttgctgccactctgttgaagcagctgaaagaagcccaagtacagtatcctctccagacatttgcaattggcatggaagacagccccgatttactggctgctagaaaggtggcagatcatattggaagtgaacattatgaagtcctttttaactctgaggaaggcattcaggctctggatgaagtcatattttccttggaaacttatgacattacaacagttcgtgcttcagtaggtatgtatttaatttccaagtatattcggaagaacacagatagcgtggtgatcttctctggagaaggatcagatgaacttacgcacggttacatatattttcacaaagctccttctcctgaaaaagccgaggaggagagtgagaggcttctgagggaactctatttgtttgatgttctccgcgcagatcgaactactgctgcccatggtcttgaactgagagtcccatttctagatcatcgattttcttcctattacttgtctctgccaccagaaatgagaattccaaagaatgggatagaaaaacatctcctgagagagacgtttgaggattccaatctgatacccaaagagattctctggcgaccaaaagaagccttcagtgatggaataacttcagttaagaattcctggtttaagattttacaggaatacgttgaacatcaggttgatgatgcaatgatggcaaatgcagcccagaaatttcccttcaatactcctaaaaccaaagaaggatattactaccgtcaagtctttgaacgccattacccaggccgggctgactggctgagccattactggatgcccaagtggatcaatgccactgacccttctgcccgcacgctgacccactacaagtcagctgtcaaagcttaggtggtctttatgctgtaatgtgaaagcaaatatttcttcgtgttggatggggactgtgggtagataggggaacaatgagagtcaactcacgctaacttgggtgtg

SEQ ID NO: 187450 - DNA, 1429 bp, Homo Sapiens
ttgttggcccacgagccgaggcctcctgcagtgttccgcacagcaaaccgcacgctatggctgacagccgggatcccgccagcgaccagatgcagcactggaaggagcagcgggccgcgcagaaagctgatgtcctgaccactggagctggtaacccagtaggagacaaacttaatgttattacagtagggccccgtgggccccttcttgttcaggatgtggttttcactgatgaaatggctcattttgaccgagagagaattcctgagagagttgtgcatgctaaaggagcaggggcctttggctactttgaggtcacacatgacattaccaaatactccaaggcaaaggtatttgagcatattggaaagaagactcccatcgcagttcggttctccactgttgctggagaatcgggttcagctgacacagttcgggaccctcgtgggtttgcagtgaaattttacacagaagatggtaactgggatctcgttggaaataacacccccattttcttcatcagggatcccatattgtttccatcttttatccacagccaaaagagaaatcctcagacacatctgaaggatccggacatggtctgggacttctggagcctacgtcctgagtctctgcatcaggtttctttcttgttcagtgatcgggggattccagatggacatcgccacatgaatggatatggatcacatactttcaagctggttaatgcaaatggggaggcagtttattgcaaattccattataagactgaccagggcatcaaaaacctttctgttgaagatgcggcgagactttcccaggaagatcctgactatggcatccgggatctttttaacgccattgccacaggaaagtacccctcctggactttttacatccaggtcatgacatttaatcaggcagaaacttttccatttaatccattcgatctcaccaaggtttggcctcacaaggactaccctctcatcccagttggtaaactggtcttaaaccggaatccagttaattactttgctgaggttgaacagatagccttcgacccaagcaacatgccacctggcattgaggccagtcctgacaaaatgcttcagggccgcctttttgcctatcctgacactcaccgccatcgcctgggacccaattatcttcatatacctgtgaactgtccctaccgtgctcgagtggccaactaccagcgtgacggcccgatgtgcatgcaggacaatcagggtggtgctccaaattactaccccaacagctttggtgctccggaacaacagccttctgccctggagcacagcatccaatattctggagaagtgcggagattcaacactgccaatgatgataacgttactcatgtgcgggcatttctatgtgaacgtgctgaatgaggaacagagaaaac

SEQ ID NO: 187451 - DNA, 1348 bp, Homo Sapiens
  misc_feature (521)..(642): n is a, c, g, or t
tacagcgacttgcttgggcaaggaagggcctcccacatttctgatccatgaacaacttcctttcagtacattacaatggagaaagcactaggccactgttagaaagttttaatctgtcactgaaataccagcagactttagcctgattcctctcctgcaacacaacagggctgtgctagaagatgattagtttatcctccaactctgagagtcaatcattcatatttttatcaaaggccaccgaggaaaaaagcattccttttttcttcataacagcatttttataactacatcatgtatcagttttatctgacattttcaatttaattcagcaatacttcacagtgaacatgcagcatctctttatatgaaacagatactcaaaaaatataagcaggtaataattttttaaaaatcatataaaagttaatgtgaagagactcagaaaataaatcatttgagcagattctttaagtcttcaaaacaaaaggcaggtgtaatttatttttttaactttttgnnnnnnnnnnnnnnnnnnnnnnnnnnnnnnnnnnnnnnnnnnnnnnnnnnnnnnnnnnnnnnnnnnnnnnnnnnnnnnnnnnnnnnnnnnnnnnnnnnnnnnnnnnnnnnnnnnnnnnnnnngggaggtgcgattttatttcaagaaagtatttagcatttaaagtggagatatactgactagtcagtagtgctagcatttattttcttttcacattgacacttggaaaataagaaatgagttcaattgaacccatttaatatgaaagtctttgtttagtcacaaatttatttttaccaacaaagcacttttgagataatttaaaatacacatgctttgattgaagagtgattgcaaatgggtccagttttcttccacctgggatgacaaatttgttatttcttctaggagtactggctctgaaggaagcattttaaggtgtaactttagaaacaatgcaaggtatgcctgggctaactcaaaatcacgctttctgtccagcatcatcccaatcattttcaagaagctctgcataacttctatggacccaccacaatcaggagacaagcttcgcagctctgtttcaattcctgatgggcctgattctttcagaaggttgagagcagtgtcatacttattatttaccagtccttcttcaagtttcaagcagaaatctgatttttgagccaaaactccaagatttaccactttagactgctggggatcattattttgttcaggtgcagcatatctgggtacaaggccaggaattgttggaatgaaaaatggtgctgatttgggtactttgccaacttttttgtacaaagt

SEQ ID NO: 187452 - DNA, 782 bp, Homo Sapiens
ttggcaccccgccccacccgagcagggggaggcctctgcacggggtcccttggttcgccacgaggctgacctggtggtctgcgtctttctccttcttgccacctcactcataccactggctctctcggggccctcctgctctaggcatcttcaaaattgaggactcagcccaggtggcccggctgtggggcatccgcaagaaccgtcccgccatgaactacgacaagctgagccgctccatccgccagtattacaagaagggcatcatccggaagccagacatctcccagcgcctcgtctaccagttcgtgcaccccatctgagtgcctggcccagggcctgaaacccgccctcaggggcctctctcctgcctgccctgcctcagccaggccctgagatgggggaaaacgggcagtctgctctgctgctctgaccttccagagcccaaggtcagggaggggcaaccaactgccccagggggatatgggtcctctggggccttcgggaccctggggcaggggtgcttcctcctcaggcccagctgctcccctggaggacagagggagacagggctgctccccaacacctgcctctgaccccagcatttccagagcagagcctacagaagggcagtgactcgacaaaggccacaggcagtcccaggcctctctctgctccatccccctgcctcccattctgcaccacacctggcatggtgcagggagacatctgcacccctgagttgggcagccaggagtgcccccgggaatggataataaaga

SEQ ID NO: 187453 - DNA, 656 bp, Homo Sapiens
ttggctgaaatcccgaattttcttccaggaagcagcttcttgtaaccagcttgcctccccaggttggcaggaggcagggagccacaggggcaacccccagccacagaggggctcctgtggccccacagtcccacccaaacgcctcccctcctccaccctcggggcctctcctgggtccccaaccccctctccttgccctgcagcggcctggatgaaagagcggacttcacctggggcgattcactactgtgcctcgaccagtgaggagagctggaccgacagcgaggtggactcatcatgctccgggcagcccatccacctgtggcagttcctcaaggagttgctactcaagccccacagctatggccgcttcattaggtggctcaacaaggagaagggcatcttcaaaattgaggactcagcccaggtggcccggctgtggggcatccgcaagaaccgtcccgccatgaactacgacaagctgagccgctccatccgccagtattacaagaagggcatcatccggaagccagacatctcccagcgcctcgtctaccagttcgtgcaccccatctgagtgcctggcccagggcctgaaaccccgtcctcaggggcctctctcctgcctgccctgcctcagccaggccctgatatgg

SEQ ID NO: 187454 - DNA, 1002 bp, Homo Sapiens
  misc_feature (825)..(833): n is a, c, g, or t
ttgggcaatacatagctttgcatcttccacacaacttccacgtcttcttttattctgtattttacaaaaaactcatataatggttttttcttttgaatgtatcagaatatgtatgaaatttgtcatatcagaatctataaattggcactgtgtctgggattctgtttgtggtttgcattttgaagttcaatgtatcatttgacacacatgcacacaaagtgaactattcaccaaaatcatgccaacagaaataccaacaaaaaacttgtgtagcttgtaaggaggttatttggcttgagagggaagaggtgggacagacatgggggacaaagctacagcatatggctctgtggtgctgcttttttccaatagttgatgaaatagtgaaataaaagttaactttggttgggcttggaataaaggagatgatacataataaactattctttggttagcattagtaatgcttgtagacactcaaacaaggaaggcgaagtcctgatgatgatttattgtatcaatacctcattttatttggttgtggtctcagtttgcctcactggagaatccactaagaaagatggattttaatgggaagaaaagaattattttctacatcgttcctcatctcttgagtttgtcaaaaagttttctaagaggcagtgtgaagagccagagatgtccgaaattgcctgacttcatgttttggaagattcctaagtcacatgaaatcatctatcaaacacttgtcttccaaacggtgtgaaaaactacagccaagatagcagttagcattcaaggaagccttaaagattgtgattatgnnnnnnnnncctttgcgtgtgggcactatgctttattagaacacattatttttaatcatagtattttttctttgcctctaagaaaatactttcttaatgctcagaaagttgcttccaattaatgtttttttccccttaaaagagaagctttgagagatattttgctttcatagctaga

SEQ ID NO: 187455 - DNA, 1533 bp, Homo Sapiens
  misc_feature (408)..(464): n is a, c, g, or t
ttggcagcattcaaatgtaagacaactgtaaaatattgagccccacttggtctaaaattcaaaaagaagaacgcctgtccatcgcctttttataagtccttctctccacacctaaaagcagctgcagctggaagggcacaaattccactgtgtaaaataaaatattaggggcaacacacttcatcaaggcagcaggaatgagagagagcagagaagatcaaggatgaagtcttgggtactgaaaaattcagtgctgggcagaaaaactgacagggcagtacaagtaacaaacagaatccaagtggggtggcccttgtgcacagagctccaggtgacctctggagagacatgggcattcacatggaaagctaaaacggaagctcaagtttcatactcaacataatcttnnnnnnnnnnnnnnnnnnnnnnnnnnnnnnnnnnnnnnnnnnnnnnnnnnnnnnnnnctgggactcataatatttgtaaaatgtattgatactctcagggcaaattcactatattgctatacagttgagatcagtgttgtaaaattaaactgatctggttctaattgcctcaaaggccaaagcccaggcatttgaaatggaaagaagcagagaggaggctgacttagctgattggtatggaaacagttgggccaagagccagaatttccctttgtagcaacacggctagttttactttgagaagctctgctcagctgctttataacattaagtctggcggaatggatgtcactgtgcacaataaagttttcacaagtataaacaatggtgatgtaagtcaacattgctgtagccaggtgtgaaggttgtatggtgtgtgacgaatgtacatcatgtttgtaggtttggatgctaatcttgaattgtagtttaaaaaatacgtatttttgtaactctttgaaagtttatgaagactgacagctttccttgtaagcactaagagaaaaaaaagaaagagggacatttgacaattttaaagaaacaacaagaaattagaatgaaaatctgtgacaaacagcgtcagtgtggccatgtccacattcctacatgtctctctctacaagcacctctctaagaagcctgacatcccggtggactctttatagtcatgtacacttgattccagatgagctctggtcttatctggatgctcagataagaggtttctatctgagcatccagatgttccctcaggttccaagacatttcaccccaggccctgggttcactctggaattcgtaggcttcacgtctctctagaaatgacgtgtaaaatttaagaccagacctcagccatcagcgtccagaccatcctagaagtctttcccaatctcacagagaaagccctagtatttcccagtgaccccaggattccacgttggggtggccaaagaaataggtctctcagggctttgccacagcctccagcccatccttcagaggcacacacagcacctctcggctgctcagctctgtaggatagcctccccctgggggtccgtgggac

SEQ ID NO: 187456 - DNA, 1352 bp, Homo Sapiens
actttgtacaaaaaagttggctctctaagaagcctgacatcccggtggactctttatagtcatgtacacttgattccagatgagctctggtcttatctggatgctcagataagaggtttctatctgagcatccagatgttccctcaggttccaagacatttcaccccaggccctgggttcactctggaattcgtaggcttcacgtctctctagaaatgacgtgtaaaatttaagaccagacctcagccatcagcgtccagaccatcctagaagtctttcccaatctcacagagaaagccctagtatttcccagtgaccccaggattccacgttggggtggccaaagaaataggtctctcagggctttgccacagcctccagcccatccttcagaggcacacacagcacctctcggctgctccagctctgtaggatagcctcccctggggtccgtgggacgcgggccacagtgttgaggtagacaaggaggatcagtgagaggcctcttccctctccacagagactggattgtcattgttccttcatttatatcgtagggcttaacatttcactcaaaaaaaagcccctctttttctaatccttagtctttgtttcaaggaaagccagtttttcttctaccacattttccaggatcgactttaagaaaaatgcaacatctattgaaaaaaagtggggtgtatgcatgtggtttaattccagattgcttttgggtttaagtggtatcaaatttcagtatatttctgtcttatgtgaaagaaatatattactaaaacgtcagtgagcaataatgtcagctgtcaagcactagatttatttttgcaggatatggagtgcaatgaactgagtcaatatggcaaggtgtatgtgatctgtgggagttatgccatttaacataggaagtgcatgggactttccctctctgcactccagctcttactgtaccattagaagatgcagaattctgttggtgtgcaaaaagtatagccttacattcaagcagaatggatctgaagaaagcagcaatatctgttactagagaacattcccatgtgtttaaactcttcacttcttagatgcatttaaattcttaatgcaaatgacgtagcaatttgaaaacttctccgtattacttgtgtttaaaatgtcttgctttaaatacaaaacaaatggtaaaggggattatcttttgtttagatggttaaatattatttttgccttagatagctttgtaataatttttctccagacagttcaacacttttgaaaaatgacatgaattttcattaaaaacccttttcctatgtttattgtatacaagaattatgcaataa

SEQ ID NO: 187457 - DNA, 574 bp, Homo Sapiens
gagtgaaatgttaagccctacgatataaatgaaggaacaatgacaatccagtctctgtggagagggaagaggcctctcactgatcctccttgtctacctcaacactgtggcccgcgtcccacggaccccaggggaggctatcctacagagctggagcagccgagaggtgctgtgtgtgcctctgaaggatgggctggaggctgtggcaaagccctgagagacctatttctttggccaccccaacgtggaatcctggggtcactgggaaatactagggctttctctgtgagattgggaaagacttctaggatggtctggacgctgatggctgaggtctggtcttaaattttacacgtcatttctagagagacgtgaagcctacgaattccagagtgaacccagggcctggggtgaaatgtcttggaacctgagggaacatctggatgctcagatagaaacctcttatctgagcatccagataagaccagagctcatctggaatcaagtgtacatgactataaagagtccaccgggatgtcaggcttcttagagagccaacttttttgtacaaagt

SEQ ID NO: 187458 - DNA, 2365 bp, Homo Sapiens
ttggcttccctttattatgcttgatttagaacactactttccagctgatctctacttttgctgacacagcagaggggatgtgagattctcattctttcttctacctgtatttgagatggtgctttttaataaattaaactttaaggaattatctcaaggtagcattggtctctgtaatagatgaaatgtaaaatatttattatttctaaggtgctttttgaaattataagttagtaatatattatcactgtgaggaaaaaaatcaaatgattgtaaggttttatgttaaaagctctcctttgcagtcccaaaaatgatattggttgcatttttaagttatggtctaagagtgggctctcaatatgtttatgtaaaatgttatggaaattaaacttcaattttatttttcttcttatttagtggccctcagattctcagcttgattctaaggaactttcagctggttctcaatttgtaggactcatggcagttctcacagcatgtttttcaagtggctttgctggggtttactttgagaaaatcttaaaagaaacaaaacaatcagtgtggataagaaatattcagcttggtttctttggaagtatatttggattaatgggtgtatacatttatgatggagaactggtatcaaagaatggattttttcagggatataaccgactgacctggatagtagttgttcttcaggcacttggaggccttgtaatagctgctgttattaagtatgcagataatattttaaaaggatttgcaacctctttatcgataatattatcaacattgatctcctatttttggcttcaagattttgtgccaaccagtgtctttttccttggagccatccttgtaataacagctacttttttgtatggttatgatcccaaacctgcaggaaatcccactaaagcatagttgtatactatctttaactggtttttcacgatggggcactaggaatctcgacattaatcttgcacagaggacttctacagagtctgagaagatatcatcatgctgaatctgatcatactgttttttaaaagtttaaggataagatatgtgtatatgtaacaaaacacattgcatctagaaatcaaaacttgaaagtatttccagggattaggattagaaggaatattagaggaaacttgaaatctgagtttaaaaagattttacctttttgattgctgcagaaatgtcctatgcactctttgcaagagcacacaacaaatgtcagataccaatttttgcaaattatatttaatcttattaaatgtttttatcttactctttctgtacagatatatcaaatcacatgaaatatttaaagtttgaaaattataattacctataaagctgtgaaaaatagaagtataatttgaaaaaacatttcacttatcagagatttttatatttatacaaaagattactaaatgaaggattgctaaatgtttttggttcaattacataaaaattaatattctgggtctgatctgtcagagaataaatatcaaatctaaatttaatgtagagatacatactatttctccatatgaattttaagatattttagtgcttcaagactgctgaaagcaatccagttgctcctgtgctagatggtagccagagaattttatagtaatggaggttagcccttaatctcttcattgcatttcatttctgtaaatcagattaagtccttaatattattttaaattaaaatttgtgtgtaattgccattaaattttcaaaatgtaatttaaaaggattaaatactcatttaataatttaaaataattattgtataatatctacatttggagaattttgaactatcaagcatatactgtatacagttagaaagttattaaatgaacattttactcattgatctgtaaaaacttctttaatctacaactgtttacaaaaacaacattcaaacaaatagtacagatgtcagtgacagaacaaaatgacttttcttggagacattccagattgccatattactttattttaaacagcgctatgactttaaatccaaggctgctcggaagatttttttaggtctctcataagcctattcttccctgatcacatgagtgggagaggtagccaaattttgaattccctttctgtgttcccacaagaactgcgcccggcctatactgtatatatttttaaagactgttctaatagatataaaaactgtaaaaaataagtatttttatatagctctcatggattttattaaacagaattggctcaaaaatactatgttacagactgttgggtacccttgcctaacgtgaactggcagtgttaccttgcttttgcagtaata

SEQ ID NO: 187459 - DNA, 1416 bp, Homo Sapiens
ttggcagcattgcacatcgcatctttggctgggcaagcagaggtggtaaaagtcttggttacaaatggagccaatgtcaatgcacaatctcagaatggtttcacgccattgtatatggcagcccaggaaaatcacctggaagttgtcaagtttcttcttgacaatggtgcaagccagagcctagccacagaggatggcttcacaccattggcagtggctttgcaacaaggtcacgaccaagtcgtttcgctcctgctagagaatgacaccaaaggaaaagtgcgtctcccagctcttcatatcgcggcccgaaaagacgacacgaaagccgccgccctgctgctgcagaatgacaacaatgcagatgtggaatcaaagagtggcttcactccgctccacatagctgctcactatggaaatatcaatgtagccacgttgctgttaaaccgagcggctgctgtggatttcaccgcaaggaatgacatcactcctttacatgttgcatcaaaaagaggaaatgcaaatatggtaaaactattgctcgatcgaggagctaaaatcgatgccaaaaccagggatggtctgacaccactgcactgtggagcaaggagtggccacgagcaggtggtagaaatgttgcttgatcgagctgcccccattctttcaaaaaccaagaatggattatctccattgcacatggccacacaaggggatcatttaaactgcgtccagcttctcctccagcataatgtacccgtggatgatgtcaccaatgactacctgactgccctacacgtggctgcccactgtggccattacaaagttgccaaggttctcttggataagaaagctaaccccaatgccaaagccctgaatggctttacccctcttcatattgcctgcaagaagaatcgaattaaagtaatggaactccttctgaaacacggtgcatccatccaagctgtaaccgagtcgggccttaccccaatccatgttgctgccttcatggggcatgtaaatattgtatcacaactaatgcatcatggagcctcaccaaacaccaccaatgtgagaggagaaacagcactgcacatggcagctcgctccggccaagctgaagttgtgcggtatctggtacaagacggagctcagagtagaagctaaagctaaggatgaccaaacaccactccacatttcagcccgactgggggaaagcagacatagtacaacagctgttgcagcaagggggcatctccaaatgcagccacaacttctgggtacaccccacttcacctttccgcccgaaagggggcatgaggatgtggccgcgtttccttttgggatcatgggagcgtctttatctataacaacaaagaaaggatttactcctcttcatgtggcgccaaaaaatggaaa

SEQ ID NO: 187460 - DNA, 1835 bp, Homo Sapiens
ttgggttgctcacatcgaccggaactccccgccccctcccgcggcccctggggccgtaggaggccgcagcgaggaggtagagggggcgggggtcgcactagggtgtccctagagaacgaggactctgaaggcgggacatttgggcgacccccgggcggggccagccattaaacagtcccacttctgtgccagacactgaactgggctcttgacgggcatcatctcttaatcctcagaacatcccagggagctccacaggatccccatatcctgggccatgagtgagttgaaagactgccccttgcagttccacgacttcaagtctgtggatcacctgaaggtctgtccccgctacacggcagtgctggcacgctctgaggatgatggcatcggcatcgaggagctggacaccctgcagctggagctggagaccctgctgtcttctgccagccggcgcctgcgtgtgcttgaggccgaaacccagatcctcaccgactggcaggataagaaaggtgacagacgattcctgaagctgggtcgagaccatgaacttggagctccccccaaacatgggaagcccaagaagcagaaactggaagggaaggcaggacatgggccgggccctggcccaggacggcccaaatccaaaaaccttcagcccaagatccaggaatatgaattcactgatgaccctatcgacgtgccacggatccccaaaaatgatgcccccaacaggttctgggcttcagtggagccctactgtgctgacatcaccagcgaggaggtccgcacacttgaggagttactgaagcccccagaagatgaggctgagcattacaagatcccacccctggggaagcactactcccagcgctgggcccaggaggacctgctggaggagcagaaggatggggcccgggcagcggctgtggctgacaagaagaaaggcctcatggggccactgaccgaactggacactaaagatgtggatgccctgctgaagaagtctgaggcccagcatgaacagccggaagatggatgcccctttggtgccctgacgcagcgcctcctgcaggccctggtggaggaaaatattatttcccctatggaggattctcctattcctgacatgtctgggaaagaatcaggggctgacggggcaagcacctcccctcgcaatcagaacaagcccttcagtgtgccgcatactaagtccctggagagccgcatcaaggaggagctaattgcccagggccttttggagtctgaggaccgccccgcagaggactccgaggatgaggtccttgctgagcttcgcaaacggcaggctgagctgaaggcacttagtgcccacaaccgcaccaagaagcacgacctgctgaggctggcaaaggaggaggtgagccggcaggagctgaggcagcgggtgcgcatggctgacaacgaggtcatggacgcctttcgcaagatcatggctgcccggcagaagaagcggactcccaccaagaaagaaaaggaccaggcctggaagactctgaaggagcgtgagagcatcctgaagctgctggatgggtagccctcacccctgcctcaggctgattatctggcctaagggaggggaagggaggcccacttccttctttgggcacaggaaacattggcctgtggctgtccctcaaatggcggcagtctctagagggccatggcccttcccctgaggtcttttggcctagctctgtacaaccaagacacaggaaaccctgctggggctagcctgaggcctagtctctgcttggtccccgagatgggggttggaggggacttcgtttctgggg

SEQ ID NO: 187461 - DNA, 1032 bp, Homo Sapiens
ttggcaattatgtgatggttttcaggtttctgcaaattacagaagagccagccaagatcacccaggagcttgtgcccccagatgggccaaagaaagagcctatgaaggagaagcagaagcagacggctggcctggctcaccttcccacgccagtggggcaggggtctgcttcaggaaatggaagctgtccaggaaatgagcagagattcacaagacagcactttgattctatgttgagtttgtttctatattagaaaagcagcaagtcagtaatcccccgtggcatcacagctaagtagctgtggccaccggcagtttcacagcatcctgaaagctggcactgatcgtgactatcagtgaaagaagtttaattttcaggttagaaaatgtgatctggcagtttatgcattcttcagagtaatgtaataatacctatgtgatgctgtaattttacttttcaacataagttgaacccgtagcagtctgtttaccttgtaaagggattacttagaagacatttttgtacatgctcttccccaaggattgtacgtattatacaaatagatggaaagaaaagtgaacacgtttgtagaactttcataagcacacagttgctgtgttgagttctctttaaaaacaaggacaaaaccaaccagcgttcaaaggaacctcccatcagagtcccctaaagtattttaggttcagtgagcatttgcctgaataaaacctaaaagagtagtcttaacacattactaactttttctaagagaaattgattcctgttttgtcatctgatgcaatttgctcttataaagagacattttcataggttcagagtaactcacctccatgggctgaccaaaggcttttctaatttttgttactgatgagatgaaacctatttgtaaggagatcttccccaggagcatttctgttgccttcttgacatcaatgaaaagtagcatattctcttatgaaatagcatgagaaaacacagggcatttctaggacagtaaaacgttaaagtactgg

SEQ ID NO: 187462 - DNA, 2018 bp, Homo Sapiens
ttggggaggactgccgcctccgctaccgtcttggacccctgcttaccggccgccgcggggacgagctcgggtaggcggcagggcagatgcccgagggcctgcgctggaacgccccacgccgcaccggccgctcccctgtgctccgcggcctgggcctgcgccgctcagctctctggaaactagcgcctcagctgcgcggcgcgtaggtcgcggggagctccgaaccgccggcgcccggccatggcggtctccaggctagatcgcctttttattttactggatactggcactactcctgttacaagaaaagctgctgcacagcaacttggagaagtggtgaagcttcatccccatgaactaaataatctcctgtctaaagtgaagtggatcctaaagagaggatagcacgccaacgaaaattattacagaagaaacttggccttaatatgggagaagcaattggaatgagtactgaagaacttttcaatgatgaggatttggattataccccaacttcagcatcctttgttaacaaacaacctactcttcaggcagctgaattgattgactcagagtttcgagcaggaatgagcaatagacaaaagaacaaagctaaaagaatggccaagttatttgcaaaacagagatccagggatgcagtggaaactaatgagaagagcaatgatagcactgatggggagccagaagaaaagagacggaaaatagcaaatgttgttattaatcagtctgcaaatgattccaaagtcttgattgataatattccagacagctcttccttaactgaagagacaaatgaatggcctttggaagcttttgtgaagaactttgcaatgacctttttaatccctcctgggaggttcgacatggtgcaggcactggacttagggaaattcttaaagctcatgggaaaagtggtggtaaaatgggtgacagcactttagaagaggtaagtgtattaatgcaacaattatcaccaagtattaatagttggcatctttttccaatgtagggaagtaacgagtatgtgccgtgaagtaggaatgagaggtaaataagaggaagagatatgaaaagatgattcagcagcatcaagagtggttggaagacttggttattagactcctttgtgtttttgcattagacagatttggagactttgtttctgatgaagttgtggcaccagttcgtgaaacttgtgctcaaacattaggtgtggttttaaaacacatgaacgaaacaggagttcataagactgtggatgtgctgctaaaattacttacacaagaacaatgggaagttagacatggtggtctgctgggaataaaatatgctttggcagtccgtcaggatgtaattaatactttattgcctaaagttttaactagaataattgaaggactccaggatcttgatgatgatgtcagagctgttgctgcagcatcattagtgcctgtagtagaaagccttgtctatcttcagacacaaaaggtgcccttcattataaatacattgtgggatgctcttctggaattagatgatctaacagcttcaacaaatagtattatgactctcctttcatccttgttaacttaccctcaggtccaacaatgcagtattcagcagtcactgacagttttagttccacgtgtctggccttttttgcatcacactatatcatcagttcgaagagcagcattggaaactctgtttacgttattatcaacacaggaccagaactcttcatcttggcttatacctatactgcctgatatgctccgacacatttttcagttctgtgttttggaaagcagccaggaaattctggaccttattcacaaggtttggatggaactgttgagtaaggcttcagttcagtatgtggtagcagctgcttgcccatggatgggtgcttggctttgcttgatgatgcagccttctcatttacctatcgatttaaatatgttgctagaagtaaaagctagagccaaggaaaaaac

SEQ ID NO: 187463 - DNA, 974 bp, Homo Sapiens
  misc_feature (673)..(699): n is a, c, g, or t
tttgtacaaaaaagttggctactgacctcttctcatagattttgtataaatgaagtgctggactttacctgaaagctgcaaaaattaatggtttagatatatttataataaactgatttaaactttttctataagaagaaaaattaagaccacttatttgaaaacaaagatgaagtctcaccttccagtttgctttctcattagttttttccaaagtaagttattgaagctgtgattgacatttttctcataatgaatcctctcaggacattgtgtagcctatggtaagtacaaagggagaggaagacattttgaattttaagagctttattatcagtttaaccctccctagttgaatgttattttcttcttgttccattaagtcagaatacaaatcagcacagatattcgaatgtttccaatattttaaaatgtaatgttacttatgaaaagtattttgcttaaggttgtgtgtgtattgtgtatatacctcaagttcaagttaatggcattgatttatgttccagacaaaaataacacaaataataatatccttcgttataaccacaatgagataagtattggcattagtgttcagtgccattttatactttctctctgtgttctctgtattgtactaaccaacctcccaaatcgctgagctgcttgtttnnnnnnnnnnnnnnnnnnnnnnnnnnngcatgacattgtgtatcgattttttgttgttgaccaaaatcacacacatggaaacatgtagatcaacagagtgggaaagctagcagattcttgggcttagtattactaataggcaggatggtacaatgagcaactatcaggattattcctttcagtggttcttatggcatctaaattactgaataaattattaatccattaatcagtgaatcaaatttatgattacaattatcaaatgaatgctcagcattaatttgaaaactgttttgtgaaac

SEQ ID NO: 187464 - DNA, 2775 bp, Homo Sapiens
  misc_feature (253)..(310): n is a, c, g, or t
ttggggcagatccaggtgtccaggcgccggtccttgggggtgaggcggccgctgcaggagcacgtgcgatttatggactttgactggtttcctgcgtttatcacgggggccacgtcaggagccattgctgcgggagccacggccagagccaccactgcatcgcgcctgccgtcctctgctgtgacccctcgggccccgcaccccagtcacacaagccagcccgttgccaagaccacggcagcccccaccacannnnnnnnnnnnnnnnnnnnnnnnnnnnnnnnnnnnnnnnnnnnnnnnnnnnnnnnnnagcagcctccaaagccctgtgactcacagccctgcttccacggggggacctgccaggactgggcattgggcgggggcttcacctgcagctgcccggcaggcaggggaggcgccgtctgtgagaaggtgcttggcgcccctgtgccggccttcgagggccgctccttcctggccttccccaccctccgcgcctaccacacgctgcgcctggcactggaattccgggcgctggagcctcaggggctgctgctgtacaatggcaacgcccggggcaaggacttcctggcattggcgctgctagatggccgcgtgcagctcaggtttgacacaggttcggggccggcggtgctgaccagtgccgtgccggtagagccgggccagtggcaccgcctggagctgtcccggcactggcgccggggcaccctctcggtggatggtgagacccctgttctgggcgagagtcccagtggcaccgacggcctcaacctggacacagacctctttgtgggcggcgtacccgaggaccaggctgccgtggcgctggagcggaccttcgtgggcgccggcctgagggggtgcatccgtttgctggacgtcaacaaccagcgcctggagcttggcattgggccgggggctgccacccgaggctctggcgtgggcgagtgcggggaccacccctgcctgcccaacccctgccatggcggggccccatgccagaacctggaggctggaaggttccattgccagtgcccgcccggccgcgtcggaccaacctgtgccgatgagaagagcccctgccagcccaacccctgccatggggcggcgccctgccgtgtgctgcccgagggtggtgctcagtgcgagtgccccctggggcgtgagggcaccttctgccagacagcctcggggcaggacggctctgggcccttcctggctgacttcaacggcttctcccacctggagctgagaggcctgcacacctttgcacgggacctgggggagaagatggcgctggaggtcgtgttcctggcacgaggccccagcggcctcctgctctacaacgggcagaagacggacggcaagggggacttcgtgtcgctggcactgcgggaccgccgcctggagttccgctacgacctgggcaagggggcagcggtcatcaggagcagggagccagtcaccctgggagcctggaccagggtctcactggagcgaaacggccgcaagggtgccctgcgtgtgggcgacggcccccgtgtgttgggggagtccccggttccgcacaccgtcctcaacctgaaggagccgctctacgtagggggcgctcccgacttcagcaagctggcccgtgctgctgccgtgtcctctggcttcgacggtgccatccagctggtctccctcggaggccgccagctgctgaccccggagcacgtgctgcggcaggtggacgtcacgtcctttgcaggtcacccctgcacccgggcctcaggccacccctgcctcaatggggcctcctgcgtcccgagggaggctgcctatgtgtgcctgtgtcccgggggattctcaggaccgcactgcgagaaggggctggtggagaagtcagcgggggacgtggataccttggcctttgacgggcggacctttgtcgagtacctcaacgctgtgaccgagagcgagaaggcactgcagagcaaccactttgaactgagcctgcgcactgaggccacgcaggggctggtgctctggagtggcaaggccacggagcgggcagactatgtggcactggccattgtggacgggcacctgcaactgagctacaacctgggctcccagcccgtggtgctgcgttccaccgtgcccgtcaacaccaaccgctggttgcgggtcgtggcacatagggagcagagggaaggttccctgcaggtgggcaatgaggcccctgtgaccggctcctccccgctgggcgccacgcagctggacactgatggagccctgtggcttgggggcctgccggagctgcccgtgggcccagcactgcccaaggcctacggcacaggctttgtgggctgcttgcgggatgtggtggtgggccggcacccgctgcacctgctggaggacgccgtcaccaagccagagctgcggccctgccccaccccatgagctggcaccagagccccgcgcccgctgtaattattttctatttttgtaaacttgttgctttttgatatgattttcttgcctgagtgttggccggagggactgctggcccggcctcccttccgtccaggcagccgtgctgcagacagacctagtgctgagggatggacaggcgaggtggcagcgtggagggctcggcgtggatggcagcctcaggacacacacccctgcctcaaggtgctgagcccccgccttgcactgcgcctgccccacggtgtccccgccgggaagcagccccgggctcctgaa

SEQ ID NO: 187465 - DNA, 882 bp, Homo Sapiens
ttggcacagagaggaaacaataaatctcagctactatgcaataaatatctcaagttttaacgaagaaaaacatcattgcagtgaaataaaaaattttaaaattttagaacaaagctaacaaatggctagttttctatgattcttcttcaaacgctttctttgagggggaaagagtcaaacaaacaagcagttttacctgaaataaagaactagttttagaggtcagaagaaaggagcaagttttgcgagaggcacggaaggagtgtgctggcagtacaatgacagttttcctttcctttgctttcctcgctgccattctgactcacatagggtgcagcaatcagcgccgaagtccagaaaacagtgggagaagatataaccggattcaacatgggcaatgtgcctacactttcattcttccagaacacgatggcaactgtcgtgagagtacgacagaccagtacaacacaaacgctctgcagagagatgctccacacgtggaaccggatttctcttcccagaaacttcaacatctggaacatgtgatggaaaattatactcagtggctgcaaaaacttgagaattacattgtggaaaacatgaagtcggagatggcccagatacagcagaatgcagttcagaaccacacggctaccatgctggagataggaaccagcctcctctctcagactgcagagcagaccagaaagctgacagatgttgagacccaggtactaaatcaaacttctcgacttgagatacagctgctggagaattcattatccacctacaagctagagaagcaacttcttcaacagacaaatgaaatcttgaagatccatgaaaaaaacagtttattagaacataaaatcttagaaatgg

SEQ ID NO: 187466 - DNA, 1763 bp, Homo Sapiens
  misc_feature (436)..(444): n is a, c, g, or t
  misc_feature (448)..(478): n is a, c, g, or t
  misc_feature (480)..(504): n is a, c, g, or t
  misc_feature (908)..(1206): n is a, c, g, or t
cctttttaacttatttgttcaggaaactgggctagttgtccttggagattctcatggtctggattttgctggttgcatccttatggtgtcaattaacatgtttctttatcccatgtatttcctgtaaattggatgttggatgtaaagctaggtcagattcaggctcttctgcttgctttttcgtttgatcaagactccataagtagaatgtgttcttccatcaggatgtccctatgccagctgtctctcttttcaagatccaacccactcattagaggctgcaaaactgtgagcttctcatttagtcactcctgtgtatattaattagaattctataatgaggcactttccctccttactattggataaccagtggtacagttcattcaggaaaggaaaggaaaggatttaacctgtattatggacttaaaatacnnnnnnnnngagnnnnnnnnnnnnnnnnnnnnnnnnnnnnnnngnnnnnnnnnnnnnnnnnnnnnnnnnttttggacccgatgcagctgggaggggagctgtccaggaggccggcctgggaatgagcacaggcctgcggctggcagagagccgggtcgagccagccctggagaagcaggcccagctggaggagcagctgcgggacaaggtgctccacgagaaggacctgtcccagcagcagatgcaaagcgacctggacaaggctgacctcagtgccaggagggtccctggtgggtgctgcatgaggcaggcatcactgcagaaggtaaaactggagagttggggagaagggagcatctgttcactaggagcagggccttcctctgtgagctcagccagccttcccaggcaccccactgaggttccgaaggcagttgcccagtgtttatcataaacagcttagcctcctatgnnnnnnnnnnnnnnnnnnnnnnnnnnnnnnnnnnnnnnnnnnnnnnnnnnnnnnnnnnnnnnnnnnnnnnnnnnnnnnnnnnnnnnnnnnnnnnnnnnnnnnnnnnnnnnnnnnnnnnnnnnnnnnnnnnnnnnnnnnnnnnnnnnnnnnnnnnnnnnnnnnnnnnnnnnnnnnnnnnnnnnnnnnnnnnnnnnnnnnnnnnnnnnnnnnnnnnnnnnnnnnnnnnnnnnnnnnnnnnnnnnnnnnnnnnnnnnnnnnnnnnnnnnnnnnnnnnnnnnnnnnnnnnnnnnnnnnnnnnnaccacaaaaaaacaacttgtgccccttactcctgccacctggagtgacagagctgggcctggcagtgaagcgtctacagaagcagaatctggagaaggatcaggtcgacaaggacctcaccgagaagcttgaggccctggaatccctgcggctacaggagcaggcggccctggagacagaggatggagaggggctacagcggagcctaagggacctggcacaggccgtcctgtctgacgctgagagcggcagcctgcgtccaacagcgtccgaccgcagcctgcgggggctctcgggccagcggaccccgtctccaccgcggcgctcctcgccgggccgaggccgttcgccccgcagaggcccctccccggcctgctcagacgactccacgctcgcttgccctgattctctccgccctgcacttttgccagctgaaggtccagggagaagagcaacctggtccacagcctgcggtggcccagcagcaaccgaggagctgccgcacgagcgggagaagctgcaagttgcccaggaggagctgcagcgccagcgggacc

SEQ ID NO: 187467 - DNA, 1159 bp, Homo Sapiens
  misc_feature (981)..(1007): n is a, c, g, or t
ttgggtattttgaaagatctccaccacaacgttcaagatagagagacacagcaagccatcaactatggttaattttgaaaaatggaaaagttggattgggcttacagtcagcactcagttatttgcaagtgtatttctttgctttgtagagtatttttattgggtgttaactttgacagctgagagtgggcttgcaagaacacaatctaaaagtgtgtttcaattgagtatctctctagtagaataggagttcatcctgaaaagctgtgactcattaacccagtaaacatatacaaagtaagcttaaaacactataaacatgagataagggaaaatgaatccagagttctcatattaataggtagtgaaacaataaggctttttagagcagactttgttggcataaaataacctggcttctatccctaaccctttcctacctttcctctccgtcaacatgtcctcatactgaagacaaacttgtttcaatgatagtcttcattttcaaaaacaaaaaggcaggcagacagaaataatgatgttttcttgcactaagaaggtactacttgtacacatatatcaaaacctcattctgcaaagtttttgaaggtttcaatgggaaatttgattttattacaaaataaaacattttttaatgttaaagtttatatattccatgcttgttttctcattcactggcatggatgatcaggagctgcctatatatgaaggcagaatcagactatcaggaaaggagctggccagggccatagccagtcaagatctctgagcaacttagagacattggtgtcattatatgaagcttgcatttaatacatttatacataatacatttgtacatttaattcataacgtctcttggtcacagatgccttatatataaaataagttgccagatctctaagattgcctagtacacctttgtatctcatttgatgtgatacccagaagagatcattnnnnnnnnnnnnnnnnnnnnnnnnnnncaagaagatcctttcgtgatcaccatgctgttctcatggtaagaactggagttatgtttttaaatttggaaatatgacattttatgtagcactttataaaaagtgaaaagcgacaaattccaccgctgcttaatactgctttgcttcttttt

SEQ ID NO: 187468 - DNA, 1547 bp, Homo Sapiens
  misc_feature (417)..(426): n is a, c, g, or t
  misc_feature (648)..(658): n is a, c, g, or t
  misc_feature (1040)..(1066): n is a, c, g, or t
ttccagagaattgtttttaatcaatccgatcaattttacacacccaaatatcattaagaaacatagaaatcatgtgaattgtattaaaactatgacatatgacaatattatataaagaaaattttaactctaagagacaaatataattttttaaaaaagaaattaaaaatatcacgtcttatgctaaatatatatagatatatttattatgatgcagcaggttttggaatacagggatttaggcaagttaaaaataaaaagtttatatgcttaaactttctgaatattgtttgtctgatttcctatttaaatatcagacatcattataggaaatacatagtctacttacgattgcaatggcactttcaaatataaggcaattaatattttagaaagcagcaacttttactttttttnnnnnnnnnngctagtagcagcatgtaaaaatgagcattacgagaaactcagaaaaacaaatttaccctgaaaagatgaatataattaaaaaacaaagcacctttcatttcaaaaagaactgtaggctaagaccctcatctcagaataaccccatctaagaacactcaggctttctttatttaataagcagcagcagaagaatacatcccattctacatactgactgtgttnnnnnnnnnnntgcagtccatatgcaggtagaaaactaaagtgcaacagaagcaagttaattagagtgtactcacttatacactatgcttttaattagttaacacaaaaatgtgtaattgataatttattattggtcctacatattatttactagcatgctgtagaccatagagaaatagaatgtttactgtgttttattattattactctgtgtagatacatatttatctatcatgtcaataaaaagaagcaaagcagtattaagcagcggtggaatttgtcgctttcactttttataaagtgctacataaaatgtcatatttccaaatttaaaaacataactccagttcttaccatgagaacagcatggtgatcacgaaggatcttcttgnnnnnnnnnnnnnnnnnnnnnnnnnnnaatgatctcttctgggtatcacatcaaatgagatacaaaggtgtactaggcaatcttagagatctggcaacttattttatatataaggcatctgtgaccaagagacgttatgaattaaatgtacaaatgtattatgtataaatgtattaaatgcaagcttcatataatgacaccaatgtctctaagttgctcagagatcttgactggctatggccctggccagctcctttcctgatagtctgattctgccttcatatataggcagctcctgatcatccatgccagtgaatgagaaaacaagcatggaatatataaactttaacattaaaaaatgttttattttgtaataaaatcaaatttcccattgaaaccttcaaaaactttgcagaatgaggttttgatatatgtgtacaagtagtaccttcttagtgcaagaaaacatcattatttctgtctgcctgcctttttgtttttgaaccaa

SEQ ID NO: 187469 - DNA, 1198 bp, Homo Sapiens
ttggcaagtaattctgaaattcttggggtccggccatctaatgtttccagtagttctgggattattgcagcccaaccaccaaatattctaaataactctggaatattgggaatacagccacccagtgtgtcaaatagttctggacttttgggagtgctacccccaaatatacctaacaattctggacttgtaggagtacagccaccaaatgttccaaatactcctggacttctgggaacacagccaccagctggacctcaaaacttaccccctttaagtatccctaatcaaaggatgcccacaatgccaatgttagacattcgtccgggactaataccacaggcacctgggccaagattccctttaatacagcctggaattccaccccaacggggaatcccacccccatcggtacttgattcagctcttcatccaccaccccgtggaccttttcctccaggagatatttttagtcaaccagaaagaccttttttagctcctggaagacaaagcgtagacaatgttactaacccagaaaaaaggataccacttgggaatgataacattcaacaggaaggagatagagattaccggtttcctcctatagaaaccagggaaagcattagtagacctccccctgtggatgttagagatgtggttgggcggcctatagatccaagagaaggtcctggacggcctccactagatggtagggatcattttggaagacctcctgtagatataagagagaatcttgtgaggccaggtatagatcatcttggtcgaagagaccactttggctttaatccagagaagccctgggggcatagaggagattttgatgagagagagcatcgggttctaccggtctatggtggtccaaaaggcttacatgaagaaagaggtagatttcggtctggaaactatcgatttgatcctagaagtggtccttggaaccgaggatttggacaagaagttcacagagattttgatgaccgcagaagaccctgggagaggcaaagggatagggatgacagagattttgatttctgcagagaaatgaatggaaatcgtcttggacgagacagaattcaaaacacttgggttccccctcctcatgctcgggtttttgattattttgaaggggccacttctcaccgaaaggtgataatgtgcctcaggttaatggtgaaaatac

SEQ ID NO: 187470 - DNA, 2521 bp, Homo Sapiens
  misc_feature (351)..(410): n is a, c, g, or t
  misc_feature (415)..(493): n is a, c, g, or t
ttggtgacaatttttgctgccgtatcaactagaattaccaaaaaacatagttttatctttgtatgtgtgtggggatctaccctgagaccatgcttttcttcccaccctgccaccccacccctttaaagaaatacgtatttttatctagaatgatcttgaattagtctctgcatatttttagaaagtgcttggggacattatatatatgccattacaaaagcattatgaggcctatgtattctactgtgtttaatactgcattaacctgcacaaagtttatgcattttttcatgcatttttttccttctttctaagtaaggtattcctgacaactaacattccctaaatcannnnnnnnnnnnnnnnnnnnnnnnnnnnnnnnnnnnnnnnnnnnnnnnnnnnnnnnnnnntgctnnnnnnnnnnnnnnnnnnnnnnnnnnnnnnnnnnnnnnnnnnnnnnnnnnnnnnnnnnnnnnnnnnnnnnnnnnnnnnnagagaaaccaccttatctatttttagacatttcgaattcctaaaatgtgaaccgttgggtgatctgtcctttggccctaaaacggctggccgggctgtcccggcctgttctcatctgtaccgtatgattttatttcataataactttatgtatttggactgtaacaaacaaaacagaacctaagtcgccccgaaaaatctttccaagccttttcaaaacacttatctgcagtccagaattcagctcttatgaaaagtgagagtgcactccagttttcacagcagcaataagtgcgggaaacaaaaagatcctcttcccaggaaaagttgagtggggaagagttcagacactgttgtagctggtgaatcattgaagtcacctggtagtaccaaataagggctgaggcgcctggaggtctttgtggggtcttccctctttaaatgcaaacgtaagaaggtatatgtgtatatacatttatatacgtgcacatgtatactcgtacatgtatgcacacatacccatacatgtatatgaactccgttctgatttcctctgaaattttgttgataccatctaaatacctctttgaatcaaaataacttaattttagctcattcctcaagagaaagagaaggatccccaaggaagaaaaactgttgtaccttctgtgattctcaaaccaaaatgtgatgcgcttctgttttgttatcttaaattgttgtatcatatctttctgaaaccattctgaattaagttgaaattttcaacatttatactttaactgttctaaatttaagcctacatgtaaatcttttttggggggaaggtaacttgaaaagtttaacttgaaaatttgacctttaaactttcatattctaaggtaaataatagcctataaccaacaacagctttcccagaggtcttgaatttaacactaattgtttagttattgtttctatttctcatacatacataacttcgttttttgtggctggaaaaaaaagtttctatattttgtatttgtctttgttcttctcatgcacacaatttactgttggtgtttaataatttggagctcataaaattaaaagttgtaattttgaccatttgggctaaaaattatatgagggattacatatgcaatggattagtatttcttgatttgcaaaagaagggaaaatgatggtaatttagctcaaattgcctttctttgaagaaaatttctgaatgactgaaaaccaaatatctatattatcactttcaacctcatgtttctgcaaagtacagaaaaactcctcactgacagtgcacccagcccctgactgggttttcaggattatgtccatgtgcataactgcttggatttcttcttttaaagtccctaaaacatgaatctgttctttgagatcctggtttccttagcagagttgtaggttgcgggtttcattcacgtggaaattctaagtagaacttttgctgccccattttactgttggtgaagggccgttgttaatggaagtttacgttttaaaactcagatgactcagaaaccagactgtgatcattttttgcagcagcaaaatgacttattctgacagcatctcggtttggggcttctgaagaaaaaggatgaagctgatctgttgaaacaactactttcccaactcggaggcaaaaggggctgatagaagataacattcacctaccatttcatcttgtgacccccagagatcacgtttgcgtgttctggctgagttttttattattgtttgttttaaatgattaaataatacacaattaaatgtcaggatagcatctcttgcaaagtgaccagtgcagcagaattgtctttctatccatatttgagcttagagaaacatttcccatgtcctaagttcttagaagcaattactttagcgttggggagcattgttctaccagacccatttatgcaggggagatgaagcttaaaagacgggatgtggggtgggagtgtgtttcttaagccgaagctgttgcagctggggg

SEQ ID NO: 187471 - DNA, 1271 bp, Homo Sapiens
ttggatcaaattaaagtggtacgtttcagcgttcagttttcaagtgtggaaccattttcattccagatgcatcaaattgcaatttggaggagaggcagcacaagcagaagcctgggcctggctagcagccaatcagctctcatctgtcatcactactaaggagtctagtgctacagatgaagcatggcgactattatccacttacctggagaggtacaaagtccagaataacttgtatcaccactgtgtaatcaacaagctcttgtctcatggagtgcctctgcctaattggcttataaacagttacaagaaggttgatgctgctgaattgcttcgtttatacttaaactatgaccttttagaagaagctgtggatttggtgtcagaatatgtggatgctgtattgggaaaaggacatcaatacttcggaattgagtttccactgtccgcaacagccccaatggtgtggcttccatactcctctattgatcagcttctccaagctctgggagagaacagtgccaacagtcacaacatcgcactgtcccagaaaatacttgacaaattggaggactaccagcaaaaagttgataaggcaacacgggatttattatatcgtcggaccttgtgatttggattgtcacctagcctttgtaaccgcttggtgcctcttaggacttaagactaccctacaggaaccctgtactcaaggccgatttttgtaactgtaaatgatgtgtacaacattcaagtctgcattctgcacaagataggagggcggaagagtcagaggaccctgtgcttgctggtggtgctaacacaatttctggtgttcaaccttggtctcaaatagctgcttttgtatatgattcacgagcttttttagagtttatatttttttaaactaccgaagacattcattatctgcaaattaagactcaccttcactttccaaaatagctgagggttgttggcttgttgtagctgaccaccaaaagcagtcactgcaaatcttttaattcttccctatcaccttttgtattttaatgcaattattttggtccagaactgacctgtattttctgtattgtacacaaaagctaataattttgtgtactttttatttattttggaggttttatatgatcttcaattgagtattaaataatttgcctacattaagcctaaaatgatgaccagctaattaaagaagatattttgaatctggttctgagctaaagttgagtaaattcttagctgagaaaaaattg

SEQ ID NO: 187472 - DNA, 2323 bp, Homo Sapiens
ttggctctgctcccagccttggctgggcgccagacccggctttgccgtccggctattagcctactgtggctagtcacccccggggtcccggccttctcgggctggggccgccgccaccgcggcaggacggggaggcgggccatggcgtcctgcgtggggagccggaccctaagcaaggatgatgtgaactacaaaatgcatttccggatgatcaacgagcagcaagtggaggacatcaccattgacttcttctaccggccgcataccatcaccctgctcagcttcaccatcgtcagcctcatgtacttcgcctttaccagggatgactctgttccagaagacaacatctggagaggcatcctctctgttattttcttctttcttatcatcagtgtgttagctttccccaatggtccgttcactcgacctcatccagccttatggcgaatggtttttggactcagtgtgctctacttcctgttcctggtattcctactcttcctgaatttcgagcaggttaaatctctaatgtattggctagatccaaatcttcgatacgccacaagggaagcagatgtcatggagtatgctgtgaactgccatgtgatcacctgggagaggattatcagccactttgatatttttgcatttggacatttctggggctgggccatgaaggccttgctgatccgtagttacggtctctgctggacaatcagtattacctgggagctgactgagctcttcttcatgcatctcctccccaattttgccgagtgctggtgggatcaagtcattctggacatcctgttgtgcaatggcggtggcatttggctgggcatggtcgtttgccggtttttagagatgaggacttaccactgggcaagcttcaaggacattcataccaccaccgggaagatcaagagagctgttctgcagttcactcctgctagctggacctatgttcgatggtttgaccccaaatcttcttttcagagagtagctggagtgtaccttttcatgatcatctggcagctgactgagttgaataccttcttcttgaagcatatctttgtgttccaagccagtcatccattaagttggggtagaattctctttattggtggcatcacagctcccacagtgagacagtactacgcttacctcaccgacacacagtgcaagcgcgtaggaacacaatgctgggtgtttggggtcattggtttcctggaggccattgtttgcataaaatttggacaagatctcttctctaagacccaaatactctatgttgtgctttggcttctttgcgtggctttcaccactttcctctgtctgtacggcatgatttggtatgcagaacactatggtcaccgagaaaagacctactcggagtgtgaagatggcacctacagtccagagatctcctggcatcacaggaaagggacaaaaggttctgaagacagcccacccaagcatgcaggcaacaacgaaagccattcttccaggagaaggaatcggcattccaagtcaaaagtcaccaatggcgttggaaagaaatgaaaaaccctggttaatcaaagatgttccagagtgcctagaactgagagggaaatggaactcatttggaactccccgtgaggaggtcgaggcgcacagggcaagcaggaagaggcgagggcacttgggggtcattatttgagatcgtaagtcttgtttcccacagacctggccgcgtcaggcagatcatcgcctggggggcctttgccaacgtggggtctcttctaacttcagcacttgacatgcggtcaccggtggcagcgcggtgtgttgaagggaaacggtagctattcattcacagttgccaagagcagctccgcgcctgctggatcgtggatgcagcgtaaacatcttccttcagacgaggcattaaccccatggttaatggactggtcaccagtttttattttatttttatgaatctacctttccattgattgatttaagttcaggccacttttctgtcttttatttggttactgttgttatttgtttttaagttaggatgctttttaacagcctttagaagccgctgctgaaattgatactgggggaagggttccccttccttctagagcagaaaagggagagaggtgttgtattcctgtttggtaacctcagtctcctgtaagacctcctaccacatggcgagtatacaccaatcaggagagggtagctgcctgcataggagcctcgcttccgattattcccttcccaatattattcatccagacttagccacagtgcacaaaggcaaacctgc

SEQ ID NO: 187473 - DNA, 1640 bp, Homo Sapiens
ttggctcaatgcattagtacaccttatagagataggcaatggtctggtcacttttcagctgcggggacttgaattcagaggtacctactgtcaacaacgggaagtggaggccattactgaaggtgtagaggaagatgaaggattttgctgttgtgaacctggccatattcctcacatgctttcatttaatgctgcatttagccagcgatggctagcttgggaagtgatagtcacaaagtacattctggagggttatagcatcactgataacagtgctgcttctatgcttcaagtctttgatcttcggaaagtactcaccacttactatgtcaagggtatcatttattatgttacgacctcgtctaagctagaggagtggctagctaatgagacaatgcaggaaggacttcgtctgtgtgctgatcgcaattatgtcgatgtggacccgacctttaatccaaacattgatgaagactatgaccaccgactggcaggcatatctagggagagtttctgtgtgatttacctcaactggatagagtactgctcttcccgaagagcaaagcctgtggatgtggacaaagattcatccctagtgactctctgttatggactctgtgttctgggacggagagctttggggactgcatcccatcatatgtccagtaatttagagtcattcctctatggattgcatgccctatttaaaggagatttccgtatttcttcaattcgagatgaatggatctttgctgacatggaattgctaagaaaagtagtagtccctgggatccgtatgtccattaaacttcatcaggatcattttacttctccagatgaatatgatgaccctactgtgctctatgaagccatagtatctcatgagaagaacctcgtaatagcccatgaaggggaccctgcatggcggagtgcagtacttgccaactctccctccttgcttgctctgcggcatgtcatggatgatggcaccaatgaatataaaatcatcatgctcaacagacgctacctgagcttcagggtcattaaagtgaataaggaatgtgtccgaggtctttgggcagggcaacagcaggagcttgtttttctacgtaaccgtaacccagagagaggtagcatccaaaatgcaaagcaagccctgagaaacatgataaactcatcttgtgatcaacctattggctacccaatctttgtctcacccctgacaacttcttactctgacagccacgaacagcttaaagacattcttgggggtcctatcagcttgggaaatatcaggaacttcatagtgtcaacctggcacaggcttaggaaaggttgcggagctggatgtaacagtggtggcaatattgaagattctgatactggaggtgggacttcctgcactggtaacaatgcaacaactgccaacaatccccacagcaacgtgacccagggaagcattggaaatcctgggcagggatcaggaactggactccacccacctgtcacatcttatcctccaacactagcactagccacagctctcactctgtgcagtcaggcctggtcagacagtctcctgcccgggcctcagtagccagccagtcttcctactgctatagcagccggcattcatccct

SEQ ID NO: 187474 - DNA, 1269 bp, Homo Sapiens
ttgggtccctgggatccgtatgtccattaaacttcatcagatgaatatgatgaccctactgtgctctatgaagccatagtatctcatgagaagaacctcgtaatagcccatgaaggggaccctgcatggcggagtgcagtacttgccaactctccctccttgcttgctctgcggcatgtcatggatgatggcaccaatgaatataaaatcatcatgctcaacagacgctacctgagcttcagggtcattaaagtgaataaggaatgtgtccgaggtctttgggcagggcaacagcaggagcttgtttttctacgtaaccgtaacccagagagaggtagcatccaaaatgcaaagcaagccctgagaaacatgataaactcatcttgtgatcaacctattggctacccaatctttgtctcacccctgacaacttcttactctgacagccacgaacagcttaaagacattcttgggggtcctatcagcttgggaaatatcaggaacttcatagtgtcaacctggcacaggcttaggaaaggttgcggagctggatgtaacagtggtggcaatattgaagattctgatactggaggtgggacttcctgcactggtaacaatgcaacaactgccaacaatccccacagcaacgtgacccagggaagcattggaaatcctgggcagggatcaggaactggactccacccacctgtcacatcttatcctccaacactaggcactagccacagctctcactctgtgcagtcgggcctggtcagacagtctcctgcccgggcctcagtagccagccagtcttcctactgctatagcagccggcattcatccctccggatgtccaccactgggtttgtgccttgtcggcgctcttctactagtcagatatcgcttcgaaacttgccatcatccatccaatcccgactgtcgatggtgaaccaaatggaaccctcaggtcagagcggcctggcctgtgtgcagcacggcctgccttcctccagcagctccagccaaagcatcccagcctgcaaacatcacactctcgtgggctttcttgcgacagagggaggtcagagcagtgccactgatgcacagccaggcaacaccttaagtcctgccaacaattcacactccagaaaggcagaagtgatttacagagtccaaattgtggatcccagtcaaattctggaaggatcaacctgtctaaaaggaaagagctacagtggcctgatgaaggaatccggttaaaagctggga

SEQ ID NO: 187475 - DNA, 1229 bp, Homo Sapiens
ttgggctgcgtccgcccagcgccagctccgcgtcccgaccggcccgcggcagcctgcgccgcgccatggccacctccccgcagaagtcgccttctgtccccaagtctcccactcccaagtcgcccccgtcccgcaagaaagatgattccttcttggggaaactcggagggaccctggcccggaggaagaaagccaaggaggtgtccgagctgcaggaggagggaatgaacgccatcaacctgcccctcagcccaattccctttgagctggaccccgaggacacgatgctggaggagaatgaggtgcgaacaatggtggatccaaactcacgcagtgaccccaagcttcaagaactgatgaaggtattaattgactggattaatgatgtgttggttggagaaagaatcattgtgaaagacctagctgaagatttgtatgatggacaagtcctgcagaagcttttcgagaaactggagagtgagaagctaaatgtggctgaggtcacccagtcagagattgctcagaagcaaaaactgcagactgtcctggagaagatcaatgaaaccctgaaacttcctcccaggagcatcaagtggaatgtggattctgttcatgccaagagcctggtggccatcttacacctgctcgttgctctgtctcagtatttccgcgcaccaattcgactcccagaccatgtttccatccaagtggttgtggtccagaaacgagaaggaatcctccagtctcggcaaatccaagaggaaataactggtaacacagaggctctttccgggaggcatgaacgtgatgcctttgacaccttgttcgaccatgccccagacaagctgaatgtggtgaaaaagacactcatcactttcgtgaacaagcacctgaataaactgaacctggaggtcacagaactggaaacccagtttgcagatggggtgtacctggtgctgctcatggggctcctggagggctactttgtgcccctgcacagcttcttcctgaccccggacagctttgaacagaagtcttgaatgtctcctttgcctttgagctcatgcaagatggagggttggaaaagccaaaaccgcggccagaagacatagtcaactgtgacctgaaatctacactacgagtttgtacaacctcttcaccaagtaccgtaacgtggagtgaggggctgccctgggcccaccactgcccaagagttcttgctgttggcg

SEQ ID NO: 187476 - DNA, 2246 bp, Homo Sapiens
ttggggagatagtaaatatacttaggcatcctaactaaccatacctgtcataactgaaaagcccaaatgacatcaccttagatccgagattatgcagggaccagacagataacagaaaggagtggaaactgtggtgataccgagagatggtagcacttctacgtgaaacagccctgctcagctcatctcatgtggctatggagatataatgggcccactatggtcaaatctcgtaattcttcaaatcatgctgaatatcaaaatttttatgggctgggattacaggcatgagctactgcgcccgacctagcatttatctttttaaacagttctagacacctctttcctggccagcccccatggagtatttcagagtcaaaagaacaggggtctggcttgtatgttttccacctcacagaggtggctgcaaattcctctaggtgttcagcaaggtgtttgactttctaggctgctcgcttaccagttgaatcagggttggtatactggctttaaaatttcggtagaggcaagttaggtgttttgtggtcttgaaagtttaaaccttactttcttttctcttaggaatcaccaaaatcaagagagatattgtgtttgctgccagcctctacttgtagagtcagctaaaggaatgtgagattttaaattattgaccacctgtttgattacagttgactacaaatgcctgcaagtgtggatttggttctcccatacattttaatatgtattatatttaaatcaaacatcattcatagaaagcatattacatacatgtttatacataagcattacatttttttaataaaaatgtatacaggtggggcactgttttggtggaaggcttggagtttttttaatgagtttagagctattagataaccactgagttaaaggtaactatgtacacacaaagtgtgcatccaagaggcatagcagcagcagaagtctttaaaggcttgtacaccaggaagaaagatgcatcctcttgccttgtggcaatcattttcctttagaaaacaggccagcttcacctgggcaccctgctgcctttcaaggctggtgattgctcggatagtgattcccagttgttggtgtttcatgcagagttgtatgagagtcctcctcttttctttctttaaaagaagttctttctttgaagaaatccgatacatatacagcaactaatattgcaaccagagctccctgaatgagtccagtcaacacatcgctccagtggtgtttataatcagaaactcgagaaaggcccacataaatggatacggcaacaagaccaaattgcagtgtggggcgtaagagtcttgcccagtctcccttcatcctggcttgaagataaagtgccacaaacagcatgcagtacatggaaaacgaagagtggcctgaatagaaggacaacctgccttccttaactctttctgcattccctcgacatatgtagtattcaatgtaaccatcgctgcagttgatttttgaccaatctggatcacaaacatccaagaagtgaggccgcagtctgcctattgaatacttggcaatgtcagtcagggactgactagcagctgcaccaaataaaaaggttccaatggctttgtaaatagtggctatgtagttattcctgataaaggaatttgagtgcaaaaggttacagtaaacagacagggtttctccaagaataataacgataatactgaatggaatgattattccacctaataacgcataaggtatggtgtcttctttgtaagggtacttgatggactcatcattacagaatactcctcgttggaagggggtatgccttgaagtaagaattgcaaaaggcaatccagccagcaacacgcagagcacatcgagggccacgtacggcagccgcgtcttgtcaaacatggtctctgcccgggctgcccggcaagggcgatggactgagctgcgggacggcggccgaggcccttgattctcgagcccgggccggggctggcgacggccccgagctacggcccctcccagccggaggaggagagcagccgagggcgggctgagaccgggcggcgctcccaccgccagcaatggcgcccggggccctcccctcacagcccccgcgaacactcggttagtgccgaggcgctcgtgtgccagccgcggcagctctgtagcctcaggacctcctcagccggcacggcctgccccggttgctccccgtccggatccaa

SEQ ID NO: 187477 - DNA, 2461 bp, Homo Sapiens
ttgggagggagcgagcaggcgaagccgcggaggacggggtgaagatggcggccttctccgagatgggtgtaatgcctgagattgcacaagctgtggaagagatggattggctcctcccaactgatatccaggctgaatctatcccattgatcttaggaggaggtgatgtacttatggctgcagaaacaggaagtggcaaaactggtgcttttagtattccagttatccagatagtttatgaaactctgaaagaccaacaggaaggcaaaaaaggaaaaacaacaattaaaactggtgcttcagtgctgaacaaatggcagatgaacccatatgacagaggatctgcttttgcaatttggtcagatggtctttgttgtcaaagcagagaagtaaaggaatggcatgggtgtagagctactaaaggattaatgaaagggaaacactactatgaagtatcctgtcatgaccaagggttatgcagggtcgggtggtctaccatgcaggcctctttggacctaggtactgacaagtttggatttggctttggtggaacaggaaagaaatcccataacaaacaatttgataattatggagaggaattcactatgcatgataccattggatgttacctggatatagataagggacatgtcaagttctccaaaaatggaaaagatcttggtctggcatttgaaataccaccacatatgaaaaaccaagccctctttcctgcctgtgttttgaagaatgctgaactgaaatttaacttcggtgaagaggaatttaagtttccaccaaaagatggctttgttgctctttccaaggcaccggatggttacattgtcaaatcacagcactcaggtaatgcacaggtgacacaaacaaagtttctccccaatgctccgaaagctctcattgttgaaccttcccgggagttagctgaacaaactttgaataacatcaagcagtttaagaaatacattgataatcctaaattaagggagcttctgataattggaggtgttgcagcccgggatcagctctctgttttggaaaatggagtagatatagttgtaggtactccgggaagactagatgacttggtgtcaactggaaagctgaacttatctcaagttagattcctggtcctggatgaagctgatgggcttctttctcaaggttattctgattttataaataggatgcacaatcagattcctcaggttacctctgatggaaaaagacttcaggtgattgtttgctctgccactttgcattctttcgatgtaaagaaactgtccgagaagataatgcattttcctacatgggttgacttaaaaggagaagactctgttccagatactgtacaccatgttgttgtcccagtaaatcccaaaactgacagactctgggaaaggcttggaaagagccacattagaactgatgatgtacatgcaaaagataacacaagacctggtgctaatagtccagagatgtggtctgaagctattaaaatcctgaaaggggagtatgctgtccgggcaatcaaggaacataagatggatcaagcaattatcttctgtagaaccaaaattgactgtgataacttggagcagtactttatacaacaaggaggaggacctgataaaaaaggacaccagttctcatgtgtttgtcttcatggtgacagaaagcctcatgagagaaagcaaaacttggaaagatttaagaaaggagatgtaagattcttgatttgcacagatgtagctgctagaggaattgatatccacggtgttccttatgttataaatgtcactctgcccgatgaaaagcaaaactacgtacatcgaattggcagagtaggaagagctgaaaggatgggtctggcaatttccctggtggcaacagaaaaagaaaaggtttggtagcatgtatgtagcagccgtggaaaagggtgttataacacaagactcaaggaagatggaggctgtaccatatggtacaacgagatgcagttactatctgagatagaagaacacctgaactgtaccatttctcaggttgagccggatataaaggtaccagtggatgaatttgatgggaaagttacctacggtcagaaaagggctgctggtggtggaagctataaaggccatgtggatattttggcacctactgttcaagagttggctgcccttgaaaaggaggcgcagacatctttcctgcatcttggctaccttcctaaccagctgttcagaaccttctgatttttacatttactgaataagatttgagtaatgaaagtctgtagtcttaaaactctaaaacagttgtactgcttccaagcagcagtatttatagtaacgtaagctattaatgctaactcttgcatgtcaagaaacattagtcttaggaattcttcaaaaaatggcatcccaatgaaaataaatttgatgactat

SEQ ID NO: 187478 - DNA, 2015 bp, Homo Sapiens
ttggctgataacctatgggaatgtttggatgccagttgggctagtgaatcgccactgtactgtaataatggttatttacctctgtgctgttttaattacctaacgtctgtgtaactgctgatttgagtagtgattagcatttagataatgtaacaggattttagagagcactttgaaagataacattttattatgatggtgctaggtaaaaaattgtaaagactgggatggttgtgtggaaaacttttcttgagagaacctattgaaaggaatttgttgtcaccttcttaactagaatagttgttgaaggtaccgcttaagccatttttttcttaacatcggtggctcagttaaggaatgagaagatagagggtcctccactttcagctcatgcttttttatgtaggactagcttacctgattttaatgaaaatcacattttgatacaaacaccagatttgaaagttcaatgtgtttgatctcaggagtccaaaataagttgttgcttctagtgtcctgcattttattgactggggttggatctcagcttctgaaaatgtttaaaaattggaaggaaatactactcatatcttcattgtcactttgtcttacctcaattgagtaacagaatatagctcctgaaggaaacactgatttgctttctgtttcccatatctcacctctaggatatgatggaagaagtgcttgaaagagaattttagcagatggtacttttcttagtgacctctggaataaaagaactgacttttgatagttttaaaattaatctttgcatgaaggttggtttcgctttttttcctttaagtttgtttttaaatgtattagtccaggggattttgccttatgctgaggtcaaactaaggataagcaagcttttgtccttcattttaactgttatgtcatactgttatgttgacatatttctttataagagaatagaggcaaaagtatagaactgaggatcatttgtatttttgagttggaaattatgaaacttcaccatattatgatcatacatattttgaagaacagactgaccaaagctcacctgttttttgtgttaggtgctttggctgaacttgattccagcccccttttccctttggtgttgtgtatgtctcttcatttcctctcaaatcttcaactcttgccccatgtctccttggcagcaggatgctggcatctgtgtagtcctcatactgtttactgataacccacaaattcattttcatggcagacctaagctcagaccctgccttgtcctggcaagcataggttttcccagaccacaatgctgatatatcttatttaatgcagactgtattcttgcagcgtgttgtttcctttgtgactcaaggttgaattaaaatgcctgtgaactgcaaacttgcttatgattgacttggtgcaataaagttcctttctaaccatttctggtttagaaaacattcagccatcctagaaactagcaatatttatttttgcctctttcgttttaccttcatttttacatgaggtaaatgttttgtcttttacttaagggtactaagcaaggtccactctagtgtagctgaagagaatgcatatttggctacactatttctgtttactgtattttgcttcctactttatgtctaaatgctattgtttgtttaaaatcctaataatgtctcatttccaatatgttattttcagataactaaggttttgctactaatgtcagccatttactctcccactaattgggattattttttaaaagaggtctttctccccgaaatacaagttttagaaaatcttagaataggggtgggtgcatgtcttaatgctgggaagcggcaactttggggttgaacttacttgaatggattaaaaattgcattgtgttacagagctagaaaattttatgtatgaaaaacgataatagccttacactgagtacaaataatactttaagagcatgtgaagatgtgatcatttgtgatgttacttgt

SEQ ID NO: 187479 - DNA, 1961 bp, Homo Sapiens
  misc_feature (1477)..(1531): n is a, c, g, or t
ttggctcttaaagagaaggaatgtaccacatgaagatatctgtgaagactctgatatagatggtgattatagagtgcaaaatacctctctagaagctattgttcaaaatgcttcaagtgataaccaaggaattcaattaagtgcagttcaagctgctaggaagcttttgtccagtgatcgaaatccaccaattgatgacttaataaaatctggaatattgcccattttagtccattgtcttgaaagagatgacaatccttctttacagtttgaagctgcatgggctttgacaaacattgcatctggaacttctgaacaaactcaagcagtagttcagtccaatgctgtgccacttttcctgaggcttctccattcaccccatcagaatgtctgtgagcaagcagtgtgggcattgggaaatatcataggtgatgggccccagtgtagagattatgtcataagtcttggagttgtgaaacctttactttccttcataagtccatctattcctataacattcttaagaaatgttacttgggttatggtcaacttatgtcgccacaaagacccaccaccaccaatggaaaccattcaggagattcttccagccctttgtgttttaattcatcacacagatgtaaatatactggtagacacagtctgggccctctcttaccttactgatgctggcaatgaacaaatacagatggtaatagactctggaatagttcctcatttggttcctctgctcagccaccaggaagttaaagttcagactgctgcacttagagctgtgggcaacattgttactggaactgatgagcaaacacaagtagttttgaactgtgatgctctttcacacttcccagcactcctgacacatcccaaagagaaaattaataaagaagcagtgtggttcctctccaacatcactgcaggaaatcagcagcaggtacaggcagtaattgatgccaatcttgtaccaatgataatacaccttttggataagggggattttggcactcaaaaagaagctgcttgggccataagtaacttaacaattagtggaaggaaagatcaagtggcttaccttatccaacaaaatgttatcccacctttttgcaacttgctgactgtaaaagatgcacaagttgtgcaagtagtactcgatggactaagtaatatattaaaaatggctgaagatgaggcagaaaccataggcaatcttatagaagaatgtggagggctggagaaaattgaacaacttcaaaatcatgaaaatgaagacatctacaaattggcctatgagatcattgatcagttcttctcttcagatgatattgatgaagaccctagccttgttccagaggcaattcaaggcggaacatttggtttcaattcatctgccaatgtaccaacagaagggttccagttttagaaagatgttgtggaagttaggtacaatgcagcactgagnnnnnnnnnnnnnnnnnnnnnnnnnnnnnnnnnnnnnnnnnnnnnnnnnnnnnnnaaaaggtttgatccatcaagcttggctcatgggatctgctgctgcattaaatcgggaaagaaaatgtgaagatttcatttggaatcacagaaaatgcccaaatgaggtcaagatggcgagtgggtgcgagtgagaatgagtggcaaaatgtaatgaaaactttacatgaatgcttatttaggttgttcaaagtaaaaagggctacaggtcacagatcgtcagtgcctgagaaagaacattgacttactctatatcaattgagggggaaagtgcagtaccgtcatcttcaagccttgtaagcataaaaagagaatacgctgcccatataagtcaaaggaaaatgagcccagggccttgctatgaagcagtgtgtgaatggacaatgttgaatgaatgtctggctcagtgatggagagccaggttcatcttt

SEQ ID NO: 187480 - DNA, 900 bp, Homo Sapiens
ctttgtacaaaaaagttggataaaacagtaaaatgtgcttaaaaggccatccttttcattttcagagataacataaagatctttgcatgaggtaaatctacagcatagttcatttttagattttgttgagtcctgtaaagaagaagaagaaaaaagtttcagttgtggtagaataccgtgctgtgtttaaatgttacttgttttcaaactttgttttctatgaaaatgatatggaaacttctaaaatggaatttggtgcatatgtactgctgaataaagaccgatgaagaggtttgagtagatgtacaaatcaagtaatggtttgaacacctttaataatatgcctaatctgttcaattgttttagaatctttttatcttagatgtaggcagccatgaacaatctattttgagccactttagggagaaaactttgtatttttaaaacttgcataaaagttatgcaagtggtttttataaattggaataatacctcagttttgaggttatgcacactaaattaaatgtgacataaattaatttgtacaaaaagaactctttataaggtggctcattgtaggaaatcctgtgccttcccctttgagcacaagtgttgcatgaacaacagtttgctataagaaacataccagattagccaccattagcatctatatctactttgtgtttaaaaatcaactggtaattctgaaacactgtagaatggataaaaattattttgtgatcataactctttgttgaactagagtatttttgcagcattccttgtcatcagaaacatggttaaagtttaaaactagaagcagcagaaaactagcttgtaaaatttatccaagtagagtgcaggctaggctgtcttggggaaataaacattaaaacttaa

SEQ ID NO: 187481 - DNA, 1549 bp, Homo Sapiens
  misc_feature (411)..(463): n is a, c, g, or t
  misc_feature (1159)..(1200): n is a, c, g, or t
ttggggaaagatcaagtggcttaccttatccaacaaaatgttatcccacctttttgcaacttgctgactgtaaaagatgcacaagttgtgcaagtagtactcgatggactaagtaatatattaaaaatggctgaagatgaggcagaaaccataggcaatcttatagaagaatgtggagggctggagaaaattgaacaacttcaaaatcatgaaaatgaagacatctacaaattggcctatgagatcattgatcagttcttctcttcagatgatattgatgaagaccctagccttgttccagaggcaattcaaggcggaacatttggtttcaattcatctgccaatgtaccaacagaagggttccagttttagaaagatgttgtggaagttaggtacaatgcagcactgagnnnnnnnnnnnnnnnnnnnnnnnnnnnnnnnnnnnnnnnnnnnnnnnnnnnnnaaaaggtttgatccatcaagcttggctcatgggatctgctgctgcattaaatcgggaaagaaaatgtgaagatttcatttggaatcacagaaaatgcccaaatgaggtcaagatggcgagtgggtgcgagtgagaatgagtggcaaaatgtaatgaaaactttacatgaatgcttatttaggttgttcaaagtaaaaagggctacaggtcacagatcgtcagtgcctgagaaagaacattgacttactctatatcaattgaggggaaagtgcagtaccgtcatcttcaagccttgtaagcataaaagagaataggctgcccatataagtcaaaggaaaatgagcccaggccttgctatgaagcagtgtgtgaatggacaatgttgaatgaatgtctggctcagtgatggagagccaggttcatctttgaaatctagggctcttcactcatgaagcagactcctagtcctggagtgactgtgtacgagagcgtggttgtggtgctgtatgtgaacgcatgcaagcttgattcaccttcagggggctgataacctagtaaatcatcaaaatgagatcataagtgttaatgtacactggacatgaaaacaaagactggtttagcagcagacattggtttactctgcagcctgtgttttctgtttccccctttcccacctccttccccccacccaatccnnnnnnnnnnnnnnnnnnnnnnnnnnnnnnnnnnnnnnnnnnatttactttacctagtatgcctttttttagttgcttctcaagtcagaaaacttttcaggaaggtttccctgtgcatttgcaccagatgaatgtttgatgctatgaaaagctttccatatcatcaaaactaatttgtgtagatttttgcatgaaaaaaatcataaatttccctcaaaatagactgtgttgcagtacacaagttgccataatagtataaaacagtaaaatgtgcttaaaaggccatccttttcattttcagagataacataaagatctttgcatgagggtaaatctacagcatagttcatttttagattttgttgagtcctgtaaagaagaagaagaaaaa

SEQ ID NO: 187482 - DNA, 1555 bp, Homo Sapiens
  misc_feature (411)..(463): n is a, c, g, or t
  misc_feature (1159)..(1231): n is a, c, g, or t
ttggggaaagatcaagtggcttaccttatccaacaaaatgttatcccacctttttgcaacttgctgactgtaaaagatgcacaagttgtgcaagtagtactcgatggactaagtaatatattaaaaatggctgaagatgaggcagaaaccataggcaatcttatagaagaatgtggagggctggagaaaattgaacaacttcaaaatcatgaaaatgaagacatctacaaattggcctatgagatcattgatcagttcttctcttcagatgatattgatgaagaccctagccttgttccagaggcaattcaaggcggaacatttggtttcaattcatctgccaatgtaccaacagaagggttccagttttagaaagatgttgtggaagttaggtacaatgcagcactgagnnnnnnnnnnnnnnnnnnnnnnnnnnnnnnnnnnnnnnnnnnnnnnnnnnnnnaaaaggtttgatccatcaagcttggctcatgggatctgctgctgcattaaatcgggaaagaaaatgtgaagatttcatttggaatcacagaaaatgcccaaatgaggtcaagatggcgagtgggtgcgagtgagaatgagtggcaaaatgtaatgaaaactttacatgaatgcttatttaggttgttcaaagtaaaaagggctacaggtcacagatcgtcagtgcctgagaaagaacattgacttactctatatcaattgaggggaaagtgcagtaccgtcatcttcaagccttgtaagcataagagagaataggctgcccatataagtcaaaggaaaatgagcccaggccttgctatgaagcagtgtgtgaatggacaatgttgaatgaatgtctggctcagtgatggagagccaggttcatctttgaaatctagggctcttcactcatgaagcagactcctagtcctggagtgactgtgtacgagagcgtggttgtggtgctgtatgtgaacgcatgcaagcttgattcaccttcagggggctgataacctagtaaatcatcaaaatgagatcataagtgttaatgtacactggacatgaaaacaaagactggtttagcagcagacattggtttactctgcagcctgtgttttctgtttccccctttcccacctccttccccccacccaatccnnnnnnnnnnnnnnnnnnnnnnnnnnnnnnnnnnnnnnnnnnnnnnnnnnnnnnnnnnnnnnnnnnnnnnnnnagttgcttctcaagtcagaaaacttttcaggaaggtttccctgtgcatttgcaccagatgaatgtttgatgctatgaaaagctttccatatcatcaaaactaatttgtgtagatttttgcatgaaaaaaatcataaatttccctcaaaatagactgtgttgcagtacacaagttgccataatagtataaaacagtaaaatgtgcttaaaagggccatccttttcattttcaggagataacataaagatctttgcatgaggtaaatctacagcatagtttcatttttagattttgttgagtcctgtaaagaaggagagaaaaaaa

SEQ ID NO: 187483 - DNA, 1208 bp, Homo Sapiens
  misc_feature (267)..(296): n is a, c, g, or t
catttacaggcatccatacattgttttctacagagatccaataagtgtttgggatagaatatcacaaaagccacctctttttcctttctatcatggtttcacacgatgggaaaaaaatttcattataacagttagatatacaaagagcaaatagaatgttgttaaggtaaaacacagggtacaaactctggccagtgccctgctaattgttaatgagggtagaaagcagatttgaatgcttcttttaattaggttcattagtcattnnnnnnnnnnnnnnnnnnnnnnnnnnnnnnaagatgtcctctggtggatcttttttcattttctctacagtctcccattagcccaggttcatggagtccttaatgttcatattcagtcattttaatacaccaataaatgcgggaagggcaatcaagactaaagaaggtgcaatggcatggagctggcactggtgctagctacaaaggtgacttgtctactgaagacacatgggatccacctgtgatgaacaaatctgagatgaaggcacgcattctgcattactctgaccttttagcagaccttctggtctggcagtagtggattgctctgaagtgaattcaaatggccattgatgagagctgtaggtctatcatgttcacaaaataaactgccattgatgtagtgaaaccgatctcccgggaccaggcgattccggcaggtagagcatgtaaaacacttaagatgatacacattgccttgcgccctcatgacgagttcactcgcaggaatcgactgtccgcaagcgctgcaagcaccgctatttccaaataacctaatgtagtcatttctgcaaaggatcatgccacttttggtgtaacaggacgtgccgatgtcgcccagctgcgcctggcagcaggagcacttgaggcaccggctgtgccaatagctgtccatggcatagagcagaaagcggtccgcaatcttgcccccgcagcctgcgcaccgcttccaggagagggagccggccgtcaccgggggcggctgcgagctgctgcccggattcaccatggtctgcttttcccctatattgcaatattgcgagaggcggcggcggtgaaatgcgagcgaagccgctcggcttccagggaaggggcgcctgggctggcggagctggagggagggagggagttctcgcagaagcaggaaaggggaggagccaa

SEQ ID NO: 187484 - DNA, 1238 bp, Homo Sapiens
tctgctgagaagttgcaggactgcatgtgaccctggtagctgtagtcatcctctgtctccagccctcccaaattctttatggccgagtaggcattggagggcaagccgcccatgcaggccttgtccatcttgtcacagtccaagagctcctgttcagagagggagagcagggtcccctggttgagaaaccactggccctccacattgcctgtgactgagaaggcccagcaggagccacacatgccctggtctttgacttttgtgacagcccccttactcctccagtcccattcaggtggggcgaggtcacccacagacttggcttgcttcatcttgttgccaggctcttttctcaggagagtattcaggtagatagtgcggaactcctcctctgtgagatcactgaacttggtgactccatactgagctgtgccacggtccagggcctggatcttctgtgctcgcaccatgttattgacaaagacggacaggcgccaccgggcttcttcctttgactcatatgtccggttataggtaatgacaaagttcttgaagattgaagccatcttcacaggcaagtcctgggacaggggatcctcattcaacagggaaatgactgagctgaaagtctcgtttctgttgtctggatggttttgggacagagaagaaatcatggctgagccctgagtgaaggctgacttgggctccccagcacctggaaccttggtgtccactgggccacagtccttccgcagcagcacgtgtcttccgagctcatccaggacttggaagctgcagagcagggttttcttggacacggggagccggcacccatggggtcgttgcagggtggctcctccagggtggcctccagggagtacagcgacccctgacccgcccggcggacgcggccgcgcacaaggcccagcacggcccgcgtccccgcagcccggccgcggttgaacatctccagcgcgaagcgggtgggcgccagcagctccggggacggcggcccccaggcctgaaagctggcggctcggggctgggcgggggcggccactgcgcccgggagcagccccagcagcgacaggagctgcagccagggcgccatggcgagggcgaagccggcggcccggacccaacagacgctccaccgacccaccgggtaccgagcccgcggccagcggggcctgagtcctccctccagcggggcgacggcccaacttttttgtacaaag

SEQ ID NO: 187485 - DNA, 1578 bp, Homo Sapiens
ttggcatctacaaatccaaaagctgctctcaagtctaagatagttgctgaatttcgatctcaggccctaattgaagagctgttgctatacaagcgctcagaagatcagatagaactgaaggaaaagcagttgtcaactatgagggtggatgtgtgcagcacagaaactctcaaatgcttaaaagataaaacaggtgggaagaagttctccaaagaatttgaagaggcaagctccaagctggaagaatttgtgaatggattagataagcaggtgaaaaacggaccctcattaacagaagcactggaaaatgctggaattttctatgaagcacaatacaaagaagtaaaagtggtggctaatgcatataaaacctttgctaaccgagtaaacaatttaaagaagaagttggatcaattgaagtcaacccttccagatcctgaagaatcaccagttccttccccaagcatggacgctccctccccgactggttctgagtctccttttcagggaatgggaggtgaggaatcccagtcaccaaccatggagagtgagaaatctgccacacctgaacctgtgacagataatcgtgatgtggaagacatggaactctcagatgtggaagatgatgggtcaaaaatcattgtcgaggacaggaaggaaaaacctgcagagaagtcagctgtatccacttctgtacctacaaagccaacagaaaatatctcaaaggcctcttcatgtaccccagtgcctgtgaccatgacagcaactccacctcttccaaagcctgtgaatacttctctttccccttccccagcattggctttgccaaacctggctaatgtggatctggcaaagatcagttccatccttagcagtttaacatcagtcatgaaaaatactggggtcagtcctgcatcaagaccttctccaggaacgcccaccagccccagcaacctcaccagtggcctgaaaacacctgcacctgccacgacaacatctcacaaccctctggcaaatatcctctccaaggtggagatcaccccagagagcattctgtctgcactttccaaaacccagacacagtcagcccctgcactgcaaggcctgtcatctttacttcagagtgttactgggaacccagttccagccagtgaagctgcctcacagagcacttcagcctcccctgccaacaccacagtctctaccataaagggaagaaatctgccctccagtgcccaaccttttattcccaaaagcttcaactattctcctaactcatcaacttctgaagtctcttcaacttcagccagcaaggcctcaattgggcaaagcccagggctcccaagcactacttttaaactaccttccaactctttggggtttacagctacccacaatactagccctgctgccccacctactgaagttaccatctgccaatcttcagaggtctccaagccaaagctggagtcagagtccacctccccaagcctggaaatgaagattcacaacttcttaaaaggtaatcctggtttcagtggcttaaacttaaacatcccaatcctgagcagtttgggg

SEQ ID NO: 187486 - DNA, 1375 bp, Homo Sapiens
ttggcgttcatctgtgtagatgccactgtaaatccagggcctaagagaccctataatttctttggaattttagataagaaaaagatggaggagctcttattactggccaaggaaagcagtcggagcaaccatacaatttggtttggacactttacaacatccactattctttctccatcaccaggaatccggtcaataatgagttcggctatagcttatttgtgtggacatctccatacacttggtggactgatgcctgttttgcacactcgtcacttccagggcactttggaacttgaggtgggagactggaaggataataggaggtaccggatttttgcttttgatcacgacctctttagctttgcagatttgatctttgggaagtggcctgtggttcttatcaccaatcctaaatcactcctttatagttgtggtgaacatgaaccactagaaagacttcttcactcaacacacatcagagtcttggccttttccttatcctccattacttctgtcacagttaagattgatggagttcatttaggccaggctgttcatgtgtctggtcccattttcgtactgaagtggaatcctagaaactacagtagtgggacacataacatagaagtaatcgtccaggattctgctggaagaagtaagagtgttcaccacatattttctgttcaagagaataatcatctcagttttgatcccctggcatcatttattctccgtactgatcactacatcatggcccgggtcctttttgtgctgattgtgctgagccagctcaccattctcattatttttagatatcgaggatacccagagcttaaagaaccttcagggtttataaatctgacctcattttctcttcatgtcttgagcaaaataaacatcttctactattctgtgttgttgttgaccctgtatacagtgctgggtccatggttttttggtgaaatcattgatggcaaatttggttgctgcttttcctttgggatatttgttaatggacatttcctacaaggcagcataacatttataattggaattctccagctggcgttttttaacatccccttgatggcttacatgtgttggagcttgctgcagcggtgctttggtcacaacttcaggtctcatctccatcaaagaaaatacttgaaaattatgcctgttcacctacttatgctactgctgtacatctggcaggtttattcctgctactttctttatgcaacatacggcaccctagcttttttattctcccctttgcggacctggttgacactgctgacacctgttctcattcgttatgtgtggacactgaactccaccaagtttggaatcttcatggtgcagttaaaaa

SEQ ID NO: 187487 - DNA, 1632 bp, Homo Sapiens
  misc_feature (604)..(700): n is a, c, g, or t
gaatgaagcacactacaagatctagaaaacagcctcaacaggacaaatctaagagtattgccttaaagaggaggtacagagagagatcagagtaggaaagttattcaaaaaataataatagagaacttttttaacctaaagaaatatatcaatattcaggtacaagaaggtcatagaacaccaagaagttttaacccaaataagactacctaacggcatttattaaccaaattcccaaagggcaatgataaggaaaggatcttaaaagcaacaagagagaagaaacaaataacatgcaaaggagctccaatatgtctggcagcagacttctcagtggaaaccttaaggctaggagaaagtggcatgacatattcagaaggaaaataattttatcttagaatattatgttcagcaaaaatatccttcaaacatgaaggagaaataaagactttcccaaacaaacaaagctgactttcccaaacaaacaaagctgagggatttcatcaacaccagacctgtcctataagaaatgttaaaggaagttcttcagtctgaaagaaaaggatgttaatgagcaatgagaagtctaggcacagtgattcannnnnnnnnnnnnnnnnnnnnnnnnnnnnnnnnnnnnnnnnnnnnnnnnnnnnnnnnnnnnnnnnnnnnnnnnnnnnnnnnnnnnnnnnnnnnnnnnatgatgtagtgatcagtacggagaataaatgatgccaggggatcaaaactgagatgattattctcttgaacagaaaatatgtggtgaacactcttacttcttccagcagaatcctggacgattacttctatgttatgtgtcccactactgtagtttctaggattccacttcagtacgaaaatgggaccagacacatgaacagcctggcctaaatgaactccatcaatcttaactgtgacagaagtaatggaggataaggaaaaggccaagactctgatacactgctggtgggaatgtaaaatggtgcagccaccatggaaaacagtatggcagctcctcctattatccttccagtctcccacctcaagttccaaagtgccctggaagtgacgagtgtgcaaaacaggcatcagtccaccaagtgtatggagatgtccacacaaataagctatagccgaactcattattgaccggattcctggtgatggagaaagaatagtggatgttgtaaagtgtccaaaccaaattgtatggttgctccgactgctttccttggccagtaataagagctcctccatctttttcttatctaaaattccaaagaaattatagggtctcttaggccctggatttacagtggcatctacacagatgaacgaatagttgccaaagggagtactgtggacataatggaaagagccatctctacgtacagcagaatatttcctgtaataattcttgatgctgtccagacttggaatattgaatgcatcatgatttcctttgatatccagccacttggttttttccatgactcttgtcttcttcagaataccctggtaggtttgccattctacctcatgctgcctggatcccaactgttcctttgttttggcatctgtcaggtctcctgttgctaggacgagagccaa

SEQ ID NO: 187488 - DNA, 961 bp, Homo Sapiens
ccaactttgtacaaagaagtaagagtgttcaccacatattttctgttcaagagaataatcatctcagttttgatcccctggcatcatttattctccgtactgatcactacatcatggcccgggtcctttttgtgctgattgtgctgagccagctcaccattctcattatttttagatatcgaggatacccagagcttaaaggtccatggttttttggtgaaatcattgatggcaaatttggttgctgcttttcctttgggatatttgttaatggacatttcctacaaggcagcataacatttataattggaattctccagctggcgttttttaacatccccttgatggcttacatgtgttggagcttgctgcagcggtgctttggtcacaacttcaggtctcatctccatcaaagaaaatacttgaaaattatgcctgttcacctacttatgctactgctgtacatctggcaggtttattcctgctactttctttatgcaacatacggcaccctagcttttttattctcccctttgcggacctggttgacactgctgacacctgttctcattcgttatgtgtggacactgaactccaccaagtttggaatcttcatggtgcagttaaaaagccacctgagctcctgaaggccatgtctcaccactggcagctgggcagaagcccagcctctgtgtctgtagcccaggcctctaccccagtagcaggtggagggccaggattggtgggtgagctttagggagcagctgctcgtttggagtcctggacgttggagggattacccactactgatacctgcagaatggactgcagaaaagtctcaaaaataatgcctttattccttccctccctaaggagcaaagagttgatttacctttgtgaagagaaaacccttatctaggacatcacagggtaaaggttgggtgtgtgtacgggagtgtct

SEQ ID NO: 187489 - DNA, 2111 bp, Homo Sapiens
ttggcgccagggacagccgagcgttacctggtcccgggcagcggagttctttacccaccccagttctggttctgacgccctagctcattccgcaaatttagggcttgggtctggcttgttcccctccggctcgaaccacctcttctctgagccgagccagctaccggggctcctggaattgccacccctccctgggcacccttgaggcctccgtggagggacgtcacggggcagagcgggacgtgagcctgagtttgctgcaggcgtgctctgtgtggtggctgggttctgccaatccccgtgcccaccgggtgggcgcggccgggaagctcctgcccctccctgctggtcggcgtcacgcgtgacgtcccgcgtgatggctgggagggcccggcggcgacagcggaggcagagaggaaggcggttctgagagcttcagagagcgatggaaagcaaaatgggtgaattgcctttagacatcaacatccaggaacctcgctgggaccaaagtactttcctgggcagagcccggcactttttcactgttactgatcctcgaaatctgctgctgtccggggcacagctggaagcttctcggaacatcgtgcagaactacagggccggcgtggtgaccccagggatcaccgaggaccagctgtggagggccaagtatgtgtatgactccgccttccatccggacacaggggagaaggtggtcctgattggccgcatgtcagcccaggtgcccatgaacatgaccatcactggctgcatgctcacattctacaggaagaccccaaccgtggtgttctggcagtgggtgaatcagtccttcaatgccattgttaactactccaaccgcagtggtgacactcccatcactgtgaggcagctggggacagcctatgtgagtgccaccactggagctgtggccacggccctgggactcaaatccctcaccaagcacctgccccccttggtcggcagatttgtgccctttgcagcagtggcagctgccaactgcatcaacatccccctgatgaggcagagagagctgcaggtgggcatcccggtggctgatgaggcaggtcagaggcttggctactcggtgactgcagccaagcagggaatcttccaggtggtgatttcaagaatctgcatggcgattcctgccatggccatcccaccactgatcatggacactctggagaagaaagacttcctgaagcgccgcccctggctgggggcacccctgcaggtgggactggtgggcttctgcctggtatttgcaacccccctgtgctgtgccctattcccccagaagagctccatacacataagcaacctggaaccagagctgagagctcagatccatgagcaaaaccccagcgttgaagtggtctactacaacaaggggctttgaggagggtcagcctctgtcccctccctcacttccttgggctgctgctttagtggagtcatgtcacccctaccacttggctatctgcctagcactgggcaggggccttggtgggcagatggcaattgagggtagcaacctattagggtgggggagggacctccataaggcttttcctcccttctctggtttcaaagatcagagcacataacccctcctgtgcttgagtgtccatgcatatacatacatgatacacatgtgtatgtgtacattgggtcctgaaagctagaagcaggcatgctagcctagtatgttctgacatctggcttcccttctcagcctcatgtccacctgcctgccagccaggctacaggtgtgacttccttctctaaactgttacaccagccaagttatttttgatggcacctcatcccttctagaaataggaggagctccaggatctcaggacagagacttatagacactagtaggacaaagcgggctgaatccttcagtttctgatacctagctctccaagctgactgggctggcagaggagaacatgttgagacaagggaggcaggggacttatgcatccctcagtgccatcccttgtatcctggaatagctcatttcccctcctcctctctaccagacaaaggagtgcctgtgtcctgtactgcctcgctgt

SEQ ID NO: 187490 - DNA, 1089 bp, Homo Sapiens
ccaactttgtacaaaaaagttggcttttttaaacaaacatgaatagaattttgcaaatttaacgttttcaagatttattcaaggaaacaaaatgcctatgttcaaccactggtgttaatgaacaaagatactgtgcgtctctggggaagacgcacctaggtggcggccactcccatggccttgtctaggactcagagaccactcggctctgagcttccaggcgcctcgtctgtgtgcatctcacgcccgacgtggcttctgaaacgtgcattcaacctcaaacttttgcataaaatagaatgaatcgttttgctctgatgaaatgtaggccttacttgtatataagactgttcctgccttcggtctgtcattttcccacctgcctcccctacccaccccccacccaccacctggggcttcctctgggggtccgagggtcttcccatcacatgaagacatcaggttgggtcctgccccactgcccctccccctgttcctgccccaagccgtcaatcagattgtggagcagtacacagtcagatgaaaatactgtaaatgcactcattgggggttttttggttttacttcatatcatgtgcaatgttgtggctttaacattttatgcaactatttatgaagacctctgttgtacctgtaataaatatatagaaaaagcacatacttcgtatggtgagctttatggttttgtgtgtgtgttggggttggcgggtgggtgggtagggtcgtagccctgtgccatcggttcaaagagacttttcgtgaaatttgttggttttgaggactgtaaaagtgatttcatactctgaatataaaactggataatagggtaatgttttaaaatttattatgctattattcagaatgccaaagtattattttttttcccaaaatcagtctggacatttactactttttagactttttgacgttgaactttctgtataaaaattgggctgggttttgagcttttggtaagaaataaaagccgattagcactggccgccccgcggctggtacccaatgcccgagtcactgtggcagcattcgcactggtgtggggagtccttt

SEQ ID NO: 187491 - DNA, 1544 bp, Homo Sapiens
  misc_feature (1353)..(1367): n is a, c, g, or t
ttggcaccgaatgtggactttaacttggaaggaccaaaagtgaaagggagccttggggccactggtgagatcaaaggccccactgtcggaggaggtcttccaggcattggtgttcaaggcctagaaggaaacctccagatgcctggaattaagtcctctggatgtgatgtgaacctgccaggcgtgaatgtgaaactcccaactgggcagatttctgggcctgaaatcaaaggtggtctgaaaggttcagaagtaggtttccatggggctgctcctgatatcagtgtgaaggggcctgcctttaatatggcatctcctgagtcagattttggcatcaacttgaagggcccaaaaatcaaaggaggtgcggatgtttcagggggtgtcagtgccccagacatcagccttggtgaagggcatttgagtgttaaaggttccgggggtgagtggaagggaccccaagtctcctctgctctcaacttggacacatctaagtttgctgggggccttcatttctcaggaccaaaggtggaaggaggtgtgaaaggaggtcagattggactccaggctcctgggctgagtgtgtctgggcctcaaggtcacttggaaagtggatctggaaaagtaacattccctaaaatgaagatccccaaatttaccttctctggccgtgagctggttggcagagaaatgggggtggatgttcacttccctaaagcagaggccagcatccaagctggtgctggagacggcgagtgggaagagtctgaagtcaaactgaaaaagtccaagatcaaaatgcccaagtttaatttttccaaacctaaagggaaaggtggtgtcactggctcaccagaagcatcaatttctgggtccaaaggtgacctgaaaagttcaaaggccagcctgggctctctggaaggagaggcagaggccgaagcctcttcaccgaaaggcaaattctccttatttaaaagtaagaagccacggcaccgctcaaattcattcagtgatgaaagagagttctctggaccttccaccccgacggggacgctggagtttgaaggtggggaagtgtctctggaaggtgggaaagttaaagggaaacacgggaagctgaaattcggtacctttggtggattggggtcaaagagcaaaggtcattatgaggtgactgggagcgatgatgagacaggcaagttacaggggagtggggtgtccctggcctctaagaagtcccgactgtcctcctcttctagcaatgacagtgggaataaggttggcatccagcttcccgaggtggagctgtcagtttccacaagaaagagtagcaggcctttgtatgtgtgtacnnnnnnnnnnnnnnnacaaaacatcagccttgggtggtgtgttcctatataaactccaaagggaaacacaccgactgcctcagcaatcatgcaaagaccttgcctggcccggtggcaagcgctgaaaaaccgaccgcctgtaggctcctggaactatacagataggtaaagagttccaagttcgtccagccc

SEQ ID NO: 187492 - DNA, 1717 bp, Homo Sapiens
  misc_feature (211)..(255): n is a, c, g, or t
  misc_feature (389)..(422): n is a, c, g, or t
ccccttcactttattcctcaaaacatgtatgtcccagttccctccatttcagagccataaacataaagcctacaggtaagatacttaatacccaggacagatctttgtgtgtatatatacataccatatgtagcattatgttatatagtattatataaattacatgaaattttgcataagattggtaagcaagtcacttaaactttatgannnnnnnnnnnnnnnnnnnnnnnnnnnnnnnnnnnnnnnnnnnnnggaagctttcacaggtgggaggattgttgtctggaccatctcatgttattgtcattcctcacttgtctaaacaggaatagggctgagtggaactacggaagacctgtatcctgctcctgatgtttccttttccnnnnnnnnnnnnnnnnnnnnnnnnnnnnnnnnnngcgtgagccaccgtgcctggcctaaataaataatttcgtaagcatatacaatccacttcccactaagaattagggtcaaagacattctgcttgaacacttgcagttacctagatctagttggcctttggttgatagatcctctgcctcagaatttcattgagtttttttcttccttgcctttgggtgtctgcttgccacttcctaagaattcttgtagaaggcagtttcctctacttgcccaagagcactgagtacttctctactatcctattattagcttctatctcttagtgtaacttcaaaacttttaagagcagtgaagttggtcagggacatgtggccacttattattacctaaagaaaacatttgttccctgttcattttattttaggggccagatctaacattgtagtgtctttcaccagatagacttctactgtttcatcaaactcccttcttaactagacctagactttctactccaatcaggctaatctacttactgaatgtgacatatttattcctagttccatacctttgcacatgccctactctccactaattatacttaaaagtccaaaaattttttctttagtaacagacttaggtactgctaagcagttattaacacaatattccttagttttcatatgttggttattcatatgtctatttatatgtatatttatttttatgtatgttactatgtaaatatggtttgcagttgtttttgtgtggaatcttgtctttccgtataagttgtaagctccttgagagcaggatccatgtcattcctttatttttataaattattccccctatcattcctttacagtgcctagtgctgctcattatgtgttcattgaatttgactgacatagttaaaaacttaaggtttattttagactttcaaggaaacaaaagactttagagtcctctctctgtaattctgccccactcatttgtttaccctgggttttatacagttctcttccttctcccctcccacctttccctggctttttgcctccattccatgaggcatacagtaaggctgcctgctagtaagcagtcacataagtgggtacctatccagccattctcttttcagagcatataatactatcttagccaaacttgcctttgcttcactcatcatgcagccttctgggttggttgctatatatatcttttttccttgatgtcccattctcttccacagccctgaggtcttacgaatttttctactttctttttgctgttgatgaattgttttcattaaaaaatatatgc

SEQ ID NO: 187493 - DNA, 1414 bp, Homo Sapiens
ccccaactcccccccagacttctatcacatttacaaatacatacataaatacattacatacagtagccagtctgggaggcagactccccacagaggcatggctgacacatgtcgggaattctaggaaagggcactgggctcccaaatacgtgctcgtgtgttctctcctgctcaggataagccttgccccagcccacccctctcttctgggtttagtttgtccagtatggagagttgccgtaggcaggtttggaggcttgagacttgggctgcagggagctgggctggctgcgctgacccgagccactctgtgcatcctgcggaaggtggtggtgcagcagctgtgagtggggctgctggtgggctggcaagatgtgtaggaatggtgggggtgcatagccaggggccgctcccgaggccaggggcccagtggagcccaagaccgagggcaggctgaaaggtggaggcgtccctgcatgaaatccctgcttgtcaaaagtctgtgtcttattgtagacagaaccagtcatatcaggtagaccagtggtgcttgaagacactgatactcctttgccaggcccagaacctgcagacttgtttggtgcctgcgatgatccagcatagccacctttggagtagtctcctgctgctgtcccctgggtcaggtcgtcataacctgtactgtagccgtgctggccataaccactggcctgctggaagggaggtgtgggagtgctgaggttcaccccatgttgcttggctgaggctggagggacaaacatggtggggccatactggaaggcactgggcatgcctgtgtagtagggaagaccagtgtagctatagccaggtggcagtgcaggattcacgaagggctgctgggctgtgtggtgggtctgtgattggctctgctgtggctgagctggtgtggtagcgggtgcaggggatgcagagtccccacggccaaactttgtgacatcacctggatatggattattagctaggctcccatctcggctggcaagcgctgtgggtgcagcaaagggaattccatagtagtccactggcagccgtgactgcagcatctggagctcgtcatagccatagatcgggtaggcaggaagcagtcctccgggacctacgaggtactggttgtgcagcaggggaggcaccccctgaggtaagtttgggggtgctttgcctgaggtcaccaagggcgcggccctgctactgctgctggatgcactcgcgggggtcccacccagacagaggctgttcgcggtgttcatgctactggacaggctgacgcctgaggatgcggaacttgagacggaggtcgctgccgtggagaaggtggctgaggactggtgggaagaggcgctctccacactggcatgctgctaagctgagccaa

SEQ ID NO: 187494 - DNA, 1898 bp, Homo Sapiens
  misc_feature (933)..(947): n is a, c, g, or t
  misc_feature (1372)..(1389): n is a, c, g, or t
ttggccacaactcaacatgatgcattctatacagagtgctttcaataaatattttggggagggaagagaggtagaaaaggttgtagcagtaataatcctgttaaatcggacatcattctttgggcaaatttaataaaatattgaaccttagatttctctagaatattctacctgtatcttgaatgtaaatttaagaggtataaaaatatgattatagatataaaaagagtaaatcgttttccagatattaacaggatatttattcttgcatattcttcctctactagcttaatggatacaatttgtgaaataatatttaaaaatcttaaacatgtagctgtgactatcacatttttttgtctattagaattaatttttttaaaaaagagtagacttgtttgctataagataatttgtgttgaaatgaacattattccagatttaatggctcaaatatgtatttatcaatttacttcactgacattttgaaggatttttttagtttgttcactgagtttgccttctgtaatatacaaaatagttgggctagactgtaaatatgtaagtctaacctgaagtttgtttgaaagtaactgctttgctccttctcccatatcccctagtcaatgatacacttgatgacatctttgacggttctgatgacgaagaagaaagccaggatattgtgaatcaagttcttgatgaaattggaattgaaatttctggaaagatggccaaagctccatcagctgctcgaagcttaccatctgcctctacttcaaaggctacaatctcagatgaagagattgaacggcaactcaaggctttaggagtagattagtcaaaagaagtcatactattttgcttacttataattatgtagtataaaccaagcacagtgcagatttcttttacaaacacatgtattttgcnnnnnnnnnnnnnnntgaagaccatgagtgaacagttgtttcctaacccatggctatttagaatcttttgccaaagaatgacaatgatgcaaaaatgggaacagtttggattttaattagaactgtttaggagtgatgatgtgtaaaaagttgacttctcttttgcatggcacagagaaattatattccttacttcatgtcagtttatgttctaaatctttttcactgaatataaaaatcttgttaaatgccattaggcaccaacttaaagagggttgtaaaaatattaaaagtatatcgttaattctgtatctgttgcttgtcttttgtaagtgattatgtgttatgaccataggtggttacagctgccaaattatttttaaatggtcaaaaagaagagtgctatttaaacatctgtcttaaacaaaaactgtcataannnnnnnnnnnnnnnnnnccattaggagaacattctagttggtaaatttcaaaatgtgcttgacacctgccttaaatagcacagacctattgtgcacatctttaaattatttcagctggcagaaaagaattacatttaaaactgaaatcaaggcctcaatacaaagattatcctggctcttttctatctctgtgggcctaattgaaatatgtactcttattttagacacgcctctgttaaaacagaccaggttttcctggtctcagacctatgatgacttgtccctttgatgtcactactgtgaattgaatataattagtaaaaatagacgatgaataaataacactttatagtaagaaaacaatatattttggccatctaaaaatgagaattataattatatgaattataatttaaactgtttaattttgtttaatgtgtatattgaatcttccaaattgaagccattattctcaattaagtactacaactatgacaatgcttgactacatttctaaaataaaaat

SEQ ID NO: 187495 - DNA, 1004 bp, Homo Sapiens
ttggctcttcgtctcgcctatcagactgataacaagaaggccatcacttacacttatgatttgatggccaacttagcatttatacggggtcagcttgaaaatgctgaacaactttttaaagcaacaatgagttacctccttggagggggcatgaagcaggaggacaatgcaataattgaaatttccctaaagctggccagtatctatgctgcgcagaacagacaggaatttgctgttgctggctatgaattctgcatttcaactctagaggaaaaaattgaaagagaaaaggaattagcagaagacattatgtcagtggaagagaaagccaatacccacctcctcttgggcatgtgcttagacgcctgtgctcgctaccttctgttctccaagcagccgtcacaggcacaaaggatgtatgaaaaagctctgcagatttctgaagaaatacaaggagaaagacacccacagaccattgtgctgatgagtgacctggctactaccctggatgcacagggccgctttgatgaggcctatatttatatgcaaagggcatcagatctggcaagacagataaatcatcctgagctacacatggtactcagtaatctagctgcagttttgatgcacagagaacgatatacacaagcaaaagagatctaccaggaagcactgaagcaagcaaagctgaaaaaagatgaaatttctgtacaacacatcagggaagagttggctgagctgtcaaagaaaagtagacctttgacaaattctgtcaagctctaaatccatttttgtgtaggggagaataatgtctagtaatgtggaagaacagctatcattcctgtctctgtggcacccgatcaatggcttaaatctgtcgtttttgatattcaggtttcctcaatttagccttagtgaaggaggggttgtacacactgccatttttgtattttaaaggaaaaatgactttcattcccaactgattatgacctttcagatgtcgt

SEQ ID NO: 187496 - DNA, 1296 bp, Homo Sapiens
ctttgtacaaaaaagttgggacctggctactaccctgagatgcacagggccgctttgatgaggcctatatttatatgcaaagggcatcagatctggcaagacagataaatcatcctgagctacacatggtactcagtaatctagctgcagttttgatgcacagagaacgatatacacaagcaaaagagatctaccaggaagcactgaagcaagcaaagctgaaaaaagatgaaatttctgtacaacacatcagggaagagttggctgagctgtcaaagaaaagtagacctttgacaaattctgtcaagctctaaatccatttttgtgtagggagaataatgtctagtaatgtggaagaatagctatcattcctgtctctgtggcacccgatcaatggcttaaatctgtcgtttttgatattcaggtttcctcaatttagccttagtgaaggaggggttgtacacactgccatttttgtattttaaaggaaaaatgactttcattcccaactgattatgacctttcaggatgtcgtcaagtgatgctttcagttgtaacacgtgacttggtgctgtccctgctggtctaagtagaactgtagattcatatgggctggtgttcctgtgcgctgtgggtgtggtgattcagcctggcatttctaccataagtttttggtctgctgatttgctgccctgtcttctcttactttactttatcaatacctggcaaactgaccagaattaccttcctcatggcaaagggggattatggtgaattgttgttcttatagtctgtttcatgaagcacaagtggaatttaatacataaaagagaaaaatatcttagtttgctaccagcatccagcatgaagttgtaaagtggggattaggcacgtgacagtatagcacccatttgaatttaaataaaagtgaaccatatttatctggttatataaaactaaaaatgggggtgtttatataaaactaaaaactaagaatgatgtaaccttttgtctgtgttatctgaacactctacttcctttgcagccttagtcacacaactgagtcatctcaagtactctttaaggacacacagcccaggctgttctgagtcagaatagcccctacaggtatattttaaaactcttcgtaattctaatgtgtactgctggtatagctgaactactgacctggatcttagtcctagcctttttgcttttgcaattcagtatctttcatctctaactaaggaaacactgggattctttcttactgtgggggaagtattgggtagatga

SEQ ID NO: 187497 - DNA, 1075 bp, Homo Sapiens
tgaaagcatcacttgacgacatctgaaaggtcataatcagttgggaatgaaagtcatttttcctttaaaatacaaaaatggcagtgtgtacaacccctccttcactaaggctaaattgaggaaacctgatatcaaaacgacagatttaagccattgatcgggtgccacagagacaggaatgatagctattcttccacattactagacattattctccctacacaaaaatggatttagagcttgacagaatttgtcaaaggtctacttttctttgacagctcagccaactcttccctgatgtgttgtacagaaatttcatcttttttcagctttgcttgcttcagtgcttcctggtagatctcttttgcttgtgtatatcgttctctgtgcatcaaaactgcagctagattactgagtaccatgtgtagctcaggatgatttatctgtcttgccagatctgatgccctttgcatataaatataggcctcatcaaagcggccctgtgcatccagggtagtagccaggtcactcatcagcacaatggtctgtgggtgtctttctccttgtatttcttcagaaatctgcagagctttttcatacatcctttgtgcctgtgacggctgcttggagaacagaaggtagcgagcacaggcgtctaagcacatgcccaagaggaggtgggtattggctttctcttccactaaggagaaaagaggaatcagcaaatctacccaaatggttgttaccaggacccacaaatatgtcagcagaatgggacccacatgtcacttagggaacaatgtaggtgaattaacatccagttaaatgacctattccagactagctggaatcatggaacttcagcccacattttaagtagattaagagtccgcacatcaattaaaatgtggaatgttatttttagtttgaaacaaataatattcagcagaaacaaatgaaaataaacccaaagaagaatgagttaacaacaaaaagtcaaggccaatgaaaaacctgtatggtataagaaaaacaatgcaggaggaagacagagaccaacttttttgtacaaagt

SEQ ID NO: 187498 - DNA, 1757 bp, Homo Sapiens
ttggatcacattgtctcctgcatctctgacttcttggactacatggggatcaaaggccccaggatgcctctgggcttcacgttctcatttccctgccagcagacgagtctggacgcgggaatcttgatcacgtggacaaagggttttaaggcaacagactgcgtgggccacgatgtagtcaccttactaagggatgcgataaaaaggagagaggaatttgacctggacgtggtggctgtggtcaacgacacagtgggcaccatgatgacctgtgcttatgaggagcccacctgtgaggttggactcattgttgggaccggcagcaatgcctgctacatggaggagatgaagaacgtggagatggtggagggggaccaggggcagatgtgcatcaacatggagtggggggcctttggggacaacgggggtctggatgatatcaggacacactacgacagactggtggacgaatattccctaaatgctgggaaacaaaggtatgagaagatgatcagtggtatgtacctgggtgaaatcgtccgcaacatcttaatcgacttcaccaagaagggattcctcttccgagggcagatctctgagacgctgaagacccggggcatctttgagaccaagtttctctctcagatcgagagtgaccgattagcactgctccaggtccgggctatcctccagcagctaggtctgaatagcacctgcgatgacagtatcctcgtcaagacagtgtgcggggtggtgtccaggagggccgcacagctgtgtggcgcaggcatggctgcggttgtggataagatccgcgagaacagaggactggaccgtctgaatgtgactgtgggagtggacgggacactctacaagcttcatccacacttctccagaatcatgcaccagacggtgaaggaactgtcaccaaaatgtaacgtgtccttcctcctgtctgaggatggcagcggcaagggggccgccctcatcacggccgtgggcgtgcggttacgcacagaggcaagcagctaagagtccgggatccccagcctactgcctctccagcacttctctcttcaagcggcgaccccctaccctcccagcgagttgcgctgggagacgctggcgccagggcctgccggcgcggggaggaaagcaaaatccaactaatggtatatattgtagggtacagaatagagcgtgtgctgttgataatatctctcacccggatccctcctcacttgccctgccactttgcatggtttgattttgacctggtcccccacgtgtgaagtgtagtggcatccatttctaatgtatgcattcatccaacagagttatttattggctggagatggaaaatcacaccacctgacaggccttctgggcctccaaagcccatccttggggttccccctccctgtgtgaaatgtattatcaccagcagacactgccgggcctccctcccgggggcactgcctgaaggcgagtgtgggcatagcattagctgcttcctcccctcctggcacccactgtggcctggcatcgcatcgtggtgtgtcaatgccacaaaatcgtgtgtccgtggaaccagtcctagccgcgtgtgacagtcttgcattctgtttgtctcgtggggggaggtggacagtcctgcggaaatgtgtcttgtctccatttagataaaaggaaccaaccaacaaacaatgccatcactggaatttcccaccgctttgtgagccgtgtcgtatgaccta

SEQ ID NO: 187499 - DNA, 1432 bp, Homo Sapiens
ttggctcatctttctcttttcaatcaggcttttccaaagggttgtatacagactctgtgcactatttcacttgatattcattccccaattcactgcaaggagacctctactgtcaccgtttactctttcctaccctgacatccagaaacaatggcctccagtgcatacttctcaatctttgctttatggcctttccatcatagttgcccactccctctccttacttagcttccaggtcttaacttctctgactactcttgtcttcctctctcatcaatttctgcttcttcatggaatgctgaccttcattgctccatttgtagatttttgctcttctcagtttactcattgtcccctggaacaaatcactgacatctacaaccattaccatctcactaaataagactttctatccaataatgattgatacctcaaatgtaagatgcgtgatactcaacatttcatcgtccaccttcccaaccccaaacaattccatctcgtttcttcttggtaaatgatgctatgctttttccaaccaagccagaaacctgtgtcatcttttcaccccaccttcaatcaacaagtcctcaatcaacaagtcctactgactgcacatcttaaatatatctttatcagtccacaagtccttccaattatatttcccaagtatatctagaacttatccacttatatccccactgctactaccttagtttagggctatattctcttgaaaaaaagtgtccttacttcctgccaatccccaagtcatcttccagagtaaaatgcaaatcccatcaggccacttggatgaaaacccttcaaggattactggatagaattcaggctttcccctccagcccccaatcatagctcacaaaccttccttgctatttgttcttaagtaaaaaatcatttttcctcctccctccccaaaccccaaggaactctcactcttgctcaagctgttccgtccccttaccacccctgatacaactgccaggttaatttccagaattcttgcaagactcagttcagaagtcaccttctttcgtgaatgttttgattccctgaggctactttattttggtatggctgaaaaatcctagattttctaaacaaaacctgtttgaatcttggttctgatatggactaggagagagactgggtcaagtaagcttatctccctgaggctgtttcctcgtctgttaagtgtgaatatcaatacctgcctttcataatcaccagggaataaagtggaataatgttgataacagtgcttggcacctggaagtaggtggcagatgttaacgcccttcctcccttgcattgcgccccctgtgcctacctctagcattgtcacgaccacgtagaattgaaaaggccagtttacttgtcagccatcctttcctgaccgttggtgcctagagga

SEQ ID NO: 187500 - DNA, 1732 bp, Homo Sapiens
caaaattaagctaaaggaaaaagtcctttggagttccaatcacacggtttagtataacaatcccataactgtgaagactaattgtaagcttttatagttgattaagtcacacagtgcaaagaaaggtcccattgacccttttggtaaagggagggctggaagccacacagattaagttcaatggatagtccgtatatacatgtgatgaggaacacccaaactaaatttgtgcttcttaggttggtcattctgaatcccgatgcacttctgaagcatcagctcggcaaattgggcaagtacgatttgccttaagccatttgtcaacacacttggcatggaactcgtggttacagggtaagactctaagtagctgccttgactcaaaatcacacatgcatactacacacaaagtctgttctgactggtggttgttaggattgaaccgataagaaggaagttgttcaatatctgctttagtcagtccacgaggctttgcctctcccagtcgctctgccaggtttaacagggcctcgtaattttctacttctccatcttctacatctaattcaaagctgaaagttgggcccactgcaggtggcactggaagcattgataacacatatggcagtaagctgggatgataagggggaggtggtattggctgctgggatcggtatctactacgtcctgtaagcctccgaggcataaatggaggataaggtactccaaaggacacctcctgatgcaaaggatcatgtgttaagaactgcaagggagctgatggaggtaatgttggggggtgggctgatggagggtaagtaaaacctcctactggaagatgttctcctaagagttccacttcattttctatcctttgcagaggcgatcgtgattgctgtgtttggaaagggacaaactggcctggtggtggcaaatgaggaggatgatggggagaaaggtgaggaggatgtataagaaatggatcactagaaataaggggtgggaatgcagcatatggtactggtaagtgctgaactgaacatgcctgaagcattggaggaggcacactacagacagggaggtgctgtccactgaaaaccacagagcatcctgggacctgctgtgtactacaagcagggatgtgctggcctgtgcagagtggaatcccatgtggtgccactgttgttactgtgtaagaaacagggactgttccttgatggagctgatcatgtatgtcaaccatgactgcattctgctggggtggatgagcagcaggatgtagcagacggggagatacattcggagggtggaaggctcgaggctcctctattgcttgctgctgtgcgtaagggagatggtgatagttttcatcttgactaatggaattatgtcgagacagacgatcccttcttcctctctggcgcctgacaggaggacttcttctgttgcgtgcaggtgtgttgcatcgttcccctgagaagtgatgttggcttggtcgaactgaagggggctgcctatttgatgtcatctcccatggtcgcattggtggtgagggagctggtgatgctgatgtataatcaaagactgaatgagagaggcgctgtctcttaggacttggactatcttcactcctttcacaaatcaccttgttaggatggccaggtagagatgctgaattggccccgggagatatcttgtcactgtcatcatgacaaatgtggtcgtgatccaa

SEQ ID NO: 187501 - DNA, 1184 bp, Homo Sapiens
ttggctcttctgcggcaagcaggtctaggaattcgcctggttcccacctcgcgtcccttgccttccttcctagtctacccactgtagtgccccctgcgtcccgctccctcctagccgactcagagcacaagaaggattgccacggtttccattgcagcagccgtggcgcctctgaccctttttttatatcgcggcgacggcgggctgtcgtcacgacgacgtgcggacgcagcggcgggggcctttcagcttatgtggagaagtcgctgtgaagccacctataaatccatttactgaatttatggagaaggctgtaaatgatggaagtcattcagaagaactcttttgccatcttaaaactatatcagagaaagaagatttaccacggtgtaccagtgaaagtcatctcagctgcctgaagcaggacattctaaatgaaaagactgaattggaagcaacacttaaggaagcggagttggtaactcattctgtagaattgcttttgccactatttaaggacaccattgaaaagattaattttgaaaatgcgaatctttctgcattgaatttgaagatttctgaacagaaggaaatattaataaaagaattagacaccttcaaaagtgtaaaactagctttagaacatcttcttagaaagagagactacaaacaaacaggagacaatttatccagcatgttgctagaaaatctaactgataatgaaagtgaaaatactaatcttaagaagaaggtatttgaaaaggaggcccatatccaagaactttcttgtttgtttcagagtgaaaaggcaaatactttgaaagcaaaccgtttttcccaatcagtaaaagtagtacatgaacgactacagatccaaattcataaaagggaagccgagaacgataagttgaaagaatatgtaaagagcttagaaaccaagatagccaagtggaacctgcaatcaagaatgaataagaatgaggctatagtgatgaaagaagcaagtagcaaaaaactgtagctttaaaaaaggcatctaaagtttacaaacaaaggcttgaccattttacaggagctattgaaaagcttacttcccaaattagagatcaggaagccaagttgtctgaacaatttcagcttccaatgcctggaaaagtcattatgagaaaattgtgatagaaaaa

SEQ ID NO: 187502 - DNA, 950 bp, Homo Sapiens
ttggcactcttctgcggcaagcaggtctaggaattcgcctggttcccacctcgcgtcccttgccttccttcctagtctacccactgtagtgccccctgcgtcccgctccctcctagccgactcagagcacaagaaggattgccacggtttccattgcagcagccgtggcgcctctgaccctttttttatatcgcggcgacggcgggctgtcgtcacgacgacgtgcggacgcagcggcgggggcctttcagcttatgtggagaagtcgctgtgaagccacctataaatccatttactgaatttatggagaaggctgtaaatgatggaagtcattcagaagaactcttttgccatcttaaaactatatcagagaaagaagatttaccacggtgcaccagtgaaagtcatctcagctggcgaatctttctgcattgaatttgaagatttctgaacagaaggaaatattaataaaagaattagacaccttcaaaagtgtaaaactagctttagaacatcttcttagaaagagagactacaaacaaacaggagacaatttatccagcatgttgctagaaaatctaactgataatgaaagtgaaaatactaatcttaagaagaaggtatttgaaaaggaggcccatatccaagaactttcttgtttgtttcagagtgaaaaggcaaatactttgaaagcaaaccgtttttcccaatcagtaaaagtagtacatgaacgactacagatccaaattcataaaagggaagccgagaacgataagttgaaagaatatgtaaagagcttagaaaccaagatagccaagtggaacctgcaatcaagaatgaataagaatgggctatagtgatgaaagaagcagtaggcaaaaactgtagctttaaaaaaggcatctaaagtttacaacaaaggcttgaccattttacaggagctattgaaa

SEQ ID NO: 187503 - DNA, 1525 bp, Homo Sapiens
gtgcgtacttcccggattgttctcatgtgacgatgtaagacatggccatgtggaggctgaggcatatcaaactcttcttctccctggctatggagcgactctgtatcatccccaggagcactgactggtttctcaccactccccctctcagtctgaactgtggcatcttgctttccaaagttctggtccactgtactggtcccctgctcacacacattctttatagtctgggttgctgctgaaacagtttctgggaccctcaaggaacactccatggtttggattcctatgttattttggctgggcctttcaatcaaggccttactaggattttcctgattagtactccgtccttctttctggtcttctagcacatctgtcaccattgcctctccttgaggactggatggcccttgtatgaccatcttctgggaagcaggagaaacagggtccttgacaggactaatgggcttcataggctgttgactctgcctgattgtatggtcaccctccaatttttctttctcctcttctccttgagaacttggaaagtggagcaagttccccctgatgggtgtggtggggggatcctcacttcgagcctcattctcttgcctggcttcacagatacagctcaacacagacatggtcttctggggactggcaacagactcagcaacagcagtagatccattttttctttcaccagttgcaggcttttccaggttgaactgcaaagactcttcactcgcctcagtctcaggactaaccagtttcattcttagacataatttatcatccacgtctggggcagccccagaatccccttttccactcccaagtatgggatcatgggtctccaccatgctttcagccatgacatcactggttgctatggtgctttctggatagttgctaatacctggtcttaagaggagcaacaggattcagttccacttctgcatctggacaaaggatgctgcatgagccctcagccaacccacatctgccagcatcaggcataggtagcaggagactccagacggcatgattgttacctcccagcactgacaataggagtactgtgtctcttgggctccaattttaggtgcccaataagaggtggggttgcaccagtcaatggtgggatgatatcaccttctttaggcaaagtgaaatgaaatggggtttcactagaactttcacagaagctttgtgaggcatgggcagagggcttccccagcttctgggcctctgcatctgagcttagctgctttgcattagccatttttgagtcttctgttaatgaattacttgttttctcctgagtttggggctgctgcaactcctggtcaagtcttaaaggatcatctgctctcactaaaggtaaggaaggctgtgaagaatcttgctctacaggttctgtttctgcagtccctgatttcagatctccttcatattctacactcttttcttccttggtgtctaatctattctcagcacatggttctatttctggagccaa

SEQ ID NO: 187504 - DNA, 1393 bp, Homo Sapiens
ggccggaccgggcagccagaaaaatcatttttcttctctgggaaggtgaacatttgtagcattgatttcccggatctggtaacatggcaaaagatgccggtctaattgaagccaacggagaactcaaggtcttcatagaccagaaccttagtcccgggaaaggcgtggtgtccctcgtggccgttcacccctccaccgtcaacccgctcgggaagcagctcttgccaaaaacctttggacagtccaatgtcaacattgcccagcaagtggaagcgcaacaggaaaggagagaagaatggcaagggcctacggcatttctccatgaaggtctgcgagaaggtgcagaggaaagggaccacttcctacaacgaagtggcagacgagctggttgcggagttcagtgctgccgacaaccacatcttaccaaacgagtcagcttatgaccagaaaaacataagacggcgcgtctacgatgccttaaacgtgctaatggccatgaacatcatctccaaggagaagaaggagatcaagtggattggtctgcccaccaactcggctcaggaatgtcagaacttagaggtggaaagacagaggagacttgaaagaataaaacagaaacagtctcaacttcaagaacttattctacagcaaattgccttcaagaacctggtgcagagaaaccggcatgcggagcagcaggccagccggccaccgccacccaactcagtcatccacctgcccttcatcatcgtcaacaccagcaagaagacggtcatcgactgcagcatctccaatgacaaatttgagtatctgtttaattttgacaacacatttgaaatccacgatgacatagaagtgctgaagcggatgggcatggcttgcgggctggagtcggggagctgctctgccgaagaccttaaaatggccagaagtctggtccccaaggctctggagccatacgtgacagaaatggctcagggaactgttggaggcgtgttcatcacgacggcaggttccacgtctaacggcacaagtgacctgaccaacggtgcagatgggatgctggccacaagctccaatgggtctcagtacagcggctccagggtggagactccggtgtcctacgtcggggaggacgacgaggaggacgatgacttcaacgagaatgacgaggacgactgacgtcctccccacttcagattcggcttcaggaaaacgtttagcgaaaagaaacttttttttaaatgtgggttttctgtttccttttggcctactccccaagaagatattgggtaagctattgaatttagatatgcacctctgataagcaaggattgttttcccgtagaattaggacgtgctgtggatgtgtgttttgataccagtgtgctga

SEQ ID NO: 187505 - DNA, 901 bp, Homo Sapiens
actttgtacaaaaaagttggatttcaaccacatccatgaaaataaaacacctcctgttgtggatggtgagcccctgatgccgcttatttgccgtgagtttggacggcacccctgctggcggatagcaagactctgtggagtttgttcagtggtacggtgtccaagcaaacagcagaatgcaactttctaaacagccccaagcaaacagcagaattcaactttttaaacaataaacaccatcaaccttattgactttattgtcccttaaattatattgactgttgtgattccatcaagtttgtacactcttttctctccctgttttgcagcaacaaattgcgaagtgcttttgtttgtttgttttcgtttggttaaagcttattgccatgctggtgcggctatggagactgtctggaaggcttggaatggtttattgcttatggtaaaatttgcctgatttcttacaggcagcgtttggaaaccttttattatatagttgtttacatacttataagtctatcatttaaagacatgtactgaaacaaatgtatttgtttcataagcatcttcctgtaatctattataaaattgaaattaaatatagagaatgttttaacaattttttaactcaaaatttgtcaatcatttttaatagttctttttttataaaaagaaaaaggaatttaaggacaggcagtagtctcttttaaaatttattcacaaaacccattaactgcacagttgctattagctgcctgttctaaaacgatagtctttttattgaaacacaaataaacttttctgtaatattttatggtatataaagagactttaattgtttgacttgtttaacttggcactgttagtttttattaataaaacgcgcatgggcattttaaac

SEQ ID NO: 187506 - DNA, 1693 bp, Homo Sapiens
gcttttttataatagccaactttgtacaaaaaagttggctccacttgaccaggctggcgctctccacctgccccgctgcctgccactgccccctggaggcgcccaagtgcgcgccgggagtcgggctggtccgggacggctgcggctgctgtaaggtctgcgccaagcagctcaacgaggactgcagcaaaacgcagccctgcgaccacaccaaggggctggaatgcaacttcggcgccagctccaccgctctgaaggggatctgcagagctcagtcagagggcagaccctgtgaatataactccagaatctaccaaaacggggaaagtttccagcccaactgtaaacatcagtgcacatgtattgatggcgccgtgggctgcattcctctgtgtccccaagaactatctctccccaacttgggctgtcccaaccctcggctggtcaaagttaccgggcagtgctgcgaggagtgggtctgtgacgaggatagtatcaaggaccccatggaggaccaggacggcctccttggcaaggagctgggattcgatgcctccgaggtggagttgacgagaaacaatgaattgattgcagttggaaaaggcagctcactgaagcggctccctgtttttggaatggagcctcgcatcctatacaaccctttacaaggccagaaatgtattgttcaaacaacttcatggtcccagtgctcaaagacctgtggaactggtatctccacacgagttaccaatgacaaccctgagtgccgccttgtgaaagaaacccggatttgtgaggtgcggccttgtggacagccagtgtacagcagcctgaaaaagggcaagaaatgcagcaagaccaagaaatcccccgaaccagtcaggtttacttacgctggatgtttgagtgtgaagaaataccggcccaagtactgcggttcctgcgtggacggccgatgctgcacgccccagctgaccaggactgtgaagatgcggttccgctgcgaagatggggagacattttccaagaacgtcatgatgatccagtcctgcaaatgcaactacaactgcccgcatgccaatgaagcagcgtttcccttctacaggctgttcaatgacattcacaaatttagggactaaatgctacctgggtttccagggcacacctagacaaacaagggagaagagtgtcagaatcagaatcatggagaaaatgggcgggggtggtgtgggtgatgggactcattgtagaaaggaagccttgctcattcttgaggagcattaaggtatttcgaaactgccaagggtgctggtgcggatggacactaatgcagccacgattggagaatactttgcttcatagtattggagcacatgttactgcttcattttggagcttgtggagttgatgactttctgttttctgtttgtaaattatttgctaagcatattttctctaggcttttttccttttggggttctacagtcgtaaaagagataataagattagttggacagtttaaagcctttattcgtcctttgacaaaagtaaatgggagggcattccatcccttcctgatggggacactccatgagtgtctgtgagaggcagctatctgcactctaaactgcaaacagaaatcagtgttttaagactgaatgttttatttatcaaaatgtagcttttggggagg

SEQ ID NO: 187507 - DNA, 1882 bp, Homo Sapiens
ctttgtacaaaaaagttggcactccagcccccctgcctgccactgccccctggaggcgcccaagtgcgcgccgggagtcgggctggtccgggacggctgcggctgctgtaaggtctgcgccaagcagctcaacgaggactgcagcaaaacgcagccctgcgaccacaccaaggggctggaatgcaacttcggcgccagctccaccgctctgaaggggatctgcagaggtaagatgcttgtggtttggcccctttaaaaaaaatactagtccccatactccagaagtttagtaattctgagaccatgtatggtgatgctttgttgttggtagcttggcagaaaggcacatgatttcagcagtctggaatgcaattcagtgtgtctgggcccaacgaaagcgcatacggaaaagtgattcctgactaacttattgttctggtctggagtctccggggaattgtagggaactttaccataaattgaatttaacagcagaaaatatgtatgagtttcaggcggtggtttggaatcttaactttatccccttctacctttctcttttggtgatctttgcagctcagtcagagggcagaccctgtgaatataactccagaatctaccaaaacggggaaagtttccagcccaactgtaaacatcagtgcacatgtattgatggcgccgtgggctgcattcctctgtgtccccaagaactatctctccccaacttgggctgtcccaaccctcggctggtcaaagttaccgggcagtgctgcgaggagtgggtctgtgacgaggatagtatcaaggaccccatggaggaccaggacggcctccttggcaaggagctgggattcgatgcctccgaggtggagttgacgagaaacaatgaattgattgcagttggaaaaggcagctcactgaagcggctccctggtaagtggagactgagcacttcagacactgtactgagatgcatttctggtctaaatctttgtagaaatgagtgcttgagcctgtttgtgtcggtatgcctctgagaagtcttccctcttatatgtctctagtttttggaatggagcctcgcatcctatacaaccctttacaaggccagaaatgtattgttcaaacaacttcatggtcccagtgctcaaagacctgtggaactggtatctccacacgagttaccaatgacaaccctgagtgccgccttgtgaaagaaacccggatttgtgaggtgcggccttgtggacagccagtgtacagcagccctgaaagtaagttccttcagggacgtgtagactgttgcctggcaggtgggtgggatgtgaacatctttttgaagaaagagaaatatcacccctaactttccttctctcctttctcttacagaagggcaagaaatgcagcaagaccaagaaatcccccgaaccagtcaggtttacttacgctggatgtttgagtgtgaagaaataccggcccaagtactgcggttcctgcgtggacggccgatgctgcacgccccagctgaccaggactgtgaagatgcggttccgctgcgaagatggggagacattttccaagaacgtcatgatgatccagtcctgcaaatgcaactacaactgcccgcatgccaatgaagcagcgtttcccttctacaggctgttcaatgacattcacaaatttagggactaaatgctacctgggtttccagggcacacctagacaaacaagggagaagagtgtcagaatcagaatcatggagaaaatgggcgggggtggtgtgggtgatgggactcattgtagaaaggaagccttgctcattcttgaggagcattaaggtatttcgaaactgccaagggtgctggtgcggatggacactaaa

SEQ ID NO: 187508 - DNA, 1695 bp, Homo Sapiens
tggaaggaggcccaaaagcgacatggcaaaccaccgggcaggggactcgctctttgttgcttcccaaacacttagacgccagcagcatgggttggtgtgctgggctggttaaggccgatggtggagcagagccaacttgcaaaatccacttcgtcagcatcagatctcttgataaaagcatgaaccatgagttgcttcaaatctgctctctctgcggggttttttattaagcatttattcacaaaatcttgaaattccagactgaacactccactgggcagttttggaggaggctcgttgactatgtaatccaacaactcaaaaattgccatgggaggtcggctgtccattccgtatgagctaaggggcctcccgggggtccttggcctgggtggggtctcagccgcatctccttccacctggcacccaaacatcagctccagctccttggcatctggaggagggatgggatacctcccaaccgccatctctaccagagacagtcccatgctccagatgtctgactgcacagagtaatgagtcccctggagtctttctggcgacatgtaggaccttgtgcccacgaaggagttggccatggagtcgatgagctgcccgctgaccccaaagtcacagagcttgatctccccacgggagttgactaggatgttggagggcttgacatctctgtgcatgatcttgtgcttctccctcagatatgtcaggccttttattacagcaatgctaacttttcctaaaatttgttcaggaattcttccagctttcttcaggacttgatccagagaacctccatccatgtgctccatgcagatactgatctcgccatcgctgtagaacgcaccatagaagcccacgatgtacggagagttgcactcatgcagaacctgcagctccctttatgatctggttccggattgcgggttgatctccagatgaattagctttctggccatgaccaggccagaaggcttgtgggagaccttgaacaccacaccgccattgccagcccccagctcactgatcttctcaaagtcgtcatccttcagttctcccaccttctgcttctgggtaagaaaggcctcaaggcgctttcgctgctgctcatcaagctctagctcctccagcttcttctgcaaggcctccaagttggtctccgcagagctggtcccgttaactgcagagccgtcgggggccgggttcagctggatgggcgtcggcttcttcttgggcattttggacccgggtaacgcgcttccaactccggggggagggcagcacctctcgcttcctcccgctgcgctgccccgcgcccgctgcgcaggaccaagtccgggccgcgggccccggggctgccttcagcgggtgcgccccgcgcggtcccgtcagcgccgaggggccggtagcggtctcagtggacccccgccccacccgcccgggactcggcttcgcgcgcagagagccgaaaggctgccctgcaggagcggagcgggctgaacgtgcggttcggcagcccgggattcccttcctctctctctctcaaccaaccagtccctccggctcgggcggcacagccgcgcgcgcaccagagcccagctccagctcctgccggggaaagtgccgccgccgccgtgctcctagccgctctgcgaagcggccaacttttttgtacaaagt

SEQ ID NO: 187509 - DNA, 1705 bp, Homo Sapiens
ttggctctgaacttggagacaggcaaaatgaaagttatctcaattttgctcgaaagagaataaagaaccctgaaggaggcctgtacctggctgtgaccctgttggcaggcatcactggagttgtcatcacgctgtgcctcatattaattatcacttcctccaccaaaaccatccggaggtcttactttgaagtcttttggtacacacatcatctctttgtgatcttcttcattggccttgccatccatggagctgaacgaattgtacgtgggcagaccgcagagagtttggctgtgcataatataacagtttgtgaacaaaaaatctcagaatggggaaaaataaaggaatgcccaatccctcagtttgctggaaaccctcctatgacttggaaatggatagtgggtcccatgtttctgtatctctgtgagaggttggtgcggttttggcgatctcaacagaaggtggtcatcaccaaggtggtcactcaccctttcaaaaccatcgagctacagatgaagaagaaggggttcaaaatggaagtgggacaatacatttttgtcaagtgcccaaaggtgtccaagctggagtggcacccttttacactgacatccgcccctgaggaagacttctttagtatccatatccgcatcgttggggactggacagaggggctgttcaatgcttgtggctgtgataagcaggagtttcaagatgcgtggaaactacctaagatagcggttgatgggctctttggcactgccagtgaagatgtgttcagctatgaggtggtgatgttagtgggagcagggattggggtcacacccttcgcatccattctcaagtcagtctggtacaaatattgcaataacgccaccaatctgaagctcaaaaagatctacttctactggctgtgccgggacacacatgcctttgagtggtttgcagatctgctgcaactgctggagagccagatgcaggaaaggaacaatgccggcttcctcagctacaacatctacctcactggctgggatgagtctcaggccaatcactttgctgtgcaccatgatgaggagaaagatgtgatcacaggcctgaaacaaaagactttgtatggacggcccaactgggataatgaattcaagacaattgcaagtcaacaccctaataccagaataggagttttcctctgtggacctgaagccttggctgaaaccctgagtaaacaaagcatctccaactctgagtctggccctcggggagtgcatttcattttcaacaaggaaaacttctaacttgtctcttccatgaggaaataaatgtgggttgtgctgccaaatgctcaaataatgctaattgataatataaataccccctgcttaaaaatggacaaaaagaaactataatgtaatggttttcccttaaaggaatgtcaaagattgtttgatagtgataagttacatttatgtggagctctatggttttgagagcacttttacaaacattatttcatttttttcctctcagtaatgtcagtggaagttagggaaaagattcttggactcaattttagaatcaaaagggaaaggatcaaaaggttcagtaacttccctaagattatgaaactgtgaccagatctagcccatcttactccaggtttgatactctttccacaatactgagctgcctcagaatcctcaaaatc

SEQ ID NO: 187510 - DNA, 1604 bp, Homo Sapiens
gagcaatgcttttttataatgccaactttgtacaaaaaagttggatccccttctggttcttatcttcatcccgttgtttgactttgtcatttatcgtctggtctccaagtgtggaattaacttctcatcacttaggaaaatggctgttggtatgatcctagcatgcctggcatttgcagttgcggcagctgtagagataaaaataaatgaaatggccccagcccagccaggtccccaggaggttttcctacaagtcttgaatctggcagatgatgaggtgaaggtgacagtggtgggaaatgaaaacaattctctgttgatagagtccatcaaatcctttcagaaaacaccacactattccaaactgcacctgaaaacaaaaagccaggattttcacttccacctgaaatatcacaatttgtctctctacactgagcattctgtgcaggagaagaactggtacagtcttgtcattcgtgaagatgggaacagtatctccagcatgatggtaaaggatacagaaagcagaacaaccaatgggatgacaaccgtgaggtttgttaacactttgcataaagatgtcaacatctccctgagtacagatacctctctcaatgttggtgaagactatggtgtgtctgcttatagaactgtgcaaaagaggagaataccctgcagtgcactgtagaacagaaagataagaacttttctctgaatttgggtcttctagactttggtgcagcatatctgtttgttattactaataacaccaatcagggtcttcaggcctggaagattgaagacattccagccaacaaaatgtccattgcgtggcagctaccacaatatgccctggttacagctggggaggtcatgttctctgtcacaggtcttgagttttcttattctcaggctccctctagcatgaaatctgtgctccaggcagcttggctattgacaattgcagttgggaatatcatcgtgcttgttgtggcacagttcagtggcctggtacagtgggccgaattcattttgttttcctgcctcctgctggtgatctgcctgatcttctccatcatgggctactactatgttcctgtaaagacagaggatatgcggggtccagcagataagcacattcctcacatccaggggaacatgatcaaactagagaccaagaagacaaaactctgatgactccctagattctgtcctgaccccaattcctggccctgtcttgaagcattttttttcttctactggattagacaagagagatagcagcatatcagagctgatctcctccacctttctccaatgacagaagttccaggactggttttccagtacatctttaaacaaggccccagagactctatgtctgcccgtccatcagtgaactcattaaaacttgtgcagtgttgctggagctggcctggtgtctccaaatgaccatgaaaatacacacgtataatggagatcattctctgtgggtatgcaaagttatgggaattcctttataggtaactgccatttagactgatggccctacttttgagtgctgatttaaaggcaaaattgcagaataacaaagaaatggtatt

SEQ ID NO: 187511 - DNA, 1256 bp, Homo Sapiens
ccatcacagccacagctgccagccacagccctccacagtaagcactggggcctgtggtcacccatccatcataggtctggtctgcatagcctccattttcaatgagtccatcatggtccttgtcaaacttcatttcagattccatcacagctagacacacaggccacatgtcttcaggaagttttgatcacccgtgaggtaatagtcccgataaacctgcagcacaaacttcaggttcaggtccttccaatcagcagtatcatggattaaatatgcattgacgcggagccatggttcatcatctgggtccccaatatcatgggggatgacgttcctccttttcacaggtgccatcaccccactcatcaggtaccgtcgccgtgtcaggtcctccctgagagtggccagagccatgtcatactgtaggctgagctcaagtttgggccagagcatgatgagggcaaaggaagcataaaagtggacatcatatgtgttgtacatgcggtactcctggccctcaaggtagccaaatcgaccgtagtcccgtagggtggggcggaggtgacacatgtttctgcccagctcctctggtagggagtcctcaagaacttccagccacactgtgcctccatcagccaggaagtatagttcattgaacagcgcagatttgtaccaggcaggcagtgatctgtcatccaataccgggctctgccaagctgagatcctctcttcccactctgcgtatcggcacagtgcatagtggctgagggcaggtgctgcatctccatcctggccaaagaaccttgtataccgcctgtagtggacttggcctttagctccaaacatgatcctgggcatgtcccaagccagtgaaaactccaggcggcactggcctcgaggtcgcaacttgctggaaacacacacagctccagcaatgcctactcctttctgcgtaggggtgctttggcctgagagaaacacaagagaattcaggacaggagccccttcagccccagggatagggatccctaacatggaaacaaggcctacttattaccaggcctcccacccctggtcccaagacagggacaacctctcttcccaccatctcccagtcagaccccccatcaccagtgggagagtccagctgtccatcctgaagtagatcctgccacacctgctgccccgtgctgtcagggtcaaaggctgtgatgtgggttaccgtggtagctgccgtgactggtgcagccacccaa

SEQ ID NO: 187512 - DNA, 1199 bp, Homo Sapiens
ccacagtactgtgttgcaaacagctttccatcaggagtgggatctgagaaagcaatttcttctttgctcaaatatgagccatatataaagttactcgttaggcattcaatcatgcgagaagcaattttcttccgacgcatcatgctgaatacccatattcgactgatcccgcagattgcaggctctggtaatgttgagcagcaccaggctttttgcctttcaaatctgactttttcttcttctgacctgataactggaagtttctcttctataactctgtagccccattggatatgttccgcaattaggcagccaactacttttttgtcattggaaatgaagagaagtgttttagttctggaatagcacattagtggagcctgttgaaaacctaaatcattgtcaaccatctctctaatctcgtcaacctttttcagggcatactttgggtcttcaggaagaaccattattatcctgccatcagggtattcagccagaattctttctttcttccagcccacatatttaacagcacttataaactggttgtggaaaagcagatgctgtgtttcatcttctggatttgaagctgtatacagcattccacaaacattacaagaaactgctccaaatcttttttgtcctgcatctataatcaactgtttttcatcagttttctctgcttcttttagtttcaagtcctttggaattgttatctccaaatgggaattacacttaggcaaagaatgatttcgtggtgtctccctgttatcactgcttttagatgtctggttactgagaatactatgctgttggggagctgaacctggaaatttattctctcctgtatcaatttttgcttgactgagcagagtcgaagcagcagtaacattttccactggactgttttctagcttggattccaaacattggctgaaattcttatttgatgctgaatcaaaagaatgtttcatctgattatccaatggtgggtcagaaggttttatctcattggccaaatgacaattttcaggagccctttctgtggttttattaatttctactgtaatatcattaattttcacttcttcagaattaatttctttcattttttcctgctggcaagttatatttctatcatgtagctttgtccctaaaaatgtactttgagtcactggatgatgcatttctaaagccaa

SEQ ID NO: 187513 - DNA, 1178 bp, Homo Sapiens
  misc_feature (130)..(178): n is a, c, g, or t
ttggcaatcaaggagtcgacattaattcctcctcctcctcctttcgagcaaaccttccccagcctccagcccggcgcctccacccttcagagacccaggagccaaaagcgagccgaagatgggcctgctnnnnnnnnnnnnnnnnnnnnnnnnnnnnnnnnnnnnnnnnnnnnnnnnnagttcccttggatgaaagagaagaaatccgccaagaaacccagccaatccgccacgtctccttctccggccgcctccgccgttccggcctccggggtcggatcgcctgcagatggcctgggactgccggaggctggtggcggcggggcgcgcaggctgcgcacggcttacaccaacacgcagctgctggaactggagaaggaattccactttaataagtacctgtgccggccacgccgcgtcgagatcgcggccttgctggacctcaccgaaaggcaggtcaaagtctggtttcagaaccggcgcatgaagcacaagcggcagacgcagcaccgagagccgccggatggggagcctgcctgcccgggagccctggaggacatctgcgaccctgccgaggaacccgcggccagcccgggcggcccctccgcctcgcgggcggcgtgggaagcctgctgtcacccgccggaggtggtgccgggggccttaagcgcggacccccggcctttagccgttcgcttagagggcgcaggcgcgtcgagtcccggctgcgcgctgcgcggggccggcgggctggagcccgggccattgccagaagacgtcttctcggggcgccaggattcacctttccttcccgacctcaacttcttcgcggccgactcctgtctccagctatccggaggcctctcccctagcctacagggttctctcgacagcccggtccctttttccgaggaagagctggattttttcaccagtacgctctgtgccatcgacctgcagtttccctaacctgtttcctcctcccggtcctttcgacccccgcgctccttggccgtctactggaaaaatcgagcctctcccaccctcagtcgcatagacttatgtgttttgctaaaattcaggtattactgaattagcgtttaatccacttcctttcttcttcttctaaaatattgggcactcggttatcttttaaaattcacacaaaaaaattccgt

SEQ ID NO: 187514 - DNA, 1652 bp, Homo Sapiens
cactgtgcccaccatgattctatcctagtattttatcttttttcttgttgttgtagaggcattatcaaccgtttaaaccctcaagaccaaattatctttacatttttttaaagagaagatatccatccaaggttttccaacattgcgtatttgtcctccttgccaaaaaagagggtagaataagtaatgtttaattaatactgaattttttaatgtgcaaaaatctaactctgctttttaaagcaagtagaaggagtgacaatatggcaccattccaataatcaaacaccaataaaaatggcagcagtacaacaatctaagcaaatctcaaatacaacatacttgtaattagaacacaatgcaatgacttgattttagcaagaactagacacttaatttggtaaaagaaaccaaacaatgcattatattgaatactaagctaagttaccataattagtcttacaaattctcaaatttcacaactacttttgaacatctaaatttaaacctaaattttttaattaaatgcctgttcaacaaagctaattggaacaaacacatttatgtaaatttacattctagaataccagggtaaacaaggagacgttattcaaagatgaatgagaaagttctattctttttcatcatttgtgtgatcaggttgcaaaggacatgcttttctctttgcttttcctaagccactgcttcctgcctcttcaggaatctgattctctttttcagaatctttaggggacaacctaaagaattctccaattcctttttgccacttgggagttgggcgcacgcaaacggggttccctcctgcatatttattttcagctttcctcgatgaaactgatgtcgaattagtggcagaggtggaagaaccaagcacctttctgggggctcgagcagccaccacttttctgtaagtgcctggaacactgtctgctttagtccgcaccatgttcaaacaagaagagaggagaggagagaacgaactgacttcccagccgagggtgtttcactggacaaggacccgaaaactatcccgccacagtttatattggtctctttcccgcgcgctccaaggtctctcccgagccaccgctcccattggttccgcgccgttccccctgaaccaattgccaatgcccagtggtgacagcggcgaggcttcttgcagcgcgaatccgtccatcaacacgcaaaggcctaggattcgtaggcgccccaggtgggcggtaccaggactctccaggggtacccgactagtgggtgctaagtttctgaactacagaaatgagcctgcttagaaaagaaaacctagcaaagacagcgaattacaaacgatcttcaaaagttactatagctttaagtccataatgattgactcctggaggtgaaacctgaaattaagcggactttttgatgcaaatcaaaattaaaagaacttgagaactttcctttagtcccccaggcatgaactctttgtacagcatccatactaaaacaattctatggaatggggaaaaggaagctaatacaacttgtttacaagggtttttttaaatgtctttaggatgatgtgagactaaacaaaaactagggggattgtatatacatacacacataaaaagaaactaatccaa

SEQ ID NO: 187515 - DNA, 1355 bp, Homo Sapiens
gatggtttttcaccaggttttgttgaagggcatagccatttttccaacaacatgtcccagactttttccaaattaatttcattgacttcggctatttctttagctgctgcatgaatatcaggataatctgtgccagatgaattctgaattctttgattgatgctaggatgttcgtagagactgacaataagatgtgctggctttccgatcactcttaaatattcctcagtgttcagcttgtgggctatgagcacagcttctgtgcccgatcgccggtactggatatgaagcttcttcaacaaagcctcggctttttcacgtttttcgtcctgcgatgggatattctgtagccatctctcagctaaataaaggcagaatttcaaagcagatatcttgaaggaaccttcagggatatcctgggcaaggctgatggcaatagctacagcccactctgggttgactatagagagtaagcaggattcgatggtctgcgtgatcttagttatttccttgttaatcagtgttgaggatttagcttgtgttaacttcaggagctttggcttcagttttttttcgaaaacgtgttttgctgtagacacgtacagagtgtccagagagaacttcattaatttcgaaattaagagcaatgttgggaaagattcttcactgagttctgtagagagaattttccagaagttctgtgctgtgccaaagaatatcaggtgaaaaggcagtctagtttgggcagctgatggcaaagttatgacatgttccaacatatactgatattctagatccacgggaggagaaattcttctgtatgacttcaaatgtttcagaatactcaatgcctgattaatattaatattggttgtcttttcatcagctcgttctataactttcaagacaacttcaatcatttcatagtcataaggatccaacttatgtagtattccactaagactgatgaccaaatcttttgtgctcgtcagtaaaggaaccatctcaagggctttggccaggagtttgggatgccgccgctttgcagagtccatgcttgcatctccctggccttggccggcatttgtgttgtggagcagcgtttcaatgaagagctgaagaactgcatcgcagtccaactgaaatgtgctaaaagaagcattcaatacacaccagtctcccaaactgcaggcatttccatgcaaagtatctgacaaaacacttgggtacatgcttccattgttgaaatttaaccttgtcattgtccagtctcaaaatcagacaaactacctgtcatcaaagctaattattgccttttaaaaatcagatattaggccgggtgcagtggctcacac

SEQ ID NO: 187516 - DNA, 740 bp, Homo Sapiens
ggggtgcagctcttctggcttaagttgtccagcaggacaaggtcggcaccagcctcagctgcctgcacggcctcctgcaggctgatgcattccacttccaccttcagagcgaagtcagccgcctgtctggccgcccgcaccgcattctccacgccaccggcggccaccacatggttatccttcaccatcaccagccctcccaggtcgtagcggtgcgaggcggccccgcccaccaggagcccatacttctccaccagccggaagcctggcgtggtcttcctcgtgcctgccacgtgcccagtccagccggcccccctggcggcctccactgcagcggcggcagcactggcaatgccactgcagcgggccagcgtgttgagggccacccgttcccccagcagcaggcagtgggcagggccccggacctcggccactctggccaccggcaccagcttcgatccctcggggaggaaccaggagacttggcagttgagttgggtaaatatggcatcgaagaaaggctgccctgccagtaccccaggggatttggcccacagcgccgcctgcgaggggcctgccccgctgaccaaggctgcgtagttgagccctgggcagtcctctcggagccagctgtccaccagggctgccagggtgacgggcggcagcagcagcgccaggccttcagcgtccatggtgacttgcagctgtctgggctggtgtgttgggtgctcaggacccaa

SEQ ID NO: 187517 - DNA, 1596 bp, Homo Sapiens
ttggctggctgtgtggatgtctgacaggtgaggcgggggacgcagaagtgcagccgccctctcccacagcggagtccaaaacaggcctaccagtcagttcttatttctattgggtgtttccatgctccaccatgttaagagctaagaatcagctttttttactttcacctcattacctgaggcaggtaaaagaatcatcaggctccaggctcatacagcaacgacttctacaccagcaacagccccttcacccagaatgggctgccctggctaaaaagcagctgaaaggcaaaaacccagaagacctaatatggcacaccccggaagggatctctataaaacccttgtattccaagagagatactatggacttacctgaagaacttccaggagtgaagccattcacacgtggaccatatcctaccatgtatacctttaggccctggaccatccgccagtatgctggttttagtactgtggaagaaagcaataagttctataaggacaacattaaggctggtcagcagggattatcagttgcctttgatctggcgacacatcgtggctatgattcagacaaccctcgagttcgtggtgatgttggaatggctggagttgctattgacactgtggaagataccaaaattctttttgatggaattcctttagaaaaaatgtcagtttccatgactatgaatggagcagttattccagttcttgcaaattttatagtaactggagaagaacaaggtgtacctaaagagaaacttactggtaccatccaaaatgatatactaaaggaatttatggttcgaaatacatacatttttcctccagaaccatccatgaaaattattgctgacatatttgaatatacagcaaagcacatgccaaaatttaattcaatttcaattagtggataccatatgcaggaagcaggggctgatgccattctggagctggcctatactttagcagatggattggagtactctagaactggactccaggctggcctgacaattgatgaatttgcaccaaggttgtctttcttctggggaattggaatgaatttctatatggaaatagcaaagatgagagctggtagaagactctgggctcacttaatagagaaaatgtttcagcctaaaaactcaaaatctcttcttctaagagcacactgtcagacatctggatggtcacttactgagcaggatccctacaataatattgtccgtactgcaatagaagcaatggcagcagtatttggagggactcagtctttgcacacaaattcttttgatgaagctttgggtttgccaactgtgaaaagtgctcgaattgccaggaacacacaaatcatcattcaagaagaatctgggattcccaaagtggctgatccttggggaggttcttacatgatggaatgtctcacaaatgatgtttatgatgctgctttaaagctcattaatgaaattgaagaaatgggtggaatggccaaagctgtagctgagggaatacctaaacttcgaattgaagaatgtgctgcccgaagacaagctagaatagattctgggttctgaagtaattgttgga

SEQ ID NO: 187518 - DNA, 833 bp, Homo Sapiens
ttggataattttcatggatggttctggaggaaaaattattgctgacatatttgaatatacagcaaagcacatgccaaaatttaattcaatttcaattagtggataccatatgcaggaagcaggggctgatgccattctggagctggcctatactttagcagatggattggagtactctagaactggactccaggctggcctgacaattgatgaatttgcaccaaggttgtctttcttctggggaattggaatgaatttctatatggaaatagcaaagatgagagctggtagaagactctgggctcacttaatagagaaaatgtttcagcctaaaaactcaaaatctcttcttctaagagcacactgtcagacatctggatggtcacttactgagcaggatccctacaataatattgtccgtactgcaatagaagcaatggcagcagtatttggagggactcagtctttgcacacaaattcttttgatgaagctttgggtttgccaactgtgaaaagtgctcgaattgccaggaacacacaaatcatcattcaagaagaatctgggattcccaaagtggctgatccttggggaggttcttacatgatggaatgtctcacaaatgatgtttatgatgctgctttaaagctcattaatgaaattgaagaaatgggtggaatggccaaagctgtagctgagggaatacctaaacttcgaattgaagaatgtgctgcccgaagacagctagaatagattctggttctgaagtaattgttggagtaaataagtaccagttggaaaaagaagacgctgtagaagttctggcaattgataa

SEQ ID NO: 187519 - DNA, 1180 bp, Homo Sapiens
aaaacttctgatgatgctgttgtactcgctgttcaacagaagaagcagggtttcccatcgaggaatgcaagaagtggaaaggcggtatactggataagctgcttatctggtttggatttagattttcttccctcttccgaaactggctgaactacattgttcttggtagtttctaatcctttattctcagaatcaaccaggagatctgggtctatgctaaattgtcttcctgatagcatggcctggaagtcctctaaactgcagtcaatactgtcaagataatccaacagctcaacctttcccaaaagattgatgttatcattcaaaatggaatccatcatggtcactggatcttctgaggtcagactggatgagccatttagctggacagcactagacatgagagggctgctgccatcactgcctgaacttagggattctctggctggttcattctgctctccactctgaatgacaggtgcatactcatcttcattgtcatcttcaacgatgacaatatcagggtactggctacagttggagggatcagatataacatcctcattagtttctggaataactgggatattttcttcatctgcattatcatcagtaacatcataaataatgatgtcatctgaaatcctctcccttggctttaaaccttcagtcctactgtgtggaactttatgatgatgattatcagttggttctttgactatgtgctgaaacaggttcttcttttgggctccattagtgtttagaagtagaggccttttacgttttaaactcacaagttggttattttgaaccaatgtaacaataaactggacaatctttcgaataacttgttgctgttgtgcatgctttgctcgtaattctgacacctccttccaaagggactcattctcactttttaattcagaaagcctggactcaatagtttcctgttttatctgaaccttctgagcactacttataatttttgttaaatcttcctgacgaattttattttcttctggttttgaagatgaaaccttccttttaatgttctccaacaagtcatcctgtccttgtttgaagtaaggatgctgaaattctacaggaccatctctttcttgctttacaattccagagtcgatatgtactactttacggaaaccatacatattcagtccaa

SEQ ID NO: 187520 - DNA, 890 bp, Homo Sapiens
aaaaagttggcgtacctcacggaagccggctttggccctgcggctgctaccgtcgccgcggagaaattgttggatctggcagtctaggaatgaatctcctctcagcctttaagctcacctggtcagaatccttggatgagcctgtgggaccgttcctcctagcccggtggtttggaaccagtggctttgggactgtaagaggatggacaaagattctcaggggctgctagattcatccctgatggcatcaggcactgccagccgctcagaggatgaggagtcactggcagggcagaagcgagcctcctcccaggccttgggcaccatccctaaacggagaagctcctccaggttcatcaagaggaagaagttcgatgatgagctggtggagagcagcctggcaaaatcttctacccgggcaaagggggccagtggggtggaaccagggcgctgttcggggagtgaaccctcctccagtgagaagaagaaggtatccaaagcccccagcactcctgtgccacccagcccagccccagcccctggactcaccaagcgtgtgaagaagagtaaacagccacttcaggtgaccaaggatctgggccgctggaagcctgcagatgacctcctgctcataaatgctgtgttgcagaccaacgacctgacctccgtccacctgggcgtgaaattcagctgccgcttcacccttcgggaggtccaggagcgttggtacgccctgctctacgatcctgtcatctccaagttggcctgtcaggccatgagcagctgcacccagaggctattgcagccatccagagcaaggccctgtttagcaaggctgaggagcagctgctgaacaaagtgggatcgaccagccagcccacctgggagac

SEQ ID NO: 187521 - DNA, 2673 bp, Homo Sapiens
ttgggttaattaaaacttgcacagtttctgaattagaagcacaacttagacagttgacagaggagcaaaatacactaaatatttcttttcaacaggctactcatcagttagaagaaaaagaaaatcaaattaagagcatgaaggctgatattgaaagtcttgtaacagaaaaagaagccttacagaaggaaggaggcaatcagcaacaggctgcttctgaaaaggagtcttgtataacacagttgaagaaagagttatctgaaaacatcaatgctgtcacattgatgaaagaagagcttaaagaaaaaaaagttgagattagcagtcttagtaaacaactaactgatttgaatgttcagcttcaaaatagcatcagcctatccgaaaaagaagcagccatttcatcactaagaaagcagtatgatgaagaaaaatgtgaattgctggatcaggtgcaagatttatcttttaaagttgacactctgagtaaagagaaaatttctgctcttgagcaggtagatgactggtccaataaattctcagaatggaagaagaaagcacagtcaagatttacacagcatcaaaacactgttaaagaattgcagatccagcttgagttaaaatcaaaggaagcttatgaaaaggatgagcagataaatttattgaaggaagagcttgatcagcaaaataaaagatttgattgtttaaagggtgaaatggaagacgacaagagcaagatggagaaaaaggagtctaatttagaaacagagttaaagtctcaaacagcaagaattatggaattagaggaccatattacccagaaaactattgaaatagagtccttaaatgaagttcttaaaaattacaatcaacaaaaggatattgaacacaaagaattggttcagaaacttcaacattttcaagagttaggagaagaaaaggacaacagggttaaagaagctgaagaaaaaatcttaacacttgaaaaccaagtttattccatgaaagctgaacttgaaactaagaagaaagaattagaacatgtgaatttaagtgtgaaaagcaaagaggaggagttaaaggcattggaagataggcttgagtcagaaagtgctgcaaaattagcagagttgaagagaaaagctgaacaaaaaattgctgccattaagaagcagttgttatctcaaatggaagagaaagaagaacagtataaaaaaggtacagaaagccatttgagtgagctaaatacaaaattgcaggaaagagaaagggaagttcacatcttggaagaaaaacttaagtcagtggaaagttcacagtcagaaacattaattgtacccagatcagcaaaaaatgtggcagcatatactgaacaagaagaagcagattcccaaggctgtgtgcagaagacatatgaagaaaaaatcagtgttttacaaagaaacttaactgaaaaagaaaagctattgcagagggtagggcaggaaaaagaagagacagtttcttctcattttgaaatgcgatgccaataccaggagcgcttaataaagctagaacatgctgaggcaaagcaacatgaagatcaaagtaagataggtcatcttcaagaggagcttgaagaaaaaaacaagaaatattccttgatagtagcccagcatgtggaaaaagaaggaggtaaaaataacatacaggcaaagcaaaacttggaaaatgtgtttgacgacgtccagaaaaccctccaggagaaggaactaacctgtcagattttggagcaaaagataaaagagctggattcctgcttagtaagacagaaagaagtacatagagttgaaatggaagagttgacctcaaaatatgaaaaattacaggctttacaacagatggatggaagaaataaacccacagaacttttggaagaaaacactgaagaaaagtccaaatcacatttggtccaacccaaattgcttagtaacatggaagcccagcacaatgatctggagtttaaattagccggggcagaacgggagaaacagaaactgggcaaggagattgttagattgcagaaagaccttcgaatgttgagaaaggagcatcagcaagaattggaaatactaaagaaagaatatgatcaagaaagggaagagaaaatcaaacaggagcaggaagatcttgaactgaagcacaattccacattaaaacagctgatgagggagtttaatacacagctggcacaaaaggaacaagagctggaaatgaccataaaagaaactatcaataaggcccaggaggtggaggctgaacttttagaaagccatcaagaagagacaaatcagttacttaaaaaaattgctgagaaagatgatgatctaaaacgaacagccaaaagatatgaagaaatccttgatgctcgtgaagaagaaatgactgcaaaagtaagggacctgcagactcaacttgaggagctgcagaagaaataccagcaaaagctagagcaggaggagaaccctggcaatgataatgtaacaattatggagctacagacacagctagcacagaagacgactttaatcagtgattcgaaattgaaagagcaagagttcagagaacagattcacaatttagaagaccgtttgaagaaatatgaaaagaatgtatatgcaacaactgtgggga

SEQ ID NO: 187522 - DNA, 1176 bp, Homo Sapiens
ttggccaagatggagggcgctccaccggggtcgctcgccctccggctcctgctgttcgtggcgctacccgcctccggctggctgacgacgggcgcccccgagccgccgccgctgtccggagccccacaggacggcatcagaattaatgtaactacactgaaagatgatggggacatatctaaacagcaggttgttcttaacataacctatgagagtggacaggtgtatgtaaatgacttacctgtaaatagtggtgtaacccgaataagctgtcagactttgatagtgaagaatgaaaatcttgaaaatttggaggaaaaagaatattttggaattgtcagtgtaaggattttagttcatgagtggcctatgacatctggttccagtttgcaactaattgtcattcaagaagaggtagtagagattgatggaaaacaagttcagcaaaaggatgtcactgaaattgatattttagttaagaaccggggagtactcagacattcaaactataccctccctttggaagaaagcatgctctactctatttctcgagacagtgacattttatttacccttcctaacctctccaaaaaagaaagtgttagttcactgcaaaccactagccagtatcttatcaggaatgtggaaaccactgtagatgaagatgttttacctggcaagttacctgaaactcctctcagagcagagccgccatcttcatataaggtaatgtgtcagtggatggaaaagtttagaaaagatctgtgtaggttctggagcaacgttttcccagtattctttcagtttttgaacatcatggtggttggaattacaggagcagctgtggtaataaccatcttaaaggtgtttttcccagtttctgaatacaaaggaattcttcagttggataaagtggacgtcatacctgtgacagctatcaacttatatccagatggtccagagaaaagagctgaaaaccttgaagataaaacatgtatttaaaacgccatctcatatcatggactccgaagtagcctgttgcctccaaatttgccacttgaatataattttctttaaatcgttaagaatcagtttatacactagagaaattgctaaactctaagactgcctgaaaattgacctttacagtgccaagttaaagtttaccttattctc

SEQ ID NO: 187523 - DNA, 1637 bp, Homo Sapiens
  misc_feature (1074)..(1088): n is a, c, g, or t
ttggctgttttttctacatttttctagctttgctcagggtccgttgaaagatgccccgaatctcatctgcactcctcacactgcctggtacagtgagcaggcgtcactggagatgagggaggcagctgccaccgagatccgccgagccatcacaggtcgcatcccagaaagcttaagaaattgtgtgaacaaggaattctttgtcacatcagcgccttggtcagtaatagaccagcaagcaattcatcctgagctcaatggtgccacatacagatatccgccaggcatcgtgggtgtggctccaggaggacttcctgcagccatggaagggatcatccctggaggcatcccagtgactcacaacctcccgacagtggcacatccttcccaagcgccctctcccaaccagcccacaaaacacggggacaatcgagagcaccccaacgagcaatagcagagaatgccagaaggtaatcactcagatacacttgggaccaagagacagtgaaaaatagatgaactaagagaaaaagaatcggatggtctttgtaactgattctggacatatgcatcattgatgttgcagtgttgaaactacaagagctagaaaactgaagatgtcgtctgcttacggaagcgctgaaagactaggatgtgatttattaacgaccaacttctgttattgtgtgttaagtttttcatctgtgcatcaaatcacaaaaagaataaatagagctttttcctttatcagtcccttgggcacagcaggtcctgaacaccctgctctacaatgttgcatcaagagttcaaacaacaaaataaaaaatattaagaggaaatccccatcctgtgacttgagtcccttaagtctacaggggctggtgacctctttttgctaataggaaaatcacattactacaaaatggggagaaaactgtttgcctgtggtagacacctgcacgcataggattgaagacagtacaggctgctgtacagagaagcgcctctcacatctgaactgcatactgagcgggcaagtcggttgtaagttcagtaaaaccctctgatgatgcnnnnnnnnnnnnnnngtattaagtttcacaagctgtttgtactcaaatatattttctcagtttcagatcctctgctattttattgagtggaaagtcttgagctaaaagggttcaagaagaataatgttgcatttccttatgtctcaggaaacactttttatggtaacttgtcagattgtctatgaacaaacccacttttttagacattgataaagtcttcttttcttcacgtgatattttatacaagaacacttcagatgtattagatgtgactgattttaacaaatcctattagatttgtatcaactagttacatgttctattcatagtcttttgtgaatcattgcctttttgtttaaaaagatggcctattttgagcctttgtataggtacattcctgtttttgtgacaaaagaaaaactttaaaattgtcccaaacagaaaaataatggctatcaaaagtatgttttgttttagtgtgagttaccgttactgtatttgtttattgtaaaggtggacatttagcgttcagtgcagttttcaataaaaagtaattaaaatttg

SEQ ID NO: 187524 - DNA, 1267 bp, Homo Sapiens
ttggccacgtttaggattttatagggaagaggaggaatttttcgtagaaatccccgctctgcgtgctcgtggtggaggctgctggcaatggcctacgtcgtcataccgggcttccttgccctgtccgggggtttcatcaccttaaatggttttgaaccaatgaaggtgtattcccttaaaaagacggacagcccatcgtgtgaactatagagtttgtggacagatttatattgggttcatagtggcgtcatgcacgcagactcctgcaagttcccctaagttcttagaggactgctttgccttttgatctgagattggcaaagttccataaagaatggcccttgtggataagcacaaagtcaagagacagcgattggacagaatttgtgaaggtatccgcccccagatcatgaacggccccctgcacccccgccccctggtggcgctgctggacggccgcgactgcactgtggagatgcccatcctgaaggacctggccactgtggccttctgtgacgcgcagtcgacgcaggaaatccacgagaaggttctaaacgaagccgtgggcgccatgatgtaccacaccatcaccctcaccagggaggacctggagaagttcaaggccctgagagtgatcgtgcggataggcagtggctatgacaacgtggacatcaaggctgccggcgagctcggaattgccgtgtgcaacatcccgtctgcagccgtggaagagacagcggactctaccatctgccacatcctcaacctgtaccggaggaacacgtggctgtaccaggcactgcgggaaggcacgcgggttcagagcgtggagcagatccgcgaggtggcctcgggagcggcccgcatccgtggggagacgctgggcctcattggctttggtcgcacggggcaggcggttgcagttcgagccaaggcctttggattcagcgtcatattttatgacccctacttgcaggatgggatcgagcggtccctgggcgtgcagagggtctacaccctgcaggatttgctgtatcagagcgactgcgtctccttgcactgcaatctcaacgaacataaccaccacctcatcaatgactttaccataaagcagatgaggcagggagcattccttgtgaacgcagcccgtggcggcctggtggacgagaaagccttagcacaagccctcaaggagggcaggatacgaggggcagccctcgacgtgcatgagtcagagcccttcagctttgctcaagggtccgttgaa

SEQ ID NO: 187525 - DNA, 1225 bp, Homo Sapiens
caaaaagcacagctgaaagcttgagtttgggagcctgcacccaccccgatgaagctccacgggagcaaatacagagcctccaggcagtgctatggtccaggctggcttcgtttttccaaggagcctttggtgagttcaattatctggtagaatatccagcgcttcaccctggggaatcccgtatctcctttccatcccagttgggttggaaggggttttacaatccatggtcacttccttcctgaggcaccggtcaatatcgactgcactgaaaaaggcgactgactggggcaagtcattcagacccagcttgtaggcaaacatgcacctggtcaagaggttggtgatctgcaaggccagggcagcgcggtagcggtcctcctcccgcaccaggtagcgaacctcgtcatggatgctgatgcagaagcgcccatctatggcaaactcttcaaacagccacttcatggccacaagcatgaggtgtaagtagtcaacagcagagctctgtaccacccaattcacacggctggtcataaactcttcctggacagccgagggctccagggctcggctgatgcagcagcccagcaccggggtacgtggtatgtcagacgtagcaatgctctcaagcttattgaacatttctgactctgtgccccccttccatgcccgttcagcaaccacctcccacttcttccactgtgacttccttgcagtttctctctggaccttgcgcagatcctgcagggaaatccagccaccctcagtcctgtccactgggaggttcaactccctcaccagccactcgccctcatccgacagccgataccagcggaggcccttggtggcagcgtacatctgctgggccttctcagctgcctcctgctgtgtgagccggtggttaaactgcattagtaagcgctcagcaaagggctgcccagcaccatagatgcggccgtagttgaagattttggcatgctcacggctgatgcccacagtagtggctgtcttactgtgtagatcagtgcccctgctcttcctgccctgcagtgtcatccacccaaaggctgtgcagcccgggcattgctggcggtgagccatgtgggctccacagcccggcgagtgatggtgccggcagtcaccacttggggcaggatggccccatagaggccttcctcatcatagtcggggtgcctgatcacagcacggggcagagctgacccaa

SEQ ID NO: 187526 - DNA, 1018 bp, Homo Sapiens
cctgtgtcgcttaaacaacagtcctaacttttgtgtgttgcaaatataaaaggcaagccatgtgacagagggacagaagaacaaaagcatttggaagtaacaggacctctttctagctctcagaaaagtctgagaagaaaggagccctgcgttcccctaagctgtgcagcagatactgtgatgatggattgcaagtgcaaagagtaagacaaaactccagcacataaaggacaatgacaaccagaaagcttcagcccgatcctgccctttccttgaacgggactggatcctaggaggtgaagccatttccaattttttgtcctctgcctccctctgctgttcttctagagaagtttttccttacaacaatgagaaaacatgtactagctgcatccttttctatgctctccctgctggtgataatgggagatacagacagtaaaacggacagctcattcataatggactcggaccctcgacgctgcatgaggcaccactatgtggattctatcagtcacccattgtacaagtgtagctcaaagatggtgctcctggccaggtgcgaggggcactgcagccaggcgtcacgctccgagcctttggtgtcgttcagcactgtcctcaagcaacccttccgttcctcctgtcactgctgccggccccagacttccaagctgaaggcactgcggctgcgatgctcagggggcatgcgactcactgccacctaccggtacatcctctcctgtcactgcgaggaatgcaattcctgaggcccgctgctgtgtgtggcttctggatgggacaactgtagaggcagttcgaccagccagggaaagactggcaagaaaagagttaaggcaaaaaaggatgcaacaattctcccgggactctgcatattctagtaataaagactctacatgcttgttgacagagagagatactctgggaacttctttgcagttcccatctcctttctctggtacaatttctttggttcattttcagattcagcattttc

SEQ ID NO: 187527 - DNA, 1679 bp, Homo Sapiens
  misc_feature (198)..(206): n is a, c, g, or t
  misc_feature (529)..(541): n is a, c, g, or t
  misc_feature (1371)..(1400): n is a, c, g, or t
ttggggctttgattcttctgaaggatgccaagaatcaaactaagggaggactcactgttaaagatgtgttctgatgtcttatattaagaccaaatgtgacatgatgtgattatcttccagtactttgcttttaggtaccatttcatgacattttaggaatgagtattggaaaatataaagaattagaaaagcagcacnnnnnnnnnaatggaaaagtcttcggtccagtgttacaccttatagtgtaattcagtccctaagcacagaatgaatgtctggcctgcatatggtagttacagtgtaacctctggctgcagaccacacaggacaaccctaacagcctagtcttgtatggtgtaaatatcaagagtacagcttcaatttcatttgctttatcttagcaacaatgccaactcaggagagcagacggccgatttcagtgaagtctggtagtcaacagatgttatttcagtctcagtgcatctcctctggctttctttgactgaaggtgtttataggaaggaagttnnnnnnnnnnnnngctcattgagattctttaccaattctttacaagatttctgggggtgacagggaaagcaaaaggacttcaaagcaaaagggtgcacaagagcttacttcaccctgaaaatcagtattattaatgaaaagtactgttttcttaaagaagtcgaatgtcctttagatgaacaagaccaagtatacatctccattagattaaaatgtagcacaggggttaaaaattatcagtttaatctctttaagagagtattatcagagtttaaaatgagttagctctgtttatctacacacagcaaacccattcgcagcctcttggccacatgtattcagatgtttgaaatagtgaatcatttcattttcattctaaaacaatactgacttagccatataccttctgtttgtcaatctgaaacttgcttacatctaataagtagacctcttataacactgcaaccattctaagagttggaatttatttttgccaagtattaagtactgttacatctaaaatacagaatgtcaaatggttgcatagcttgtttcccacaacaaggaggaaaagaacaggaatacaaactctgtaatatgctgataaagaagccttagaactgccaactggcttgatggttcaattagtaagctaatttctcccacacccgctccttggtttttagactaattttcccaaagcaaggtttagtcacacaaacttgaaagtacatttaaaatgttcttagttgtcatcctacttttattgcctatggaatatgctaatttctaaaaaaaatacgggagaggcaccaaacccctaaattctagtgcaataatttnnnnnnnnnnnnnnnnnnnnnnnnnnnnnncatgttatatgcacccccctcccaaagctgattttaagactggctagaattcaaaatataaaaaataaaactatgaagtgatttgaaatcggttttaaaaagttgttagtgcaagagaaattttatgtttaagccatcatggcaatatatgcaaagtttaaatgaatgacagaaatcttgattttagactgtatgttgtgctgttttgagtacactttatttcggaaagtgatatttagtattttctatacactctgaaatcatgagcatttcactttt

SEQ ID NO: 187528 - DNA, 2077 bp, Homo Sapiens
  misc_feature (1827)..(1882): n is a, c, g, or t
  misc_feature (1925)..(1967): n is a, c, g, or t
ttgggctgtaaaggtggaaacctaagatctagcaagaatgaccaatccagtagttatggcagctttctctcactttctaaagctgcaatataaacgtggtgagtaagctacaaaataatcaaatgtagtctgctgaaaatccctgagaatcaatgctattaccaggatcaatatcaacctggcagggggaataaggggtttgctgtgtggcctggacattactgtctaagcctaaggaaggataggtttgtgagacttttagtcacgaccattatatgaaatgtgactgcacagctgtgactagataaaaaagtaactttgagatttgctttttaagcttctgaagaagttaatgcgtttgaatatggatggaaataatttgatacagattccttcacaattgccatctacattagaagaacttaaagtcaatgagaacaatcttcaggctatcgatgaagaaagtttatcagacttaaatcagttggaccttagaattggaaggaaacaatctcagtgaagccaatgtcaatcctttagctttcaaacctttgaagagcctagcctacttgcgtctgggaaaaaataaatttagaattataccgcagggtcttcctggttctattgaggaattatacctagaaaataaccaaattgaagaaataactgaaatttgtttcaatcataccagaaagatcaatgtcattgtactacgttataacaaaattgaagaaaataggattgctcctttagcctggataaatcaagaaaatctagaatccattgatctctcctacaacaagctctatcacgtcccgtcctatctacccaagtccttgctgcacctagtactccttgggaaccagattgaacggatccctggctatgtgtttggccacatggaaccaggcctggaatacttgtacctgtcatttaacaaacttgctgatgatggcatggaccgtgtctccttctatggggcatatcattctctgagagaattatttctggatcacaatgacttaaaatctataccacctgggatacaagaaatgaaagcactacattttctgaggctgaacaacaacaagatacggaacattcttccagaagaaatttgcaatgctgaagaggatgatgactcaaatctggaacatcttcatcttgaaaacaattatattaaaattagagaaataccatcttacacattttcatgcataagatcatactcaagtatcgttcttaaaccacaaaacatcaagtaattccaagttttcctttgctgtttataaactttactcatgtatttgtagtagctgcatttgtcattaataagagagacataatcctcctgttatactcagtatcattatatgctagtcaacctgattcactaacacacagatgaacaaccaaaatatacctaaaaggtatagtctctaggagttttattaatagtaaaggtaaaatctctcagtttcctacctctagaaagaggccatctcactagaataggatattatgcatactgagctagaccagaagagtctggaacaaaataaacacagcctttataatcaacttgaatactggtgttagctgagaactctgtaagtccctttaaaaattatgtatcttttggttcaagattaagaagcataatgacaacaaaaaaagcaggcagaatttatgaataagtgttgtttattattaaaacaataatttgttaatttcttataaggccctgtgctataattactggtataaatataactgaatattggggtagctttcatttcttccattaattacatgtgtaaaattaannnnnnnnnnnnnnnnnnnnnnnnnnnnnnnnnnnnnnnnnnnnnnnnnnnnnnnncattgttaacattaagaaagctggcagaaggtgtgcataaatnnnnnnnnnnnnnnnnnnnnnnnnnnnnnnnnnnnnnnnnnnntttaaagttaaacagtatattaagattaccttcactattcctcactcaagattaagacattttttgaaaagcagtagagtttgcttaaaatacaaattaattattcttga

SEQ ID NO: 187529 - DNA, 1766 bp, Homo Sapiens
  misc_feature (1596)..(1604): n is a, c, g, or t
ttgggtatcgttttcgatcacagctcttcacggggatttctgctgccgccaccgcccactcttacccccgccgcttctcgactctgttgttagccgaagactcgcctctcagccgcccgccgcacagacgcacgagtaaaaagtgcagctccatcggctgatcctcgctaagctccgactctgggcggcaccgggcgtcccacgatgccgaagaacaagaagcggaacactccccaccgcggtagcagtgctggcggcggcgggtcaggagcagccgcagcgacggcggcgacagcaggtggccagcatcgaaatgttcagccttttagtgatgaagatgcatcaattgaaacaatgagccattgcagtggttatagcgatccttccagttttgctgaagatggaccagaagtccttgatgaggaaggaactcaagaagacctagagtacaagttgaagggattaattgacctaaccctggataagagtgcgaagacaaggcaagcagctcttgaaggtattaaaaatgcactggcttcaaaaatgctgtatgaatttattctggaaaggagaatgactttaactgatagcattgaacgctgcctgaaaaaaggtaagagtgatgagcaacgtgcagctgcagcgttagcatctgttctttgtattcagctgggccctggaattgaaagtgaagagattttgaaaactcttggaccaatcctaaagaaaatcatttgtgatgggtcagctagtatgcaagctaggcaaacttgtgcaacttgctttggtgtttgctgttttattgccacagatgacattactgaactatactcaactctggaatgtttggaaaatatcttcactaaatcctatctcaaagagaaagacactactgttatttgcagcactcctaatacagtgcttcatatcagctctcttcttgcatggacactactgctgaccatatgcccaatcaatgaagtgaagaaaaagcttgagatgcatttccataagcttccaagcctcctctcttgtgatgatgtaaacatgagaatagctgctggtgaatctttggcacttctctttgaattggccagaggaatagagagtgactttttttatgaagacatggagtccttgacgcagatgcttagggccttggcaacagatggaaataaacaccgggccaaagtggacaagagaaagcagcggtcagttttcagagatgtcctgagggcagtggaggaacgggattttccaacagaaaccattaaatttggtcctgaacgcatgtatattgattgctgggtaaaaaaacacacctatgacacctttaaggaggttcttggatcagggatgcagtaccacttgcagtcaaatgaattccttcgaaatgtatttgaacttggacccccagtgatgcttgatgctgcaacgcttaaaacgatgaagatttctcgtttcgaaaggcatttatataactctgcagccttcaaagctcgaaccaaaagctagaagcaatgtcgagataagagagcagatgttggaaaattcttctagattttcagaacttgaagactattttctaatttctannnnnnnnnctatttcaatgtatttaaactctagacacagtttttatcttggattaacttagataacttttgtagcagtggttatattgcttatatttaatgtacatactattgaaactggtgagttctgattattaaatattctctgtaaatcagtaaacatgtataaag

SEQ ID NO: 187530 - DNA, 1741 bp, Homo Sapiens
  misc_feature (1167)..(1238): n is a, c, g, or t
ttgggaacattaatgcatttttttatttatgcacagcaattatattccagaagtgagaatcatgtcaattcccaaccttcgctacatgaaggagagccaggtcctcctgactcttacaaatccagttgagaacctcacccatgtgactctcttcgagtgtgaggagggggaccctgatgatatcaacagcactgctaaggtggtggtgcctcccaaagagctcgttttagctggcaaggatgcagcagcagagtacgatgagttggcagaacctcaagactttcaggacgatcctgacattatagccttcagaaaggccaacaaagtgggtattttcatcaaagttacaccacagcgtgaggagggtgaagtgaccgtgtgcttcaagatgaagcatgattttaaaaacctggcagcccccattcgccccattgaagaaagtgaccagggaacagaagtcatctggctcacccagcatgtggaacttagcttgggcccacttcttccttaaaaggttccactggagggcagatcccaaaggacagtatcaccgtaaacctgcgttaaaatgtggaagctgctgcttcattaggccttgtttataacgatgtacccatgcactacggaattctattgctaagaaagtgggagcataggcaaggcattgggaacacagggtagctgctgttgctcttgctctcacccctgttgacaccagtaagtctgtgtctccctcactgaaccctgcacgttgagtaacagcagcataattccatcctaggaaaggggatgggtgttccttggaatggcattgtatttaccacctgagaaactctgtactgtctcttgatctgatctcactaaggatcacaatgtcgcagatgaaacttaaatgataacccaaaggtagacctgctgttaatgatccagcattggtcacaatgtaccaactgctttctgcattccgttaaatatcatctaacagtctaaaacatatcccttcattgccataatggctgccattttgccatagatttccatataactgaaaaactgaattgtcactttatctttagtatcatgatgattggaaaaacctgtgaagttgttaaggcactctcatttgccctctttttctaagtgaatacaggacacgtattagttgtnnnnnnnnnnnnnnnnnnnnnnnnnnnnnnnnnnnnnnnnnnnnnnnnnnnnnnnnnnnnnnnnnnnnnnnncaagggggtagcagattccattcgttttcaatattgccacaatacccagggattaatgctgccacaggggggcaatctttatttgtcttacttcctaccccttccctgttctgcctctttaactcagttaagttgttctgtttgggacctggaaaagaacccaaagaaaacctgagtggacaggttcatttctggaatgcagaaaacattttaaaggctagatttttagaatattctcaactagcattctttccattgatttgaaggggaaattaactattataatctcttgaatccaaaactggatattaagaactttcccccttactaagtttaagacttttgtcatgtggtgagtcaaataagaccattttgattgtaaaccataaaatagttcagcaagtagcccacagttctggcctaacagcagacttgctgttttcacttggtatcctggagttgggttgctaaccttaatttctatgatgttttctaaaatgaaa

SEQ ID NO: 187531 - DNA, 1792 bp, Homo Sapiens
  misc_feature (138)..(209): n is a, c, g, or t
ttggtttccatataacccgaaaaactgaattgtcactttatctttagtatcatgatgattggaaaaacctgtgaagttgttaaggcactctcatttgccctctttttctaagtgaatacaggacacgtattagttgtnnnnnnnnnnnnnnnnnnnnnnnnnnnnnnnnnnnnnnnnnnnnnnnnnnnnnnnnnnnnnnnnnnnnnnnncaagggggtagcagattccattcgttttcaatattgccacaatacccagggattaatgctgccacaggggggcaatctttatttgtcttacttcctaccccttccctgttctgcctctttaactcagttaagttgttctgtttgggacctggaaaagaacccaaagaaaacctgagtggacaggttcatttctggaatgcagaaaacattttaaaggctagatttttagaatattctcaactagcattctttccattgatttgaaggggaaattaactattataatctcttgaatccaaaactggatattaagaactttcccccttactaagtttaagacttttgtcatgtggtgagtcaaataagaccattttgattgtaaaccataaaatagttcagcaagtagcccacagttctggcctaacagcagacttgctgttttcacttggtatcctggagttgggttgctaaccttaatttctatgatgttttctaaaatgaaacttgataaagtagaccaccagctgcaccgtgttttctgtaaaagtattgttagtaagtggccaagagacttgaggaaaatacagattttttgtttaccttggtcttgttttaagtcttaaaaaattaaagataacattataatgtagaatacagatgggacatagtccttgtaagcttcccttgaaaatgttttaaatatttaggaagcttttaaaagacactaaattgtactctaaaagacactaaattgtactaattgtacaaaggtcaagccaattttatgaaacagtcctacagagtaatatatgtgatgcagtgtaagaaggaaaatactcatctctaacattatggtaataacatttagcctcttaggagttggagcagggggatgggtaattacagatttgcagactatagaaagagtttcatttttttgtgaccccacagagtctcaaatttttatttcactacctgctagagcctactgtgaaatcactgctccatatttgccagtggaggaaatgggcatagagtagagaatagcttcatatgtttacacgtttgcatagactacacacatgtcatgcgtttatggcaggtagctggtatttattccccaaagtaataatgttgaagtatgggtctcatcattcccatacacagaaacacaaaacactttgatcataaacttttttcttcagaagccaaactaacttgcagaataatagagccactggtttaatgtttcctcaagataggttttagtgtaagctagtattctgtgtgttcgtagaaatgattcaatacctgcagctggtgaattaggaattgtatttgttgccttttttatattagatgaggtgcaaaaattttaatgctagtcagtatgcaccaccacaggaaaagttagatcccattagcacttgaaactacagctttggaaacttaggctaagttaatttggatttgttacttgattcacctactgaccttttcttttgttttgaaagtgcttatcagcatattgagctaagtgtcatgcatatttgtgaaaaaacaccctttttggtcctttttgg

SEQ ID NO: 187532 - DNA, 1853 bp, Homo Sapiens
ttggatgaaagtggcgattaggcagttagtttccataaagtggccgtatgggaatttagttcattcatccagcaaacattgagtaccaattatttgctaggtcctgtgcaaggaatacaaaaatgattaagacttattccttacccttttggagcttgaagcataaggaagacaagttattctgtaaggaagataaagcattcaaaagtactacagagaaaaaccaagtatgcttgagttttgcgaatgttctcctcttaaagaatagcttcaaattttgagaccagtggttcccactaagtatagaacattaaaattaatactttataataaaacacttttattgctgcagaatgttaaactgcagaacaggcaccagatggtcaagacgagggaaatatgagaaggcaaatgatgtgaggattagtatcttgagattcacctggtctggaattatgtcataggctactatgcatcagaatcacatggagggctttctaaaacagactgctcagcccacccccagggtttctgagttcataggttataagaggtaagttgaacaattccccagatgatgctgatgctcctggtccacaatgtgagaaccactaagttggagtactgactcatagagataaaattctttgaaagaaatgtactgttttaagatactgtaaaatgtggaggcagggcaaacgtttataagggctgttatgtatgaaatgtgcctctgacccaaatccacggactttgcgaaaatcaccaaggagactttgcattaagttcagagtacaatacaaactgggcctagctctgtatttagtcagtatgtgcacgtgggaaactttagtaaaatatcacctccttattgagacaagtttggacatctggccttaagcctctgttgaacaggagaagtgaagctgtttgcaattatataattttctaatttgaaatcatgacaagcagtcttagaacaaagttaaaattaaaaagtctttatccaagtcaccaatgaaacaggattctgattcattaatcatgtcttgcccacttttttcaacaaacctgacgtcctataatgagctatacagtgtgaggcatatttcatagcaacgttggttgattgccaaggagactctgccaccgttctggataagctcatgtttcccttttccttggctgctaatagaagggcaacttacagtgcagggtcaagagcaagaagctgggggagtagaggctatacatctagcctaataatagagatctgaggtggtcaccaggagactacgttcttttgattccattcctcagcagcaaaagtacttgagttcaaatgataaaacttgaagttgtaggcttggaacagtatcagctcagtatatccttccttgcataaatacaagggaaaggccaaggaataatcagcattaacctgccaggtccaagggtcttctatccctgacttcatctgagtcacaagatttctctaataagagaaactttgctactctgaggaaaattatcccttatgggagcccccagttcagaggtaagaacagttctttcacgtggaggtccaaaattctggacttctagaaacaagtgaagtgtgctaaagtctcctatttattgtttctcttccagtattgtgccatcgattcttgcataaaattctggaatgctggctcttcatggctttcctctgtaactctgtggtcaatgtcatcagtatcgctgtctgcttcctcatcctcttcatccaaggttcctcgagtcaggatcaaatcagaagggtgcagcacaggagataagctgtctacagtgaaaacacctatcagtgccaa

SEQ ID NO: 187533 - DNA, 1743 bp, Homo Sapiens
  misc_feature (580)..(599): n is a, c, g, or t
  misc_feature (1025)..(1049): n is a, c, g, or t
ttggctcatggaaagcaaattatgcaagccgtcactcttattctagaaggggaacataacattgaggtcaaagagcagacactgtgcatcttagccaacatagcggatgggacaacagcaaaagatcttattatgaccaatgatgatatcctacagaaaatcaagtattacatgggccattcacatgttaaactgcagcttgcagccatgttttgtatatcaaacctcatatggaatgaagaggaaggttcacaagaacgccaggataaattacgagacatgggcatcgtagatattctacacaaactgagtcagtcaccagattcaaacctttgtgacaaggcaaagatggcactgcagcagtacctggcatgatgggagtgcccctgggcacctgcgagcatcccacctccttgtttaaggaagtacaggaaccagcctcatttgattccttctatttgcacaagtcaccttggactgcagggagctgttttgcaaaagcagtttagtaggcttagatctcaaattcatcttgagaacatttttttgaggtagtaatttcctcagaagactcttgtgnnnnnnnnnnnnnnnnnnnnctgagctactcggactctttattagaacaatcaatcattttcctttggacctacaatttttgcctatgctgcagccactttgtgagtgagaatgaatatgtctgtgtgaacacacaggcatgcgtgtgtatgtgcacgtacatgggccagaatgaatggatgtgtgtgtgtgagggatacctcagatttttcttttcttattttgtgtgaaaatctcttttctacagattttccagggtttaagcattgcttgctgtataaaaaactttactgaattatatacagtttgaatgaaatgttattttaaaaacaaaacaattgttaagtgttccataaaggttatgttgaattttggtcagatgaatatttgtaagtaaaaaatatatgcatttctgaacctcaacttacatagattttctttatatnnnnnnnnnnnnnnnnnnnnnnnnngttggctatagttggcctgattaacaggcactatacatggtgctgtgcaaaatagtaagctagcatcttactgccgtcaatattagcaggtacagagccttttttcatcctaattcagtaagttctcaggcttccaagtcaaatggagaagtaaagtgaggcaacagattcaccataggctttttgaagcatcaaagggaaatataactactgatagtgaaagcccagccatgacccaaatgggcttacccttgacaggaactggggaccaagagcctcccaattgccctaactcctgtcattggtattagcaatatctggccagatttagaaccagtcatggaaacttgtgctcaaactaaaagtaggtcatcacttcccagaaacagaataccttgtgcttcctgaaacagcatatatcactgtgaaactaaagaatattctacagacacccctgtagaaagaaacaaagaacaggatagtttagaaagctttctgttagctgtattcagcaaatttcatactagttgctcacgactgctagttggtatgcttttgtaaaacgagattgaaatttaataaaagatgcaactaaaatctttcctgcatgaagctaaaagcactcaagttgagagaggggcacggaatctccccaggatgactgagatgacttcttttacagcaagtactgtta

SEQ ID NO: 187534 - DNA, 1665 bp, Homo Sapiens
ttggggaaaaattttgaaacagaatttagatttacctgatcactcaagaaactgtgtaaaaaggaaatctgatgcagctaaagaacacaagaagtcattcaaccatagcttatctgatacaaggaaaggcaaaaagcaaactggaaagaaacatgagaaattatccagccatagctcatctgataagtgtaacaaaactggcaaaaaacatgacaaattatgctgtcatagttcatcccatattaaacaggacaaaattcaaactggagagaaacatgagaaatcacccagccttagctcatctactaagcatgaaaaacctcaagcttgtgtgaaaccctatgaatgtaatcaatgtggaaaggttctcagccataaacaaggactcattgaccatcagagagttcatactggggagaaaccatatgaatgtaatgaatgtgggatagcctttagccaaaagtcacaccttgttgtacatcagagaactcacaccggagaaaaaccatatgaatgtattcagtgtggcaaagcccatggtcataaacatgcactcactgaccatctaagaattcatactggagaaaagccctatgaatgtgctgaatgtgggaaaaccttcagacacagctcaaaccttattcaacatgtgagatctcacacaggtgagaagccatatgaatgtaaggaatgtgggaagtcttttaggtataactcatctcttaccgaacatgtgagaacacatacaggtgaaataccatatgaatgcaatgaatgtggaaaagcctttaagtatagctcatcccttactaaacacatgagaattcatacaggtgagaaaccctttgaatgtaatgaatgtgggaaagctttcagcaagaagtcacacctcattatacatcaaagaactcatactaaggagaaaccttataaatgtaatgagtgtggaaaagcctttggacatagctcatctcttacttaccatatgagaactcatacaggtgaaagtccctttgaatgtaatcaatgtgggaaaggctttaaacaaattgaaggccttactcaacatcagagagttcatactggagagaaaccgtatgagtgtaatgaatgtgggaaagcctttagccaaaagtctcacctcattgtacatcagagaactcatactggggagaaaccttatgaatgtaacgaatgtgaaaaagcctttaatgcaaaatcacagcttgttatacatcagcgatcccacactggagaaaaaccctatgaatgtaatgaatgtgggaaaactttcaaacaaaatgcatccctaaccaaacatgtgaaaactcattcagaagataaatctcatgagtgaagttaatgtgggaaatttgttaactaaatttaaggttttgttgaaccttggaaatatgctgattttaaagagtgttagaaagcctttagcaagatgtcacaccttgttgtacatgagaaactttgaaaatggatcttcatatagaatcagtggatggaaacaagggtttaaacttgatacaaaaccttttataaaaaatattgttttaactactcaattattataatgatctacatgttcagattgaaattgaaagctttaaaaattgtgaattatttgaatattcaaagcaatggagaaacaagtta

SEQ ID NO: 187535 - DNA, 1246 bp, Homo Sapiens
ttgggtcttaaaataaatgtgaattttgtttccaggtatttattctggggtacaaaaacttcccagaatttacagtaggaaaggaaacccctttatgatgtggcttattattacaagcattcagaaatgatgctggctaagtcaaatcattccttgagacagtgattcctaaatgtaatgccgccttcctgaactctcacatattctatatcatggttattttaaaaaatatatttttagccttttgtaaccttagtcttgttttgagcaatcatattccatgttttatgtgcttttatatttttataataaatattaaagtaaaactattaaaaattgtttatccacgtaccacttaacttaaaatcatctcagggccatctagtggtatatatgtgtactaccatttaggaaactgctataacacataatttcatgaagtaacacctaatacggtgtagttccctggtcatattttatacaattcaaccatataaaagggtgtcactgtaatttcagtagtgtgggtttacaaataatctgctggttagcttattaccttgaggttttgaaaaactagaattatattgaggcatttcataaacatatctcttgcaccctcttcatggtggagttaaggataacttgcaggtggttggccaaggcccaatatagatgattataacatttagaattggcaattagaagttgataatccatataggaccataggatagctttgaaatataaattaccaaattatatttgtaaatgatagagaattatattcttaacagaaaaatatatactttttctacttcttgtaaatactaaacacagttttggggttttgaaatcactttgtcttcagcaagcatcattaataagttcaggtgaatttagcttttaatggggcattaagctggcatttttgattttctttttaaataatagcaaaaatatcatttttcccctctagaatacaaattattgagctgtcaaaacttggcatgaagaatatactattacttacgcttaaatatcaaaagataatggctacttcagtgtcatattgttgaaatagaaacaaaactgcatggttcaagcatcctaatcattagtgccaatgaatgatagtgcacgcaagtgccaggtaaatgcctagtctcacttcattctcctcctgggaagaaaggataagaatagtggctgcagataagtatggaaatatttaatcaagactgtc

SEQ ID NO: 187536 - DNA, 3308 bp, Homo Sapiens
ttgggggagcccctgccgaccgcaggcgccgtatccgcgctcgtctagcagccccggttacgcggttgcacgtcggccccagccctgaggagccggaccgatgtggaaactgctgcccgccgcgggcccggcaggaggagaaccatacagacttttgactggcgttgagtacgttgttggaaggaaaaactgtgccattctaattgaaaatgatcagtcgatcagccgaaatcatgctgtgttaactgctaacttttctgtaaccaacctggtatagaaaaacattttggaaatttctacagaaaaagtaaaattgttactagtcaaacagatgaaatccctgtattgacattaaaagataattctaagtatggtacctttgttaatgaggaaaaaatgcagaatggcttttcccgaactttgaagtcgggggatggtattacttttggagtgtttggaagtaaattcagaatagagtatgagcctttggttgcatgctcttcttgtttagatgtctctgggaaaactgctttaaatcaagctatattgcaacttggaggatttactgtaaacaattggacagaagaatgcactcaccttgtcatggtatcagtgaaagttaccattaaaacaatatgtgcactcatttgtggacgtccaattgtaaagccagaatattttactgaattcctgaaagcagttgagtccaagaagcagcctccacaaattgaaagtttttacccacctcttgatgaaccatctattggaagtaaaaatgttgatctgtcaggacggcaggaaagaaaacaaatcttcaaagggaaaacatttatatttttgaatgccaaacagcataagaaattgagttccgcagttgtctttggaggtggggaagctaggttgataacagaagagaatgaagaagaacataatttctttttggctccgggaacgtgtgttgttgatacaggaataacaaactcacagaccttaattcctgactgtcagaagaaatggattcagtcaataatggatatgctccaaaggcaaggtcttagacctattcctgaagcagaaattggattggcggtgattttcatgactacaaagaattactgtgatcctcagggccatcccagtacaggattaaagacaacaactccaggaccaagcctttcacaaggcgtgtcagttgatgaaaaactaatgccaagcgccccagtgaacactacaacatacgtagctgacacagaatcagagcaagcagatacatgggatttgagtgaaaggccaaaagaaatcaaagtctccaaaatggaacaaaaattcagaatgctttcacaagatgcacccactgtaaaggagtcctgcaaaacaagctctaataataatagtatggtatcaaatactttggctaagatgagaatcccaaactatcagctttcaccaactaaattgccaagtataaataaaagtaaagatagggcttctcagcagcagcagaccaactccatcagaaactactttcagccgtctaccaaaaaaagggaaagggatgaagaaaatcaagaaatgtcttcatgcaaatcagcaagaatagaaacgtcttgttctcttttagaacaaacacaacctgctacaccctcattgtggaaaaataaggagcagcatctatctgagaatgagcctgtggacacaaactcagacaataacttatttacagatacagatttaaaatctattgtgaaaaattctgccagtaaatctcatgctgcagaaaagctaagatcaaataaaaaaagggaaatggatgatgtggccatagaagatgaagtattggaacagttattcaaggacacaaaaccagagttagaaattgatgtgaaagttcaaaaacaggaggaagatgtcaatgttagaaaaaggccaaggatggatatagaaacaaatgacactttcagtgatgaagcagtaccagaaagtagcaaaatatctcaagaaaatgaaattgggaagaaacgtgaactcaaggaagactcactatggtcagctaaagaaatatctaacaatgacaaacttcaggatgatagtgagatgcttccaaaaaagctgttattgactgaatttagatcactggtgattaaaaactctacttccagaaatccatctggcataaatgatgattatggtcaactaaaaaatttcaagaaattcaaaaaggtcacatatcctggagcaggaaaacttccacacatcattggaggatcagatctaatagctcatcatgctcgaaagaatacagaactagaagagtggctaaggcaggaaatggaggtacaaaatcaacatgcaaaagaagagtctcttgctgatgatctttttagatacaatccttatttaaaaaggagaagataactgaggattttaaaaagaagccatggaaaaacttcctagtaagcatctacttcaggccaacaaggttatatgaatatatagtgtatagaagcgatttaagttacaatgttttatggcctaaatttattaaataaaatgcacaaaactttgattcttttgtatgtaacaattgtttgttctgttttcaggctttgtcattgcatctttttttcatttttaaatgtgttttgtttattaaatagttaatatagtcacagttcaaaattctaaatatacgtaaggtaaagactaaagtcacccttccaccattgtcctagctacttggttcccctcagaaaaaaattcatgatactcatttcttatgaatctttccagggatttttgagtcctattcaaattcctatttttaaataatttcctacacaaatgatagcataacatatgcagtgttctacaccttgcttttttacttagtagattaaaaattataggaatatcaatataatgtttttaatattttttcttttccattatgctgtactcttacctaaactctggtgatccaaacaaaatggcttcagtggtgcagatgtcacctacatgttattctagtactagaaactgaagaccatgtggagacttcatcaaacatgggtttagttttcaccagaatggaaagacctgtacccctttttggtggtcttactgagctgggtgggtgtctgttttgagcttatttagagtcctagttttcctacttataaagtagaaatggtgagattgttttctttttctaccttaaagggagatggtaagaaacaatgaatgtcttttttcaaactttattgacaagtgattttcaagtctgtgttcaaaatatattcatgtacctg

SEQ ID NO: 187537 - DNA, 2376 bp, Homo Sapiens
ttggctttattttagagctgtatgttaagaaaacagtctttccaatcataaaacagaaaatactctttagagaaaaatccacaatgcatgtaactaattattttttaatccttttttaaaaaaattgtgagccaccatgcctggactgcattaccaactcttgggactataatttttcatgtttcctttgaagtaatctccttaactacaaatcagttcttatcaacaaatatttataaaccaaatatgagttgcttgattatgtttcaaatattaatcatgttctgtgtagaactcttggaatataatatacagcagaagcagtctcaaatgctggagatgcaagtggagctcagcagtatgaaagacagagcaacggaactgcaggagcagctgagttctgagaaaatggtggttgctgaactgaagagtgagcttgcacaaactaaattggaactagaaacaacactcaaggcacagcataaacacctaaaagaattggaggctttcaggttggaagttaaagataagacagatgaagtacatttgcttaatgacacattagcaagtgaacagaaaaaatcaagagagctccagtgggctttggagaaagagaaagccaagttgggacgcagtgaagaacgggataaagaagaacttgaggatctgaagttttcacttgagagtcagaaacaaaggaatcttcagctaaatctacttttggaacaacagaaacaactactgaacgaatcccagcaaaaaatagaatcacagagaatgctatatgatgcccagttgtcagaagaacaaggtcgaaacttagagcttcaggtacttcttgaatctgagaaagttcgaattcgggaaatgagtagtaccctagatagggagcgggaattgcacgcacagctgcagagcagtgatggtactggacagtctcggccacccttgccctcagaggacctactgaaagagctgcagaaacagctagaggaaaaacacagtcgcatagtagaattgttaaatgagactgaaaaatataaactggattctttgcaaacacgacagcaaatggaaaaagataggcaggttcacaggaaaacactgcagacagaacaggaggccaacactgagggacagaaaaaaatgcatgagctccagtccaaagtggaagatcttcagcgccagctggaagagaaaagacaacaagtttataagttagaccttgaaggacagcgactacaaggaatcatgcaggaattccagaagcaagaactagaacgagaagaaaaacgagaaagtagaagaattctgtatcagaaccttaatgagccaaccacgtggagcttaaccagtgatagaactagaaattgggttcttcaacagaaaatagaaggagaaacaaaagaatcaaactacgctaaattggattgaaatgaatggaggaggaaccggctgtaatcatgaattagaaatgatcagacaaaagcttcaatgtgtagcttcaaaactacaggttctaccccagaaagcctctgagagactacagtttgaaacagcagatgatgaagatttcatttgggttcaggaaaatattgatgaaattattttacaactacagaaattaactggccagcaaggtgaagagcccagcttggtgtccccaagtacttcttgtggctcattgactgaaagactactgagacaaaatgctgagctgacagggcatatcagtcaactgactgaagagaagaatgacttaaggaacatggttatgaagctggaagagcagatcaggtggtatcgacagacaggagctggtagagataattcttccaggttttcattgaatggtggtgccaacattgaagccatcattgcctctgaaaaagaagtatggaacagagaaaaattgactctccagaaatctttgaaaagggcagaggctgaagtatacaaactgaaagctgaactaagaaatgactctttacttcaaactctgagccctgattctgaacatgtcactttaaagagaatttatggtaaatacttgagggcagaaagttttcgaaaggctctcatttaccagaagaaatacctgctgctgttactgggtgggttccaggaatgtgaagatgccaccttggccctgcttgcccggatggggggggcagccagctttcacggatctagaggtgatcaccaatcgcccaaagggcttcaccaggtttcggtcggccgtcagagtatccattgcaatttccagaatgaaatttttggttcgacggtggcatcgagtcacagttctgtttccatcaatattaacagagatggctttggactgaatcaagtgcagaaaagactgactcattttat

SEQ ID NO: 187538 - DNA, 872 bp, Homo Sapiens
ttgtacaaaaaagttggcgtcagagtatccattgcaatttccagaatgaaatttttggttcgacggtggcatcgagtcacaggttctgtttccatcaatattaacagagatggctttggactgaatcaaggtgcagaaaagactgactcattttatcattcttctggtgggctggagttatatggagaaccaagacatactacgtatcgctcaagatcagatctggactatattaggtcccctttaccatttcagaataggtacccaggcactccagctgatttcaatcctggttctttagcatgttctcagcttcagaattacgatcctgacagagccctaacagattatatcactcggctagaggcactgcaaagacgacttggaactatacagtcaggttcaactactcaatttcatgctggcatgagaagataatcctttgaaacatcattaattgaagtgattttaaatagatttccttttgtaaatcaatggttcttttgtgcttttgtattgtgaatattcaatgggaccaatatgaacacagcttatgattgtatacaaatcccttgccagcacatgaaaacaaactggaatttgtatatataagcattgtgtatgtattcatgcacaataattattgaattacctgtatatttgtggaatgctaatttaaaacattaaattataaaccttgtgtatttatcaaatgggtgaaaagattaaacttttacgcattacaatactgctgaatgtgtagctcgaggtgtcctgcacttttcttataaggctactgaagttacatgttttgcctaatatattctactggtgatgaagacagataatatcacttgtaaagacctattttt

SEQ ID NO: 187539 - DNA, 991 bp, Homo Sapiens
ttgggggaagagtcttttcagcgctgaggactggcgctgaggaggcggcggtggctcccggggcgtttgagcgggctcacccgagcccgcgggccaacgcggatccaggcccgactggcgggaccgccccggattccccgcgggccttcctagccgccatggaggacggcgtctatgaacccccagacctgactccggaggagcggatggagctggagaacatccggcggcggaagcaggagctgctggtggagattcagcgcctgcgggaggagctcagtgaagccatgagcgaggtggaggggctggaggccaatgagggcagtaagaccttgcaacggaaccggaagatggcaatgggcaggaagaagttcaacatggaccccaagaaggggatccagttcttggtggagaatgaactgctgcagaacacacccgaggagatcgcccgcttcctgtacaagggcgaggggctgaacaagacagccatcggggactacctgggggagagggaagaactgaacctggcagtgctccatgcttttgtggatctgcatgagttcaccgacctcaatctggtgcaggccctcaggcagtttctatggagctttcgcctacccggagaggcccagaaaattgaccggatgatggaggccttcgcccagcgatactgcctgtgcaaccctggggttttccagtccacagacacgtgctatgtgctgtccttcgccgtcatcatgctcaacaccagtctccacaatcccaatgtccgggacaagccgggcctggagcgctttgtggccatgaaccggggcatcaacgagggcggggaactgcctgaggagctgctcaggaacctgtacgacagcatccgaaatgagcccttcaagattcctgaggatgacgggaatgacctgacccacaccttcttcaaccggaccgggagggctggctcctgaagctgggttacgtgccctcccgaccccgctgg

SEQ ID NO: 187540 - DNA, 1344 bp, Homo Sapiens
  misc_feature (627)..(682): n is a, c, g, or t
ccaactttgtacaaaaaagttggcggttgaaggattctgtgtgctgtcggacccagagggtgacggcgccgctaggatgaagctcgtgagatttttgatgaaattgagtcatgaaactgtaaccattgaattgaagaacggaacacaggtccatggaacaatcacaggtgtggatgtcagcatgaatacacatcttaaagctgtgaaaatgaccctgaagaacagagaacctgtacagctggaaacgctgagtattcgaggaaataacattcggtattttattctaccagacagtttacctctggatacactacttgtggatgttgaacctaaggtgaaatctaagaaaagggaagctgttgcaggaagaggcagaggaagaggaagaggaagaggacgtggccgtggcagaggaagagggggtcctaggcgataatgtctctcaagatttcaaagtcatatgagatttgggatattttttgtacaggttgtgtttgtttatgtcagtttttaataaacataaatgtgggacagagctgtctatttagtatatcaaagttttagtagtttcctccacattcacgaaattaccacagtgagagctaagcatttctactgggcagtttnnnnnnnnnnnnnnnnnnnnnnnnnnnnnnnnnnnnnnnnnnnnnnnnnnnnnnnnatgatgaataaggttaaaataaaagccttagacaaattaaatttggcagagtttaattgagcaaaggacaattcacaaatcaggtagcccctgaaccataataggctcagaggcttcagcccagctgcatagttgaagatttatggacagaaggaaagtgatgtatggaaaatggaagtgagatacagtaacagccggattagttacagttcagcgtttgccttatttgaatatggtttgaacagttcgctgtctttggttggctgaaacttagtgattgccacaagagtagggtaccgtctgtttacacgtccagttaggctacagttctatgtactgagaaacctttaagctgaacttgagatatgtaaagagactttaggctaaacttaacaatatatataggatatatacccttctacttcacatgcactgaatatgcattttattgctttactcttcattctgtggcacctacccacaggggaagtaagaagtttgttttggtatttcggaaactaaaagtccttatgggatggggtctagaattgattctcctttcctgagttttactccacggagtcttagtacctggtaaaaagttgtcttctaattaagggtcattgctttgttgtctagctgctatgtcttacttttgtttc

SEQ ID NO: 187541 - DNA, 1696 bp, Homo Sapiens
ttggaggaggtgccaggcccgggtggcgccgtccgtccttcctggtcctgcgggtccaggactgtccgcggggttgagggaaggggccgtgcccggtgccagcccaggtgctcgcggcctggctccatggccctggtcacagtgagccgttcgcccccgggcagcggcgcctccacgcccgtggggccctgggaccaggcggtccagcgaaggagtcgactccagcgaaggcagagctttgcggtgctccgtggggctgtcctgggactgcaggatggaggggacaatgatgatgcagcagaggccagttctgagccaacagagaaggccccgagtgaggaggagctccacggggaccagacagacttcgggcaaggatcccagagtccccagaagcaggaggagcagaggcagcacctgcacctcatggtacagctgctgaggccgcaggatgacatccgcctggcagcccagctggaggcaccccggcctccccggctccgctacctgctggtagtttctacacgagaaggagaaggtctgagccaggatgagacggtcctcctgggcgtggatttccctgacagcagctcccccagctgcaccctgggcctggtcttgcccctctggagtgacacccaggtgtacttagatggagacgggggcttcagcgtgacgtctggtgggcaaagccggatcttcaagcccatctccatccagaccatgtgggccacactccaggtattgcaccaagcatgtgaggcagctctaggcagcggccttgtaccgggtggcagtgccctcacctgggccagccactaccaggagagactgaactccgaacagagctgcctcaatgagtggacggctatggccgacctggagtctctgcggcctcccagcgccgagcctggcgggtcctcagaacaggagcagatggagcaggcgatccgtgctgagctgtggaaagtgttggatgtcagtgacctggagagtgtcacttccaaagagatccgccaggctctggagctgcgcctggggctccccctccagcagtaccgtgacttcatcgacaaccagatgctgctgctggtggcacagcgggaccgagcctcccgcatcttcccccacctctacctgggctcagagtggaacgcagcaaacctggaggagctgcagaggaacagagcacagggcacccacgtgctggtccactgcaagatgggcgtcagccgctcagcggccacagtgctggcctatgccatgaagcagtacgaatgcagcctggagcaggccctgcgccacgtgcaggagctccggcccatcgcccgccccaaccctggcttcctgcgccagctgcagatctaccagggcatcctgacggccagccgccagagccatgtctgggagcagaaagtgggtggggtctccccagaggagcacccagcccctgaagtctctacaccattcccacctcttccgccagaacctgagggtggtggggaggagaaggttgtaggcatggaagagagccaggcagcccccaaagaagagcctgggccacggccacgtataaacctccgaggggtcatgaggtccatcagtcttctggagccctccttggagctggagagcacctcagagaccagtgacatgccagaggtcttctcttcccacgagtcttcacatgaagagc

SEQ ID NO: 187542 - DNA, 2039 bp, Homo Sapiens
  misc_feature (1139)..(1147): n is a, c, g, or t
  misc_feature (1202)..(1212): n is a, c, g, or t
  misc_feature (1795)..(1803): n is a, c, g, or t
ctttgtacaaaaaagttggtattgctacgtgaaaatcctgcagaaagacttgaaggcgtatacaggaacaatattgatgatgtagtaaggtttttggattcaaagcataaaaaccattacaagatatacaatctttgtgctgaaagacattatgacaccgccaaatttaattgcagagttgcacaatatccttttgaagaccataacccaccacagctagaacttatcaaacccttttgtgaagatcttgaccaatggctaagtgaagatgacaatcatgttgcagcaattcactgtaaagctggaaagggacgaactggtgtaatgatatgtgcatatttattacatcggggcaaatttttaaaggcacaagaggccctagatttctatggggaagtaaggaccagagacaaaaagggagtaactattcccagtcagaggcgctatgtgtattattatagctacctgttaaagaatcatctggattatagaccagtggcactgttgtttcacaagatgatgtttgaaactattccaatgttcagtggcggaacttgcaatcctcagtttgtggtctgccagctaaaggtgaagatatattcctccaattcaggacccacacgacgggaagacaagttcatgtactttgagttccctcagccgttacctgtgtgtggtgatatcaaagtagagttcttccacaaacagaacaagatgctaaaaaaggacaaaatgtttcacttttgggtaaatacattcttcataccaggaccagaggaaacctcagaaaaagtagaaaatggaagtctatgtgatcaagaaatcgatagcatttgcagtatagagcgtgcagataatgacaaggaatatctagtacttactttaacaaaaaatgatcttgacaaagcaaataaagacaaagccaaccgatacttttctccaaattttaaggtgaagctgtacttcacaaaaacagtagaggagccgtcaaatccagaggctagcagttcaacttctgtaacaccagatgttagtgacaatgaacctgatcattatagatattctgacaccactgactctgatccagagaatgaaccttttgatgaagatcagcatacacaaattacaaaagtctgaannnnnnnnnatcaagagggataaaacaccatgaaaataaacttgaataaactgaaaatggaccnnnnnnnnnnnaatggcaataggacattgtgtcagattaccagttataggaacaattctcttttcctgaccaatcttgttttaccctatacatccacagggttttgacacttgttgtccagttgaaaaaaggttgtgtagctgtgtcatgtatatacctttttgtgtcaaaaggacatttaaaattcaattaggattaataaagatggcactttcccgttttattccagttttataaaaagtggagacagactgatgtgtatacgtaggaattttttccttttgtgttctgtcaccaactgaagtggctaaagagctttgtgatatactggttcacatcctacccctttgcacttgtggcaacagataagtttgcagttggctaagagaggtttccgaagggttttgctacattctaatgcatgtattcgggttaggggaatggagggaatgctcagaaaggaaataattttatgctggactctggaccatataccatctccagctatttacacacacctttctttagcatgctacagttattaatctggacattcgaggaattggccgctgtcactgcttgttgtttgcgcannnnnnnnnaaagcatattggtgctagaaaaggcagctaaaggaagtgaatctgtattggggtacaggaatgaaccttctgcaacatcttaagatccacaaatgaagggatataaaaataatgtcataggtaagaaacacagcaacaatgacttaaccatataaatgtggaggctatcaacaaagaatgggcttgaaacattataaaaattgacaatgatttattaaatatgttttctcaaattg

SEQ ID NO: 187543 - DNA, 1412 bp, Homo Sapiens
tacgctgcgcgggctccggttggtcagccgcacctccaggcgcacggggtcgcccacctggcaggccgccacagcctcgcggtcacatggctgtccgtccaccagcacatcccactgcagaggcgccagctgcaggtgctccaggacgagctggttcaggagtccttccacactcgcctcgccactgcgcttcagggaggggattctccagcagatgcccagcttgctgtggatctccaggcctcgggcttcccgccgctcttcctccagctgcttggggtttgcaaattgccccttctccccaggggactccgggaaactctcaaagttgaacttgtccacttgaatagccattcgctggcactcgccggcgtgcaggatgagtgcctcgctgctcctggtgctgacggtcagctcatgctcggtggagttgaagacatccaggagcaggtgacactgccgggtactggttgctgggagggtgctgactcgggtgaaaaatacagacggctcgacttctacatgcagccccagggagagattcctgtaatatccttcagtgtggcccgggcctccagagtatttgaaattcaggacagcttccagggtcttcacgtggctgtagtcgcctgctttgttgctctcgggtgggttcacaggtttgccctccactcggggccgaacgacctgccgaaaaggactggacaggggaaagccactcacactgattccatcatcactgagatcctgcaggagattctcctggcaggagaaatccagcttcactttgatgttgattgtgaacgtggccaccttcccaggctgcaaagggaactgggcaagggtttcctctagcttccagctcaagaagtcgccatacaatttttctttagtggtgagaactttcgaggtgacctccagtttctccaatggttccattccaatattttccaatttaatgattagttgctgactttctccattgtaaagctggacagatacattagtagatatttcatcaccagaagaaggttgcaatgaatgtgcagatctgggcagagaggtgctgatctgcagtcttggcaacgcgggaatgacttccactgtggagccactggtttttattcccggcaggttatccagcaaacagtcactgaacacaccgaagaccgtggtatggtaaccgttcacagtaatcgttccagtcgtctgcgggaccccgacgagcgtcactgggtacagaccagattcagccggaagagaaagcgccgcagggagagactcgaactccactccgctggtgagcagccccatgttttcaactcgaagttcaaacggcattgggttatataccatcagctgaacttcacacacatctccttgaacccactggaaatctattttcttgccaa

SEQ ID NO: 187544 - DNA, 1723 bp, Homo Sapiens
  misc_feature (500)..(512): n is a, c, g, or t
  misc_feature (643)..(681): n is a, c, g, or t
tttgtacaaaaaagttggatcaaaaacaccccaggcttttgttcagaaatcacctttagtcaaaaggtttaagaagcaaattatttagtagcagaacttatctcaggaaaggaaaatatgcatggttggtgagaatctaataacattaaaatgctggggcaagatgcagtacaaagttgaagagactttattctcaataagttgatttactgatgatatgtcatatgatgcaaaaaaggttttgtgtcattaactgaaaagtagcagcttctctatccaggatgatgagtcaacaggtttcactaatatttgtcatgctgtagcatttgtaatatttgtaaatgatgaaattcaaagaaaactttttctattgctaggagcctgccagaacaaaggccattatataatgttgtgacatcatatctgataaccagaggtctggtatctacactcctggtgccccatcagtggttgtctccataagtcattttgcgttattnnnnnnnnnnnnngaaatcctgatgttgacattatagcacactgctttctccacagagatgctgatatcaaaaacttgaagatacagtgaagttctgaataatgttacaaaactggttacctgtatcaaagacccatttatgcnnnnnnnnnnnnnnnnnnnnnnnnnnnnnnnnnnnnnnncctggacagacagcacataaacctcctgcaccatacagacatccagtggcttctcagaggaagcgttctctacaggatatttgaattgaaaggtgaattgccagagtacttacaataaaacagccagcttttgctgagtgctttggaaatgaaaaatgactacagaaagtagcctattttgcagacgtttttcatcacatgaacaaatggacaagtctctgaaaggttctggggaaaaaaatttttcttaaagcgacaagactcttagatctaaaaggaaactgacttgccaccttgccagaggaattcttgaaatgtttctgcagccacttggccttgaaaataaagggtgcaactctcaaatcttgttctaacccggctggaggaaccacaagacccaatgaaatagcattttctctccttttcccagcactagtatataacctatgaggaacccttgtctctgaatctgctcagcttgaaattttgtctctgaaggaagagaatgaactcagccctagtctgacagtcctagatttctgtgaaataagagtattcttcaacttagtgctcacactcacataccatgagggttctctgcaggggtttaggggtttcctgaatttgaaagttttttcaaggcctctttttgggtaaaacaattgaaaaggcagacaccaacaaagtctgcaaaattaactgtccagattaagaatattaaggagctgtaaaattagcttgtagaaatggacttatccttaagttttaaaaagttaggaaatcctaaaaatgttaggcttcctgcacaagtggctatgttcatttaatggctagtgaacatgggaatgtatttttatcctcctagctggtggttctgtttggtaaaccagactagaatgatttgagaggggcaaagagaatagcaggaccttccttctatagctttacatatttagaatgttaatacttaatgacattgaagttaccttgcaatgattgataggaggattattaatatcagttaggggaatagggaggatag

SEQ ID NO: 187545 - DNA, 2117 bp, Homo Sapiens
  misc_feature (1620)..(1636): n is a, c, g, or t
ttggcgccggcggtagacgaggacgccaacagcagcggagaaacgtttctctttcctctcagtttgcgcacaccatggcggcccctgcccagcagactactcagcctggcggcgggaagcgcaaaggcaaggctcagtatgtgctggccaagcgcgctcggcgctgcgacgctggcgggccccgtcagctagagcccgggctacagggcatcctcatcacctgcaatatgaacgagcgcaagtgcgtggaggaggcctacagcctcctcaacgaatacggcgacgacatgtatgggccagaaaagtttacagacaaggatcatcagccctctggaagtgagggacaggatgatgatgcggaggctgcctcgaagaaagaagttggtgacattaaggcatctactgagatgaggttaagaagattccagtcagtggaaagtggagcaaataacgttgtcttcatcaggacacttgggatagagcctgagaaattggtgcatcatattctccaggatatgtacaaaaccaagaaaaagaagactcgagttattttgcgaatgttacccatctcaggcacatgcaaggcttttttagaagatatgaaaaaatatgcagaaacatttttggaaccctggtttaaagctccaaacaaagggacatttcagattgtgtacaaatctcgaaataacagtcatgtgaatagagaagaagttatcagagaattggcaggaatagtgtgcaccctcaattcagaaaataaagtggatctcaccaatccacagtacacagtggtagtagaaatcatcaaagctgtctgttgcctgagtgttgtgaaagattacatgttgtttagaaaatacaatctccaggaggtggtgaagagccctaaggatccgtcacagcttaactcaaagcagggaaatgggaaagaagctaaactggaatctgcggacaaatcagaccaaaacaacacagcagaaggaaaaaataaccagcaggtaccagagaatactgaggagctggggcagacaaaaccaacgtctaatccacaggtggtaaatgagggaggagccaaacctgaacttgcaagtcaagccacagaaggatccaagtcaaatgaaaatgacttctcataagaagtcatttggtgttggaggtgggtttctcacctggggctctacgagatgttgctggggctccaccttaaattgtgactaaaaacagttttttatttgtgtgctgcattatgctgttctcacagtagtgagcaatgattgcgcagccctgttaacagtttttttagggatctttcagcctttatggtattacgtagaggcagacccatgtgctgctgttgcaaagaggggaggataggagggggatgttggcctctcccaggctcctcttctgcagtgccagctgacttaagggagtgaactacctgtgaagtagaaaatcagagggaagttttcattctaaggaaggagtttttacatgccacagctcagctgtctgcctgccactttgttgtaaacattgcaaaaatgtggatcatgtaggttagaagtgaattgtttagtgaagtttttgtgcttttgtgattttcttgtttatgtctgnnnnnnnnnnnnnnnnnaacatttgtgtgtaatatagctgacagtccagtgtcgcaattttggaaggcaagatgtgagagagacgagaaccattttaggcatagaactacagacatttctgaaaaggttggtgatgaagaacttcagtcttctgagtatacttcagtatactagtgcaacaagggacacaaagaaattctgtcttaataaagaaagctacttctcaagggtattatgtggactcagtccaagctctcctgtcccattgtgcattgtctgtgacatgcaacttacaaaactagcaattgtaacaataaatcacagccacttgacaagaaaggatattcattattttcaaatggcttttggactatcaaaaacagtaaggcttttgttcagaaatcacctttagtcaaaagtttaagaagcaaattatttagtagcagacttatctcagaaaggaaatatgcatggttggtgagatctaataacattaaa

SEQ ID NO: 187546 - DNA, 1421 bp, Homo Sapiens
  misc_feature (413)..(421): n is a, c, g, or t
  misc_feature (1358)..(1380): n is a, c, g, or t
ttggtgctttttccttttatctaggttctttttctctttacctggggcctggcttttctgagattgtcttagggttgagctatttgggtatcctgggtttgagtgttaggggatggacataaaggaaaaagagtgatgagaagagaatggagagaatttgaataaaaggtgggaaaggagagcactgttctttgattgtttatccagtccaacctgatccattagggatcgaggtgctacactggcctccagggataagcctggggctactgttgctgggaacttaggcttaacataaagccgaagaaggtacctagaaatttgaaacttccctaaaaagctcctaatgcccacctgctagatagcttctctgtggcctcctatttagctaagcagcagtgtttttggatacnnnnnnnnnctgtttgtgaataaggccagcactcaagatgggcagccaagggtgcactgactattagctggcccataggatatctgtaaggctggtgggacagttttggacctggaatcatgtgtaactaacaaggttggacgtttcttccccatcagggtagaaaaatcatctcaaactagccaaaaggcagttttggctacattgggggacgttatttttatttatatatggggcctaggccaatccaggatggtagctggaataccttccttcttaaaatctgatcatggcagggatatgcagggcactttttactatttggccttctaagcagattgggaaggaggtattttctggttttcgctttcctccgacttaataggacttgccttctccctgggcagggagagaggctgggttggtgctctcccttactctactcatactgacttagagcctctggctgctgtttgggcatccaagaaagggaggggaaggaatgagctaaaaacaaaacagaatgaggtgggaaagggagattttcttctttacagaggaaaataggaaaccctccaagaattgtgcaagtaaagacatttgttgaatgcactgagtcccttggtgtagtagcaataaggaaaaatgaaattactttcctgtgcacacagtccagcctaattggtatgtgatgttgcacttagcagccatgtggtgggcatgtgtgactactctggttttcactttagtttctaaactttttatccctctcaagtccagcatggatggggaaatgtctctggatccccacagctgtgtacttgtttgcatttgtttccctttgagatttgtgtttgtgtcctgctttgagctgtaccttgtccagtccattgtgaaattatcccagcagctgtaatgtacagttccttctgaagcaagcaacatnnnnnnnnnnnnnnnnnnnnnnncaattctgtgttttataaagacaacagtggcttctatttct

SEQ ID NO: 187547 - DNA, 1124 bp, Homo Sapiens
ttggaatgaaagtgaagaaaaatacagaatatcctctaaatttgccagttgaagatatacagaagcgtcctgatcagacatgggttcagtgtgatgcctgtctaaagtggcggaaattacctgatgggatggatcaacttcctgaaaaatggtattgctccaataaccctgacccacagttcagaaattgtgaggttccagaagaacctgaagatgaggatttggtacatcccacttatgaaaaaacctacaaaaagaccaacaaggaaaaattcaggatcagacaaccggaaatgatccctcggattaatgctgaactgttgtttcggccaactgctctttcaactccaagcttttcttctcctaaggaaagtgttccaagaagacatctttcagaaggaacaaattcttatgcgacaagacttctaaataatcatcaagttccacctcagtctgaacctgagagcaacagcttgaaacggagactttctactcgttcctcaattttgaatgcaaagaatcggagattgagtagtcagtttgaaaattcagtttataaaggtgatgatgatgatgaagatgtcatcatcttagaagaaaacagtacccccaaacctgcagtagatcatgatattgacatgaaatcagaacagagtcacgttgagcaaggtggtgttcaggttgagtttgtgggtgacagtgaaccttgtggccagactggttcaacaagcacctcatcatcccgatgcgaccagggaaatactgcagctacccagactgaagtaccaagtttagttgttaaaaaagaagaaactgttgaagacgagatagacgtaagaaatgatgcagtgattctgccctcctgtgtagaagctgaagcaagatacatgaaacccaggaaaccaccgataaatctgcagatgatgcacgctgccaattacaagaactgagaaaccagctactccttgtcactgaggaaaaagagaattataaaagacagtgtcatatgtttactgatcaaatcaaagtgttacaacagaggatactagaaatgaatgacaagtatgttaagaaagaaacttgccatcagtccactgaaaccgatgctgtatttttacttgaaa

SEQ ID NO: 187548 - DNA, 1601 bp, Homo Sapiens
  misc_feature (124)..(136): n is a, c, g, or t
ttggaaaataagtttatgtcaaatccagcttcccagaaacactaataattaagtacatcaatgtactaaataaatcattcagttgcacccatggggaagattgtgttactgcccttcacagtgnnnnnnnnnnnnntctttcatttttaaaattaggagatgttacgtaacttggcactttagtagtgtatacactagcattagtttatacaccacttttgccgctggggaattcaagttgaaatgtccctcaatcatataggtctggaatacatctttcattcataatttctgctcagataattgaatagtttgccatcgagattattttcatttatactataaaacaaaagcaaactagtccagtttaattttttgtacttagaatattgcacattttctatatatgagttattcagattagtatctatgtaggttcagtcagatccaaccatggattcgaggtattatactgtataaccctacaaaatacatagaagtattatttgccttcataatagaacccaagagtctgtttcaatttatgaattcagtatttgcaccgagattttgattcccaaagtttggaaaaaaatgacaaaacaacgagggaagaaggaaccagaccttagtgccacatatttttctcttggggttgtaaggtagtctcctgctttccagaacactttattatatttcacttatagacctgattttctgtgtcaaagtataattctcatgctgaagctgtagcctaaaaagccaaaagaaagttgtcttcattgtacaaacatattcatcactttaacaataagggaacaaaatttagtattcaagctgagtgagaatactgtttcaatgagcatgtccctaagataaaccagaattggcagttaatttaggcgtctagaaaatctcagttcccaccagtaaaattatcctgagtagctaatgcaccttgagaaaaatctggcatactgaataaataacattaacttgggagccaagagctgggtaagccttacctttagactactctgtgactacagaaataaagccagcacttttggaactaataagccttcacttgtcagtatcataaagagtattgcccaactgaactttgctcccactggtttaatagttacttatttctgcctaagcactcaccttccgattttacccaagtatatatataggatagaaaaaaatgcattatatttgagagctacttcgcccaaattacaaaatgagtgtttttagattcaagtgacagtaaaaggatttgttcccttcagtgacttgagtgttttagttatgcataagtatttctagcaaaggaagggtagaaaggaattgaaaattaatttacactagttgctacttgggaataaagggctttttgaggggggtatggatattaaatgttttcgttatatacttatccctattaaaacaggcagttgtttcttttgaatatgcctaaataacagtattcttaaaatctgacagacaagtaacatgtcaattacttgaatattccttgtctcagtaccgcaggccactcttgacacccatgttttgcctggataaagttcctc

SEQ ID NO: 187549 - DNA, 1532 bp, Homo Sapiens
ttggcttctagaaagtatcactgagagtgaaaataaaatacagatcttgaacaactggctggaagcacaagaagagagactgaaaactttacaaaaacctgaaagtgtgatctcagtgcagaagctgctcctggactgtcaggatatagaaaatcaacttgcaattaaatccaaagcactagatgagttgaaacaaagttatctgactttggagagtggggcagtgccattgttagaagatacagcatcccgaattgatgagttatttcaaaagagaagcagtgttctcactcaggtcaatcagctcaaaacctccatgcagtcagttttacaggagtggaagatttatgatcaactctatgatgaagtgaatatgatgacaatccgattctggtactgcatggaacacagcaagcctgtggtgttatcactggagaccttgagatgccaggtggagaaccttcagtctctgcaagatgaagctgagagcagtgaagggagttgggagaaactccaggaggttatcggcaaactcaaaggtctctgcccctctgttgctgaaataatcgaagagaaatgccaaaatactcataaaaggtggactcaggtgaaccaagccattgcagaccagttgcagaaggcccagagtctgctccagctctggaaggcctatagcaatgctcatggtgaagctgccgcaaggctgaagcagcaggaagcaaagtttcaacagctcgcaaacatcagcatgtctggaaacaacctggcagagatcctgcccccagccctgcaggacataaaggagctgcagcatgatgtgcagaaaacaaaagaagcctttctccaaaattccagtgtcctggatcgactcccacaacccgcagagtccagcacccacatgctcctcccgggccccctgcactctctccagagggctgcttatttggaaaagatgctgcttgtgaaagcaaatgaatttgagtttgttctctcacagtttaaggattttggagtccggctggaatctttaaaaggtcttattatgcatgaagaagagaatttggatagacttcaccaacaggaaaaagaaaatcctgactcattcctgaatcatgtgctggcactgacagcccaatcacctgatattgaacatttgaatgaagtgagcctcaagctcccacttagtgacgtagctgtgaagacgttacaaaatatgaaccggcaatggattcgggccacggccacggcactggagcgctgcagtgagcttcagggaattggattgaatgaaaagtttctttattgctgtgaaaagtggatccaacttttggagaagatagaagaagcactcaaagtggatgtggctaacagccttcctgagctcctggagcagcagaaaacctataagatgttagaagctgaagtttctataaaccagacaattgctgattcctatgtcacccagtccttacaactcctggacacaacagaaatagagaacagaccagaatttattacagaattctcaaagc

SEQ ID NO: 187550 - DNA, 1585 bp, Homo Sapiens
ttcacagtcttttgaacatagactcagacccccgcaaaccttaatctattttctttgaaaatagtggaaataaactgaaggctttgaaaattcaccaacaatcttctatcaggggagcaatgataatactttttgataactgtgtcataggaactgggggtggcaagtctgcagggtgacaggtctgcaatagtacaggtgagagtcaggaagtcggggctgactcttcggggaaacgttcagcaggaaatgcctaacgtctgtgtcgctctcattctctctgttatttcctctcttctcctgtcccttggtgccaatgagaggcagcgtcggaggctccagcccgaggctcagaatgggtactgcgacacatatatccgcagtcggatcacggagctgcctctgaagttgatgacagtgttgacagtgatcatttccaagtccagctggatttcccggggccctttgatggggcgtgtcatcaccagggtggcactgatggggcccgtttgccgcatgtaaaattctctgccctcattcccagatttgatctggaaaatgtaataggccccagggtagcgggtcgtggcttgcatttggaagatgtcagcgggaacggagcgtcctgacaccacgtccatgtcccggtacaagatggtaaagggctggtctctgcagccagggttctcagcaggacacatacagcggttatcactgatcctcagataaggctcctcacagcggatggggtcgatgcatttgaagcccccttgtaaattgtagcacgtctgctgcaggttgcacgtgtggttcctgtgctcacattcgttgatgtcttggcagcttcggttgtcatccagcaggatgtagcctggagggcaggagcagaagtatgtgccgggctggttcacacactcatgttggcagaggaactcagagaagctgcactcgtccatatcactgcaatgaacgccatcttcctcaagttcatatcctgggtcacagcggcagatgaaagagccgtaggtgttgacgcaggtttgcacgcaggggttctcggtggcacactcgttcacatcttggcaagaccttccatcctcattgagggtaaaaccagggttgcatgtacaagaataggatccaggaacattcgcacagagctgctggcagtaaccatagcgacattcatcaatgtctaagcactggccttccagaagccaatatccgtcggtgcaggagcaggtgtacccgccttcagtattgatgcagatctgggtggggttgcactggtgggaatctgttgcacactcgtccacatccacacattggttgctttcatccatctggtatccaaagcggcatataagaggcctggagatcgtgggatagtttggagctgagagtggtggggcagctgctgggtacggacctgagtagggggtcgagtaggggttcgagtagggccctcgatacacagggtttgtccggggaatgcataaatacccgccattttggttaacacacatcatgtctcctcggcaggcctcggggatggttcggcattcatcaatatctaaacacccaa

SEQ ID NO: 187551 - DNA, 1221 bp, Homo Sapiens
ttatgagagttacttaaaggtaacatcacatactaaatgtcttctataatcctatatttattaatgcattacaactctgtagattgttagttactaggccagtagctaggaattggtataaatttaatgcaccttctatcctgaataactagcatggaaaagtgaatatatgtgtgagcagatatggctataaagacctatagcttttgcactttatgcatatataatcaatcctttctagttcagtgaattgaccccatccacaggctgattcatctttgtgttaaggggcaaatgaaacggtatattatttctttgcagtctcctctcagtcattcatcaatgtggccagcttatctactcccaattatgttgttgatacatctccaagccatctgtcatcagatcaaaaagcagcaaacagagggtcagtcacaggatgttctgacacaccattgtaactttttgttagagatgatcccatttagaaaaagactggtagaaattggagtgaaaggaaccctacagattagcccagttctctcttattttcagctttacagacaagaacaatttaaatctaaagaatttagtagattccttcagtgtcacaaagctgtttcatgaaagaatcaagattataacctggatattctgactcctggcccagtgctttttcttactttgtagctacactttgaagtaagattcaaactgttatccactcaattgccttattcctgaggatgtagtgaaggaagaaaaagttttctggaattccgtaaactatattttaagcttatttcttcaaaattattttcatatatcacagatatatcattggaagatataatttgcatatatgttcattatcagtgttcctaatttggtattacatgtattctatttttttctgaatgatagcatgaaaagtgtcaaagtggtttgtccgctagcgtctgtctgcagaactttcaggatgactattaatttcctctcagatgtcatttttgagtggtccaagcctgctgttttgaaacccacagcagtgggagatttgtattcttatttacagttgtgtactataaagtgtgtgttacattaggttttgtgtaataattatttgtaaattattatttagatttgtatttagacatgatttatatctaatatagataacaagttctggtgtcctaattattatttaaagaagtgattttt

SEQ ID NO: 187552 - DNA, 1685 bp, Homo Sapiens
  misc_feature (113)..(153): n is a, c, g, or t
tgttatttgtaaacattagattttgaatctcatataattttacatgccactaaatattcttttataattttacgtgccactaaatattcttttccctttaaattaacaatgtnnnnnnnnnnnnnnnnnnnnnnnnnnnnnnnnnnnnnnnnntcacacacacatttttagctctcaagccctatgaaaacaggcagcaggctggatttggcctgtgggccatgatttgctgacccctgctttaaacaatgtgaacatgtaactttgatgaaaataaaaactacgaagacatgagcagagtgaaaacaattggaaagaataattgcaaatttgtcccatataatgcctattacaaaatttctttttaccagagtccattctgaaggacatgagaaggaattcagacagaaatatactgtctccttggtgtttacaatcatctaggctgtgtagaattaagaccccttttttctatagacatagaacctgtcctctagagatcaagtgccttgcccagaatcatagtttataagggactagaattgagactagaatctattgcttttttttcctcttcattgcttactgcacaaataatacgtgactatatccttgtaaaaagcactacagaagactgtatattttaaaagtcactgttctcctgcattttgtcacagtcccattcccctccttatacacactcagagttaatcattattgcaatgtgatcactaccatatgttgtagtgagaaaatagttctattagttagggggagaaaaatcacaaaccttcaattttttttcttccaggcgcttaaattcctagcgaagtgccgtaagaaaaagaaactatttgctccttggcgaggactccaagaactcactgatgcacgccgagttgaactgaagaaacgagtggatgactatgtcagaagacatttgggctctccaatgtcagatgtggtcagtagggagctccatgcccaagctcaagaacgactgcaacactactttatgggcagggccctagaagagcgagcccagcagcacagagaagctctgatagcacagatcagcaccaacgttgaacagctaatgaaggcaccaagtctgaaggaggcagaagggaaagaacctgagctcttcctaagtagatccaggcctgtggcagccaaggccaagcaggcccatctcacaaccctgaagcacatacaagcaccctggtggaagaagcttggagaagaatctggagatgagattgatgttccaaaggatgagcttagtatagaattagaaaatttattcattggtggaaccaaaccaccttagtgagtaaccctaagaattgacacaaatctcatattttaggagattatattggttctgcctctggcatgctggtagactaggggccatcctaacttattattttccagaggttctcctctagacaagacctgcaataagcaaagagttatattctacctctctctcaattttctttttcttttctctgtatcctcatccttagcgacacacagattttgtgtggcttttattgtagaactaaaccttagcatagtgttctgttgttttacatgaagtgtgtttttctttgggtttctccggttttccactaaatattttgttctaaataaatatttttcaacaattgatttgaaaa

SEQ ID NO: 187553 - DNA, 973 bp, Homo Sapiens
acattgtttatcactttgatacttgacccgagagaggatgaagtaaacaatgcggcttctggtggctggattgaagaaagcatctctatcaactatgtaaaaatcattcatccggttcttctcaaatggggcagtgaaaaactcttgctctggcttgatgatgctttcgtctacactgaggactttggtaaaccagttgagtgtaccaaaggctgaggaccggtttttcagatcattgggtttcagaggcaatttgatgtgcattatctcagcatacgtacataacacctcccatggtgcgtgtacttttacaaatacaagcttgtcatccaatactgatcttgttgcttctaactgcaggccatgacagataaggttagattcgtatgcttgtcttttcctcctttgtttttcatttgtaccctttttattggtctcttttctgctttcatcctcatatactagaacaaagtcaattcttcgctggccatcattaaaaaagagggagtcaggttttccattaaattcttcaaactccggggttcgaaaatcatgctgactttccagtgatcccaaatcggggacaattgtctgtccaaggttttccaacacgatatccccatcgtcgtcgtcctcctcctcctccatttgtagcaaaacattcctgctcatctttttcatgtctccctcagaaggcggctccgaacttggcgcgaagttgggggctcccgggttccagaacggcgcggctctcccaggggccggatcggggaccgcggggcgtgtgtcgcttgggctcaggggccgctgagcccagccagcgccggggaaagccgagccgaggcacccaccgaccggagcccagagccggaggacgcctctcgcctgccgagcggagcccggagactgagcatgcccagtgcggccgccgcggctcgctgcggaatgattgaacttccccggttttacccaa

SEQ ID NO: 187554 - DNA, 2153 bp, Homo Sapiens
actttgtacaaaaaagttggcaattgtcgcgggtagtggggcgccccagctgccaactgcacgtggtttctttctggcgtttgcctagtgtcctgtccattccgccccgttgggaagtgggaagcggagaggttctgtggggacagagctgggagtcctgaaggagaaagcgcgcagccgaggggctctggagtgccttagagcagagctgcggtcgcggaaggggagcagctgagaaaggagggccgctgcaggcggggttcgaaccgtggggtctgggctgctcccgcggagggcctgggcggacgcgggatgctgggggtccgctgcctgctgcggtccgtgcgcttctgttcctccgcccccttccccaagcacaaaccttcagccaaactgagcgtgcgggacgctctcggggctcagaacgcgagtggggagcgcattaagatccagggatggattcgttctgtccgatcccagaaggaagtcttgttcctgcatgtaaatgatgggtcatctttggaaagccttcaggttgttgcagattcaggccttgacagtagagaattaacttttgggagttctgtggaagtacaagggcagctgataaaaagtccatccaaaaggcaaaatgtggaactgaaggcagaaaaaattaaagttattggaaattgtgatgccaaggatttccccatcaaatataaagagaggcatcctctggagtacctgcgacaatatcctcactttaggtgtaggactaacgttctgggttctatattgaggattcgcagtgaagcgacagctgctattcattctttctttaaggacagtggctttgtacatattcatactccaataatcacatccaatgactctgagggagctggagaactttttcaacttgaaccttcaggcaaacttaaggtacctgaggagaatttcttcaatgttcctgctttcttaactgtctcaggacaacttcatctagaagtgatgtcaggagcttttactcaagtgtttacctttggtccgaccttccgagctgaaaattctcagagccggaggcacctggcagagttttatatgatagaagcagagatttcttttgttgacagccttcaagatcttatgcaggttatagaggaactgttcaaggctacaacaatgatggttctctcaaaatgtcctgaagatgttgaactctgtcacaaattcatagcacctggccaaaagtctttttattaaggacagattagaacatatgctaaaaaacaactttttaatcatttcttatactgaagcagtggagatcttaaagcaagcatcccagaacttcacctttaccccagagtggggtgctgacctacggactgaacatgaaaagtacctggtgaagcactgtggcaacatacctgtcttcgttattaattatccattaacactcaagcctttctacatgagggataatgaagatggccctcagcacacggttgctgctgttgatcttctggttcctggagttggggaactctttggaggaggcctcagagaagaacgataccatttcttagaggagcgcttagccagatcgggacttacagaagtctaccaatggtatctggaccttcgtcgatttggatctgtgccacatggaggttttgggatgggatttgaacgctacctgcagtgcatcttgggtgttgacaatatcaaagatgttatccctttcccaaggtttcctcattcatgccttttatagctggaagattggttaaggaaaagcaccccccatggcagagacactgcacatgattgtgcatacagcagaatgcatgtttggattttagaaatgcagatttcaatatgtaattgttgtgccataagatatcatagaaaaaatataagtggttgtgattttcttagaaagttgagggtatttcacgtaaggatgagctcccgcaagaagaggtacttatagcaaggggactctcaaatccattacctcaattaagaaatgaagaaattgaattagtctcaaagtttcttttaaactctaaacagaatgagataatgtattttacgttgtctataatcattaaatcactccctgtgtatttgtgagaaaccatctagtagctccaaataaataatgg

SEQ ID NO: 187555 - DNA, 1213 bp, Homo Sapiens
ttggctggcactttgcagggttcactggcactttctggggctcattgacactttggggtacactggcattctttggtgttcactggcattttgggggtgcactggcactttggaacaacggcacgcctcttggcccttgcccagctggtgctcctggctgggaagctgaacacactggctgctgtggtcactgtcttctacctggtggcctatgctgccgtggacctgtcctgcctgagcctggagtgggcctcggcccccaacttccggtgagagactcagatctgtgtccccagagagaagaagggaggactcgggctcaggcgtggggctggggactgcagcctcgtgtgcggcctgccctgagtttctgtccctcctcccctccatgcccgcagccccaccttcagcctgttctcctggcacacctgcctgctgggggtggcctcctgcctgctcatgatgttcctcatcagtcctggcgcggctggtggctccctgctcctcatgggtctgctggctgccctgctcaccgcgcgaggaggccccagtagctggggctatgtcagccaggccttgcttttccaccaggtgcgtaagtatctgcttcggctggacgtccggaaggatcacgtgaagttctggcggccccagctgctgctcctggtggggaacccccggggcgccctgcctctgctgcggttggccaaccagcttaagaagggggggctgtatgtgctgggccacgtcaccctgggagacctcgactccctgccctcggaccctgtacagccgcagtatggggcatggctcagcctggtggaccgtgcccaggtgaaggcttttgtggatctaaccctctcaccctccgtgcgccagggggctcagcatctgctgcgaatctccggcctcggtggcatgaagcccaacacgttggtcctaggtttctacgatgacgctccaccgcaggaccatttcctgacggacccggctttctctgagcctgcagacagcaccagggagggcagttccccagctctgagcaccctgttccctcctccccgggctcctgggagcccccgggccctcaatccccaggactatgtggccacggtggccgacgccctcaagatgaacaagaatgtggtgctggcccgggccagcggggccttgcccccctgagcggctgagccgggggtctgggggcacctct

SEQ ID NO: 187556 - DNA, 1596 bp, Homo Sapiens
ttggccagctgtcaccgccccccccaggatgcaatggcgcagcccccccggctgagccgctctggtgcctcctcactttgggacccagcttctcctgctcccacctctggccccaggcctcggctttgggagggtcaagatgtgctggccagatggactgatgggctgctatacttgggtaccatcaaaaaggtggacagtgctagggaggtgtgtctggtccagtttgaggatgattcgcagtttctggttctatggaaagacattagccctgctgccctccctggagaggaactcctctgttgtgtctgtcgctctgagactgtggtccctgggaaccggctggtcagctgtgagaagtgtcgccatgcttatcaccaggactgccatgttcccagggctccagcccctggagagggagagggcacatcctgggtatgccgccagtgtgtctttgcgatcgccaccaagaggggaggtgccctgaagaagggcccctatgcccgggccatgctgggtatgaagctttctctgccatatggactgaaggggctggactgggatgctggacatctgagcaaccgacagcagagttactgttactgtggtggccctggggagtggaacctgaaaatgctgcagtgccggagctgcctgcagtggttccatgaggcctgcacccagtgtctgagcaagcccctcctctatggggacaggttctatgaatttgaatgctgtgtgtgtcgcgggggccctgagaaagtccggagactacagcttcgctgggtggatgtggcccatcttgtcctgtatcacctcagtgtttgctgtaagaagaaatactttgattttgatcgtgagatcctccccttcacttctgagaattgggacagtttgctcctgggggagctttcagacacccccaaaggagaacgttcttccaagctcctctctgctcttaacagccacaaggaccgtttcatttcagggagagagattaagaagaggaaatgtttgtttggtctccatgctcggatgcctccccctgtggagccccctactggagatggagcactcaccagcttcccttcagggcagggccctgggggaggggtctcacgtcccctggggaagcgccggaggccggagccagagcccctgaggaggaggcagaaggggaaagtggaggagctggggccaccctcagcagtgcgcaatcagcccgagccccaggagcagagggagcgggctcatctgcagagggcactgcaggcctcagtgtctccaccatcccccagccctaaccagagttaccagggcagcagcggctacaacttccggcccacagatgcccgctgcctgcccagcagccccatccggatgtttgcttccttccacccttctgccagcaccgcagggacctctggggacagtggacccccagacaggtcacccctggaacttcacattggtttccccacagacatccctaaaagtgccccccactcgatgactgcctcatcttcctcagtttcatccccatccccaggtcttcctagacgctcagcacccccttctcccctgtgccgtagattg

SEQ ID NO: 187557 - DNA, 1122 bp, Homo Sapiens
actttgtacaaaaaagttggattgatcatcatatgggttttggtgatgtatattggccaagtggccaaggatgtcttgaagtggccccgtccctcctcccctccagttgtaaaactggaaaagagactgatcgctgaatatggaatgccatccacccacgccatggcggccactgccattgccttcaccctccttatctctactatggacagataccagtatccatttgtgttgggactggtgatggccgtggtgttttccaccttggtgtgtctcagcaggctctacactgggatgcatacggtcctggatgtgctgggtggcgtcctgatcaccgcactcctcatcgtcctcacctaccctgcctggaccttcatcgactgcctggactcggccagccccctcttccccgtgtgtgtcatagttgtgccattcttcctgtgttacaattaccctgtttctgattactacagcccaacccgggcggacaccaccaccattctggctgccggggctggagtgaccataggattctggatcaaccatttcttccagcttgtatccaagcccgctgaatctctccctgttattcagaacatcccaccgctcaccacctacatgttagttttgggtctgaccaaatttgcagtgggaattgtgttgatcctcttggttcgtcagcttgtacaaaatctctcactgcaagtattatactcatggttcaaggtggtcaccaggaacaaggaggccaggcggagactggagattgaagtgccttacaagtttgttacctacacatctgttggcatctgcgctacaacctttgtgccgatgcttcacaggtttctgggattaccctgagtctcaaacagttggaaactagcccactggacatgaaagccaagacataggaaagttattggtaggcaaatcttgacaacttatttttctttaacaacaacaaaaagtcatacggctgtcttgctactaccagataaatgatgctgctgtgtgaaaggaaaaactgtctcatagcggtcaatggtcgtccgtggtggttggttgtgctacagttgaacccaggctaaagaccataatccggatctttaaaggcacacaccg

SEQ ID NO: 187558 - DNA, 1256 bp, Homo Sapiens
ttggctttaattggttgcagttgagctaatggtggagccaaaatgctattgccctgtcttcatcaacatttaatcaagaacgtttgtctgcctgatgagagccacttgggttaagaaactacctgtgaatagtcatcatttctgtccttcattggggaatacttttagagagtgttgcggagataggaacatgggagagaaacaatctgggtaacatgaaagtgatgctggttgctaagggaaggcaacttgattctgtgggaagggctgtagctgatccatccgttgtctagatttgagtatgagcacagtggaagaggattctgacacagtaacagtagaaactgtgaactctgtgactttgactcaggacacagaagggaatctcattcttcactgccctcagaatgaagcggatgaaatagactcagaagatagtattgaacctccacataaaaggctttgtttgtcctctgaggatgatcagagtattgatgattctactccttgcatatcagttgttgcacttccactttcagaaaatgatcagagctttgaagtgaccatgactgcgaccacagaagtagcagatgatgaggttactgaggggactgtgacacagatacagattttgcagaatgagcaactagatgaaatatctcccttgggtaacgaggaagtttcagcagttagccaagcatggtttacaactaaagaagataaggattctctgactaataaaggacataaatggaagcaggggatgtggtccaaggaagaaattgatattttgatgaacaatattgaacgctatcttaaggcacgcggaataaaagatgctacagaaatcatctttgagatgtcaaaagacgaaagaaaagatttctacaggactatagcatggggtctgaaccggcctttgtttgcagtttatagaagagtgcttcgcatgtatgatgacagaaaccatgtgggaaaatatacacctgaagaaattgagaagctcaaggaacaactgtggaccccaaaaaaaggccacactttcaaactttggctctcaaagtattgctgcccacaacttccaaaccagtcaaatgggaagaagaagaatgaagaataaatgatgaaattaaaagggagaaaacaattgaaccaaatgctgattggcagactcttgttttacgctccggataaagcatggcaatgactgggcaacaataggggcggcgctaggaagaagtgcatcttctgtcaaa

SEQ ID NO: 187559 - DNA, 952 bp, Homo Sapiens
ttggggagactatggaacgtcaggtgctgctgagcgagcccgaggaggcggcggctctgtatcggggccttagccgccagcccgcgctgagcgccgcctgcctgggcccggaggtcaccacgcagtacggcggccaataccggacggtgcacactgagtggacccagagggacctggaacgcatggagaacattcgattctgccgccaatacctggtgttccatgacggggactcagtggtgtttgcaggacctgcaggcaacagtgtggagacccggggggaactgctgagcagagagtctccttcaggcaccatgaaagctgtgctgcgcaaggctggaggcacgggccctggggaagagaagcagttcctggaggtctgggagaagaaccggaagctcaagagcttcaacctgtcagcgctggagaaacatgggcctgtttatgaggatgactgctttggctgcctgtcctggtcgcactcggagacacacttgttgtatgtggcagagaagaagcgccccaaggccgagtccttctttcagaccaaagccttggacgtcagtgccagcgatgatgagatagccaggctgaagaagccagaccaagccatcaagggggatcagtttgtgttttatgaagactggggagaaaacatggtttccaaaagcatccctgtgctctgcgtgctggatgtcgagagtggcaacatctctgtgcttgagggggtccctgagaatgtgtcccctggacaggcattttgggcccctggagatgctggtgtggtgtttgtgggctggtggcatgagcccttccggttgggcatccgcttttgcaccaatcgcaggtcagccctgtattatgtggacctcatcggggggaagtgtgagctcctctcggatgactccctggctgtctcttctccccggctgagcccagaccaatgtcgcat

SEQ ID NO: 187560 - DNA, 1531 bp, Homo Sapiens
ttggccttaaattgatttgttctcatcagctaatgtatcagatttaatttttatatgtatagataatgaaacaggaataaaatttatatgtgtcagttattgaaaggttaactttttttcaggaatattactggtcacttcaaaataaagcatatttgatagattcccaatatttcaacatctataattacatctaaaaaaagagcctcctgaaaaatgagctttgattaccaaaagtttctttataatagaatgtctttatgtaaggattgctacatactaatgattttcttcaaattctcttttccccctcaaccagccaggcccacaactcctctttctgtaggcaccattgtcccacctccgaggcctgcttccagaccaaagcttacttcaggcaaactcagtgggattaatgaaatacccaggccattcagcccacctgtaacttccaacaccagcccacctcctgctgcaccattagcccgggcagaaagttcttcttctatctcatcatctgcttcattgagtgctgccaatactccaacagtaggtgtgtcacggggtcccagccctgtcagccttggaaatcaggataccttacctgtggcagttgcccttacagaatctgttaatgcctactttaaaggagcagatcccaccaagtgtattgtgaagatcactggtgatatgacaatgtcatttccaagtggaattattaaagtcttcaccagcaatccaactccagctgtgttgtgcttcagggtgaaaaatatcagcagactagagcagattcttccaaatgcacagcttgtgttcagtgatccatcacaatgtgattccaacacaaaagatttttggatgaacatgcaagctgttacagtctacctcaagaagctgtcagagcaaaatccagctgcttcttattataatgtagatgtattaaagtatcaggtatcatcaaatggtattcagtccactcctctgaatcttgcaacatactggaaatgtagtgctagcaccacagatcttagagtggattataaatacaatccagaagctatggtggcacctagtgtgctttccaacatacaggtggtggtaccagtggatggaggagtaacgaacatgcagtcccttccccctgcaatatggaatgcagaacaaatgaaagccttttggaaattgtctagtatttcagaaaaatcagaaaatggaggttctgggtccctccgagcaaaatttgatctttcagaagacctagtaaacccacgacacttgcagtacaattcctcagcgagggaagtaccctttcacgagtagatttcgaacttgtgggcactggctataggctttccttaataaagaagcggtttgctactggacgatacctggcggattgttgatggacctgggaaagtgatgtggcttcaggattacaaacctgccattctgcattatctgttctttccaaacactattttaacttgtatgatgtctttcaaacttagacatatttgagagctgacta

SEQ ID NO: 187561 - DNA, 1770 bp, Homo Sapiens
ttgggtcatggcgtatttcgtcgagaatttttggggggaaaaaaatagtggctttgatgtcctctaccataatatgaaacatggacagatatcaacaaaagaactagcagattttgtaagggaacgagctaccatagaggaggcatactccaggtcaatgacaaaactagcaaaatctgcaagcaattattcacaacttggaacatttgcaccagtatgggatgtattcaaaacatctacagagaaattagcaaattgtcacttggatcttgttagaaaattacaagaattaataaaggaagttcagaagtatggagaagaacaagtaaagtctcataaaaagactaaagaagaagttgcaggaactctggaagctgtccaaaccattcagagcataactcaggccctccagaaatccaaggaaaattacaatgccaagtgtgtagaacaggagcgtttgaaaaaggaaggagctacacaaagagaaatagaaaaggcagctgttaaatctaagaaagctacagatacctataaactctatgtggaaaaatatgcattagcaaaagctgatttcgaacagaaaatgacagaaacagctcagaaatttcaagatattgaagaaactcatctcattcacataaaggaaattataggatccttgtcaaatgctataaaggaaattcatttgcagataggccaggtccatgaagaatttataaataacatggctaatactacagttgaaagtttgatacaaaaatttgctgagtcaaaaggcactgggaaggaaagacctggcctcattgaatttgaagaatgtgacactgctagtgcagttgaaggtataaaaccaaggaaaagaaagacctttgctttgccaggaatcattaaaaaggaaaaagatgcagaatctgtggaatgtcctgatgcagattcattgaacattcctgatgtagatgaagaaggctacagtattaaaccagaaacaaatcagaatgataccaaagagaaccatttctactcatctagtgattctgactccgaagatgaagaaccaaagaagtatcggatagaaattaagcctatgcatccaaataactcacatcacacaatggcttctttggatgaattaaaagtatctatagggaatataacactctccccagcaatatctagacacagtccagtacagatgaatcggaatttgtctaatgaggagttaacaaaatcaaagccatctgctccacccaatgaaaaaggaaccagtgatttacttgcttgggaccccctatttggaccatctcttgattcatcttcttcatcttcactaacttcatcatcatcagccaggcccacaactcctctttctgtaggcaccattgtcccacctccgaggcctgcttccagaccaaagcttacttcaggcaaactcagtgggattaatgaaatacccaggccattcagcccacctgtaacttccaacaccagcccacctcctgctgcaccattagcccgggcagaaagttcttcttctatctcatcatctgcttcattgagtgctgccaaatactccaacagtaggtgtgtcacggggtcccagccctgtcagccttggaaatcaggataccttacctgtggcagttgcccttacagaatctgttaatgcctactttaaggagcagatcccaccaagtgtattgtgaagatcactggtgatatgacaatgtcatttccaagtggaaattattaagttcttcaccagcaatccaa

SEQ ID NO: 187562 - DNA, 1303 bp, Homo Sapiens
ttggcaattataaaagaagagctggtcctgaagctcacaaccgtaacagccaccagacaagcttcagtggccggcccttcacatccagacttgcctgagaggacccacctctgagtgtccagtggtcagttgccccaggatggggaccacagccagagcagccttggtcttgacctatttggctgttgcttctgctgcctctgagggaggcttcacggctacaggacagaggcagctgaggccagagcactttcaagaagttggctacgcagctcccccctccccacccctatcccgaagcctccccatggatcaccctgactcctctcagcatggccctccctttgagggacagagtcaagtgcagccccctccctctcaggaggccacccctctccaacaggaaaagctgctacctgcccaactccctgctgaaaaggaagtgggtccccctctccctcaggaagctgtccccctccaaaaagagctgccctctctccagcaccccaatgaacagaaggaaggaacgccagctccatttggggaccagagccatccagaacctgagtcctggaatgcagcccagcactgccaacaggaccggtcccaagggggctggggccaccggctggatggcttcccccctgggcggccttctccagacaatctgaaccaaatctgccttcctaaccgtcagcatgtggtatatggtccctggaacctaccacagtccagctactcccacctcactcgccagggtgagaccctcaatttcctggagattggatattcccgctgctgccactgccgcagccacacaaaccgcctagagtgtgccaaacttgtgtgggaggaagcaatgagccgattctgtgaggccgagttctcggtcaagacccgaccccactggtgctgcacgcggcagggggaggctcggttctcctgcttccaggaggaagctccccagccacactaccagctccgggcctgccccagccatcagcctgatatttcctcgggtcttgagctgcctttccctcctggggtgcccacattggacaatatcaagaacatctgccacctgaggcgcttccgctctgtgccacgcaacctgccagctactgaccccctacaaagggagctgctggcactgatccagctggagagggagttccagcgctgctgccgccaggggaacaatcacacctgtacatggaagcctgggaggatacccttgacaaatactgtgacccgggagtatgctgtgagacccaccaccacttgtgttgccgccaccctccca

SEQ ID NO: 187563 - DNA, 932 bp, Homo Sapiens
ggagcttcctcctggaagcaggagaaccgagcctcccctgccgcgtgcagcaccagtggggtcgggtcttgaccgagaactcggcctcacagaatcggctcattgcttcctcccacacaagtttggcacactctaggcggtttgtgtggctgcggcagtggcagcagcgggaatatccaatctccaggaaattgagggtctcaccctggcgagtgaggtgggagtagctggactgtggtaggttccagggaccatataccacatgctgacggttaggaaggcagatttggttcagattgtctggagaaggccgcccaggggggaagccatccagccggtggccccagcccccttgggaccggtcctgttggcagtgctgggctgcattccaggactcaggttctggatggctctggtccccaaatggagctggcgttccttccttctgttcattggggtgctggagagagggcagctctttttggagggggacagcttcctgagggagagggggacccacttccttttcagcagggagttgggcaggtagcagcttttcctgttggagaggggtggcctcctgagagggagggggctgcacttgactctgtccctcaaagggagggccatgctgagaggagtcagggtgatccatggggaggcttcgggataggggtggggaggggggagctgcgtagccaacttcttgaaagtgctctggcctcagctgcctctgtcctgtagccgtgaagcctccctcagaggcagcagaagcaacagccaaataggtcaagaccaaggctgctctggctgtggtccccatcctggggcaactgaccactggacactcagaggtgggtcctctcaggcaagtctggatgtgaagggccggccactgaagcttgtctggtgccaacttttttgtacaaagt

SEQ ID NO: 187564 - DNA, 558 bp, Homo Sapiens
ttgggggcaccggctcgcggcgcgtggaggctgctcccagccgcgcccgagtcagactcgggtgggggtcccggcggcggtagcggcggcggcggtgcgagcatgtcgtggctcttcggcgttaacaagggccccaagggtgaaggcgcggggccgccgccgcctttgccgcccgcgcagcccggggccgagggcggcggggaccgcggtttgggagaccggccggcgcccaaggacaaatggagcaacttcgaccccaccggcctggagcgcgccgccaaggcggcgcgcgagctggagcactcgcgttacgccaaggaggccctgaatctggcgcagatgcaggagcagacgctgcagttggagcaacagtccaagctcaaagagtatgaggccgccgtggagcagctcaagagcgaacaaatccgggcgcaggctgatgagaggaggaagaccctgagcgaggagacccggcagcaccaggccgtaatagcgcaagaggccgcgagggaggccgcccggctgcggggagcggcctggggcatgactgggagctgg

SEQ ID NO: 187565 - DNA, 963 bp, Homo Sapiens
ttgggtgagctctcagagccgatttctagcgtccgtgccggggacaggtgtccagaggtcgactgctgcagacatggcggcctccaccgcggccgggaagcagcggattcccaaagtggccaaggtgaaaaacaaagccccggctgaggtacagataactgctgaacaactcttaagagaggctaaagaaagagaacttgagcttcttccacctccacctcaacagaagatcacagatgaagaagaattaaatgattataaactaaggaaaaggaagacttttgaagataatataagaaaaaacaggactgtgattagtaactggataaaatacgcacaatgggaagaaagcctaaaggagattcaaagggctcgatccatatacgagcgtgctttagatgtagactaccgaaatattacactctggctgaaatacgcagaaatggaaatgaagaatcgccaagtcaaccatgctcgaaatatctgggaccgggccataacaacgctgcctcgagttaatcagttctggtacaagtacacgtacatggaggaaatgttgggaaacgttgccggtgcccggcaggtgtttgagcgctggatggagtggcagcctgaggagcaagcctggcactcctacatcaactttgagctgagatacaaagaggtggatcgggcccgcaccatttatgagcgatttgtcctcgtgcaccctgatgttaagaactggatcaagtatgcccgctttgaagaaaaacatgcttattttgcccatgcacggaaagtgtatgagagagctgtggaattctttggagatgaacatatggatgagcacctttatgttgcctttgccaagtttgaagaaaatcagaaagagtttgaaagggtacgagtgatttacaagtatgccctggacagaatttcaaacaagatgcccaagaactctttaaaattataccatctttg

SEQ ID NO: 187566 - DNA, 855 bp, Homo Sapiens
ttggcccaaggcacctggagttttggactggctggttgccgcctgtgtcactatgtctgcggagtcagcatgtacgccagcgtcctgcttatcacggccatgagtctagaccgctcactggcggtggcccgcccctttgtgtcccagaagctacgcaccaaggcgatggcccggcgggtgctggcaggcatctgggtgttgtcctttctgctggccacacccgtcctcgcgtaccgcacagtagtgccctggaaaacgaacatgagcctgtgcttcccgcggtaccccagcgaagggcaccgggccttccatctaatcttcgaggctgtcacgggcttcctgctgcccttcctggctgtggtggccagctactcggacatagggcgtcggctacaggcccggcgcttccgccgcagccgccgcaccggccgcctggtggtgctcatcatcctgaccttcgccgccttctggctgccctaccacgtggtgaacctggctgaggcgggccgcgcgctggccggccaggccgccgggttagggctcgtggggaagcggctgagcctggcccgcaacgtgctcatcgcactcgccttcctgagcagcagcgtgaaccccgtgctgtacgcgtgcgccggcggcggcctgctgcgctcggcgggcgtgggcttcgtcgccaagctgctggagggcacgggctccgaggcgtccagcacgcgccgcgggggcagcctgggccagaccgctaggagcggccccgccgctctggagcccggcccttcccgagagcctcactgcctccagccctctcaagttaaacgaactgaactaagcctggtggaaggaggcgcactttcc

SEQ ID NO: 187567 - DNA, 1914 bp, Homo Sapiens
ttggcgaaatatgagttattaagcctacgctcagatcaaggtagcagctagactggtgtgacaacctgtttttaatcagtgactcaaagctgtgatcaccctgatgtcaccgaatggccacagcttgtaaaagatcaggagaacctcagtctgacgacattgaagctagccgaatgaagcgagcagctgcaaagcatctaatagaacgctactaccaccagttaactgagggctgtggaaatgaagcctgcacgaatgagttttgtgcttcctgtccaacttttcttcgtatggataataatgcagcagctattaaagccctcgagctttataagattaatgcaaaactctgtgatcctcatccctccaagaaaggagcaagctcagcttaccttgagaactcgaaaggtgcccccaacaactcctgctctgagataaaaatgaacaagaaaggcgctagaattgattttaaagatgtgacttacttaacagaagagaaggtatatgaaattcttgaattatgtagagaaagagaggattattcccctttaatccgtgttattggaagagttttttctagtgctgaggcattggtacagagcttccggaaagttaaacaacacaccaaggaagaactgaaatctcttcaagcaaaagatgaagacaaagatgaagatgaaaaggaaaaagctgcatgttctgctgctgctatggaagaagactcagaagcatcttcctcaaggataggtgatagctcacagggagacaacaatttgcaaaaattaggccctgatgatgtgtctgtggatattgatgccattagaagggtctacaccagattgctctctaatgaaaaaattgaaactgcctttctcaatgcacttgtatatttgtcacctaacgtggaatgtgacttgacgtatcacaatgtatactctcgagatcctaattatctgaatttgttcattatcgtaatggagaatagaaatctccacagtcctgaatatctggaaatggctttgccattattttgcaaagcgatgagcaagctaccccttgcagcccaaggaaaactgatcagactgtggtctaaatacaatgcagaccagattcggagaatgatggagacatttcagcaacttattacttataaagtcataagcaatgaatttaacagtcgaaatctagtgaatgatgatgatgccattgttgctgcttcgaagtgcttgaaaatggtttactatgcaaatgtagtgggaggggaagtggacacaaatcacaatgaagaagatgatgaagagcccatccctgagtccagcgagctgacacttcaggaacttttgggagaagaaagaagaaacaagaaaggtcctcgagtggaccccctggaaactgaacttggtgttaaaaccctggattgtcgaaaaccacttatcccttttgaagagtttattaatgaaccactgaatgaggttctagaaatggataaagattatacttttttcaaagtagaaacagagaacaaattctcttttatgacatgtccctttatattgaatgctgtcacaaagaatttgggattatattatgacaatagaattcgcatgtacagtgaacgaagaatcactgttctctacagcttagttcaaggacagcagttgaatccatatttgagactcaaagttagacgtgaccatatcatagatgatgcacttgtccggctagagatgatcgctatggaaaatcctgcagacttgaagaagcagttgtatgtggaatttgaaggagaacaaggagttgatgagggaggtgtttccaaagaattttttcagctggttgtggaggaaatcttcaatccagatattggtatgttcacatacgatgaatctacaaattgttttggtttaatccatc

SEQ ID NO: 187568 - DNA, 980 bp, Homo Sapiens
ttggctcccgtcttgcgccgcggccgcgagatccgtgtgtctcccaagatggtggcgctgggctcggggtgactacaggagacgacggggccttttcccttcgccaggacccgacacaccaggcttcgctcgctcgcgcacccctccgccgcgtagccatccgccagcgcgggcgcccgccatccgccgcctacttacgcttcacctctgccgacccggcgcgctcggctgcgggcggcggcgcctccttcggctcctcctcggaatagctcgcggcctgtagcccctggcaggagggcccctcagccccccggtgtggacaggcagcggcggctggcgacgaacgccgggatttcggcggccccggcgctccctttcccggcctcgttttccggataaggaagcgcgggtcccgcatgagccccggcggtggcggcagcgaaagagaacgaggcggtggcgggcggaggcggcgggcgagggcgactacgaccagtgaggcggccgccgcagcccaggcgcgggggcgacgacagatcaggagaacctcagtctgacgacattgaagctagccgaatgaagcgagcagctgcaaagcatctaatagaacgctactaccaccagttaactgagggctgtggaaatgaagcctgcacgaatgagttttgtgcttcctgtccaacttttcttcgtatggataataatgcagcagctattaaagccctcgagctttataagattaatgcaaaactctgtgatcctcatctctccaagaaaggagcaagctcagcttaccttgagaactcgaaaggtgcccccaacaactcctgctctgagataaaaatgaacaagaaaggcgctagaattgattttaaagatgtgacttacttaacagaagagaaggtatatgaaattcttgaattatgtagagaaagagaggattattcccctttaatccgtgttattgcaagagttttttc

SEQ ID NO: 187569 - DNA, 1582 bp, Homo Sapiens
  misc_feature (170)..(188): n is a, c, g, or t
  misc_feature (534)..(545): n is a, c, g, or t
  misc_feature (1242)..(1251): n is a, c, g, or t
cagatccacagcagaccaaacaaggaagctgaattaggtaatagaactagtaattaagatggttcacctctaacacagttctgtggcctgttccccccagagaaagattagaaatggctccagtgtaccaaataagcttcacagaagaacatgaaaattttcctccaacnnnnnnnnnnnnnnnnnnncaagcagagcctttcacttagggaccaactgcttgtagatgaaataaatcaacattaattacttctagcctgatgtaatatggctggagaaaaggggtctctggaagccggtattttgtttaacttacattctaggtgtgtatataagttgtcgctctataacttctgctgtggttccaacatctatatctgaaaggtggaagcagctgctctgttacaattttcatgtaacacgcttggattctaggtctttcctctttaacacaacttaaagaaagtttcttgtggtttggtcagcatacacacttctcatttcatttgatgtacacagccaaagtgggaattnnnnnnnnnnnnttaccaactagttcagagagctaaattgagtctatcattatggcaaagtctgacccaaaattttaatttgtaattttagcatgtgtctcatgcactttggggagcgtcaaactaaatctacaattgccagaagccttgttacagtttaatgcacattaactaaaatgtgtacatttttagtgttcatgataaatgcagttatgaccttattacacttttggcattctttaagaaagcacattaagctttaatatagaaatatttaggttacacttgtgctcaagtaataataaaacatttgttcttttttgatctcatacattctctcctcaggtatggcccatctacagctctgttttttatgtagttacaacatgatgtgattgtagctttttaaactatgaaacccctgagagattgtaccttctagttgaaataaagtatttataatagattgtggcttcagatgctgcttactgcttcttaaatctttaaggaacattcttaataaactttacagaattctgaggacaggttttgttttctttcaagttttgaactgcttcattacctataaaaggtctgggtatagctgcagcatttcatttgctttctgagagaaatggacagtttccttggccactgaagatgtttctcacgtaattaaacaacagtttatacatcttgatcctattcnnnnnnnnnnacagtgtgtttctttggagttaaaatggctatgatagcctcatcaaaaacagtcttcaatcccttctgggttaaagctgaacattccacatagcagcatgctcctatctcttttgctagtttctgtccttgttccacacatataggtttttctttcatatcactcagtcttgctaaagttttggggtcatctcggagatcaatctgagctcctattaataaaaagggtacatttggtgcgtattccttaagttccggtacccactcctccctcacattttgaaatgaggctggatttaccaccgagaagcatataaggaagacgtcgccaa

SEQ ID NO: 187570 - DNA, 1892 bp, Homo Sapiens
ctttgtacaaaaaagttggctgggttcgaacacggcacccgcactgcgcgtcatggtgcaggcctggtatatggacgacgccccgggcgacccgcggcaaccccaccgccccgaccccggccgcccagtgggcctggagcagctgcggcggctcggggtgctctactggaagctggatgctgacaaatatgagaatgatccagaattagaaaagatccgaagagagaggaactactcctggatggacatcataaccatatgcaaagataaactaccaaattatgaagaaaagattaagatgttctacgaggagcatttgcacttggacgatgagatccgctacatcctggatggcagtgggtacttcgatgtgagggacaaggaggaccagtggatccggatcttcatggagaagggagacatggtgacgctccccgcggggatctatcaccgcttcacggtggacgagaagaactacacgaaggccatgcggctgtttgtgggagaaccggtgtggacagcgtacaaccggcccgctgaccattttgaagcccgcgggcagtacgtgaaatttctggcacagaccgcctagcagtgctgcctgggaactaacacgtgcctcgtaaaggtccccaatgtaatgactgagcagaaaatcaatcactttctctttgcttttagaggatagccttgaggctagattatctttcctttgtaagattatttgatcagaatattttgtaatgaaaggatctagaaagcaacttggaagtgtaaagagtcaccttcattttctgtaactcaatcaagactggtgggtccatggccctgtgttagttcatgcattcagttgagtcccaaatgaaagtttcatctcccgaaatgcagttccttagatgcccatctggacgtgatgccgcgcctgccgtgtaagaaggtgcaatcctagataacacagctagccagatagaagacacttttttctccaaaatgatgccttggggtggggagtggtagtgggaagagctcccaccctaaggggcacacactgagttgcttatgccacttccttgttcaaaataaagtaactgccttaatcttatactcatggcttggagttaccttatattcaggtatatgtgatattttgcctggtttgttaaaattgccccatttagattccttctataattgttcttatagataagtaatttatatatgagctgtgttagtattttttcagtgtgagatctctggattctttcacaataaagctgttgaattttaacaggagtattagtacataaattttctactcaacaattccgagataggattatgcctagtttgtcatatcacagaaaaactccaagttaacttcatgttttggaagggcaggtcgtttttaaagtatttctttttttaactggatgaaaaatcttcatgttaggattaattttcttaatcacctccacactgtacagaggaaactcaagccttaaatgtttaagtaaactctgtctcagttttaggattaaaatacccaccggtggtgtgatgatgccatataccgcagggcttgcttctgtcaagtgtgactctatctcagtaattaaaataagtgctgatctactgattttttttaatggattcatttctaaatgggcattataaatagagcttgttcatttttaagaacgaaacattcatatgataaactatcgctttaaattgcctttcttgcttcatataacttttccctgtcaggatccttagtgtttgaaactcctcgtgcggggctggcctcctgcggactctagtttcgcctccttgatgtggcgcctgggatttcttcacttcagagctgtatttttacaggcaagagtaagttc

SEQ ID NO: 187571 - DNA, 1645 bp, Homo Sapiens
ggggacacatttagtattcacattttatgcaaacttacttggtcaattatttcttttttaagcacaggtttattttggaattcagataagaactgacacatcatagacagtcattgttaaggtaaccctgttatttcaattgcaaacaaacaataaacgttttttcttcaagacagttaccactttttaagatcttagtactaccctatgcaaaaacagttttttttaaaagcctgaacaggttaagatagataatagccaactatgttttctcaggtgaaactattccaaaagaactgtacatttcagtgatataaatcagatccagaaaggtggatctctgtttagttcttgaaatatataattcacaaaataagacccttgttgttctacagaggtcccctaaactgtcttttattctggtgtagtctctaaaacctcattaagagggaggggagaaaatttagtcttaccagaaatgctctgctttttagtagccatcagttttaggtcttctttatgtaactcagaagttcatctttttccatttggtaaccactttttttccactgttctcgcaactgttgtaatagagccccaatttcttttcctgaagaaatgcccacttttctgatgtcatggccacttacaggaaatggaggaatggaccactgctgcatttcctttaggagacagtgctctccttggtacttcagtagttcacatacacgagtagttgcatcaggttccctagaatctataatgaagtcttgatagggtttcaatgggtctgaactatctgttgctttaattaaatctttcctatttttaactataaataagccaaggtttttctcctctttcgcgatcttcaacctcaaatccaattttgtgacatcatcttgtactttgaataatgaggccaaaagagtcactggctttggtgaaaaaccatcaacatttttactgactttgtcaaattcttctaaacttgcattagcaggtaaacctatataaggagccacatcaagatcatagataaggtgaatcaaatgatttacatggttaccaacaagaatttttttcagttccacccaaatcctttctcctgatattccagccaagccttttgcattttctgcaattgcttccaaagtctcaggatcatggtcaccaggtttgtctacaattctcccataaaacctgaagtatcttaaaattctaagataatcctcttgtattctctgtttagcatgtccaacaaatctaactttcttattttttaaatcttcataaccattaaagtagtcaaataaagtgccatcaaaacctaaaaacatagaatttatagtgagatctctgcgttccgcatctttctgccagtcagttgtaaattctacctcagcatgtcttccatcagtggtgacatcaatccgtagtgtagtaatctcaaaattttcttcatgaagcctggcagtaattgttccgtgcttttctcctctgttgtttatcatccgaatcccagccgactgaaacatctccttcatttgagtaggggtagcagtggtggcaaaatctatatcctgaggctttactccatttaataaatccctcactgctcctcctgctattcttaattcgccaa

SEQ ID NO: 187572 - DNA, 1566 bp, Homo Sapiens
  misc_feature (306)..(346): n is a, c, g, or t
  misc_feature (1072)..(1095): n is a, c, g, or t
ttgggtttattacagatattaagtatgcaattacttgtattataggatgcaaggtcatcatatgtaaatgccttatatgcacaggctcaagttgttttaaaaatctcatttattataatattgatgctcaattaggtaagattgtaaaagcattgattttttttaatgtacagaggtagatttcaatttgaatcagaaagaaatatcattaccaatgaaatgtgtttgagttcagtaagaattattcaaatgcctagaaatccatagtttggaaaataaaaatcatgtcatcttctatttgtacannnnnnnnnnnnnnnnnnnnnnnnnnnnnnnnnnnnnnnnngatagcttttaattgtggtatatataatcttcagtaacaatacatactgaatacgctgtggttcattaatattaacaccacgtactatagtattcttaatacagtgctcactgcatttaataaatatttaataaatgatgaatgatagaagtttccatctacaatatatgttcctaaatggagcacagatgttcaaactatgctttcattttttcactgatatattaatttttgtgtaatgaatgccaacagtatattttatatgatttacttatgtgaggaaacatgcaaagcattaggaaatttatttcctaaaaacagttttgtaaaattagtattgagttctattgagtattataagatagcttacattttcaaaatggaaattgtcggtcatatttctagaactttaaagaaaaaagatagttgagttttagaaaactaaactatctttagtcatgttcaaaaatctattgctagatcatagtagatactggttttctattaactcaaaacctacattgacaagtttaacattgagaagaatcttaacaaaaatatggatatgaattcagtagatatcttaaattcaataaaatcactggaagtttttcatgataacttattttaagatgccttaaaaatcttaaagtcacaaaaggaaaaaggtttttaacatttacatgagttaacattttttcatagaacttatttcctagatagaannnnnnnnnnnnnnnnnnnnnnnncttaagaaaacagttaaatcattatgcattcagttggaagaaagtagtggcaagaattctttcattgctatataatattcagtggctcatttatacctaataaaataatggtattttaaaataatgctactttcaaagtagcatttttttagttagtttacaggttacatacccaaaaccttaactatgactaagaaattaaagaagaaaaccagcaaactaaaacttctgggcagcaaaaatatataaatgcttcagatgtcaaatacccatgcttgaaagctcgtgtaatttactttaagattatctgcctgctcttcttcaaagctgaccttgctttagaaatagttttaactagcttagttttctggtttccaaaactaaaatagattaaatcctacaaatttaaggacagttgtgacagtaatctgaccactatctataaatacattggacattggtttccaaatc

SEQ ID NO: 187573 - DNA, 967 bp, Homo Sapiens
  misc_feature (42)..(65): n is a, c, g, or t
actttgtacaaaaaagttgggaacttatttcccagatagaannnnnnnnnnnnnnnnnnnnnnnncttaagaaaacagttaaatcattatgcattcagttggaagaaagtagtggcaagaattctttcattgctatataatattcagtggctcatttatacctaataaaataatggtattttaaaataatgctactttcaaagtagcatttttttagttagtttacaggttacatacccaaaaccttaactatgactaagaaattacagaagaaaaccagcaaactaaaacttctgggcagcaaaaatatataaatgcttcagatgtcaaatacccatgcttgaaagctcgtgtaatttactttaagattatctgcctgctcttcttcaaagctgaccttgctttagaaatagttttaactagcttagttttctggtttccaaaactaaaatagattaaatcctacaaatttaaggacagttgtgacagtaatctgaccactatctataaatacattggacattggtttccaaatctccctttcttcttcagttccttccttgttcaatatatacccttctctaaactgtgcgggtaaaaggaatgactgtccttgagagaaccattagtttatcaaaggtttatgtagttttgttgctgtaccctaactttgatattcagggaggtaggaaaggtaacagaaaaaccagcatatttaatcaaagcaagaagtaatcgctgacagttaaatgtgaccaaaaaaattaaaagttcacaatttttttaatgtagccatttggggttatctctagtaaggcagatacccacgttggtaaatttttaggatattgtgttgcactagaaaactaagtggttcatatttctaatgaggaagattaatgaaagaacattgttatattctgcgtggtatattttaaagtttaagaagcatgttaaacattatttc

SEQ ID NO: 187574 - DNA, 946 bp, Homo Sapiens
ttgggaagtttccgaggagacttctcaggctgggctggacacacctttccaaggacccccaaactctgctccgtgcacgtcaaatgctcctttcccttgtgtccaaccccctacccctctccctaacacccctcttctcaacaagactcagcctctccccgaggtgggtgagcatccttgaggtttcccacccttaactgctgtgtccccggatggagccagagaaatgtggtgggggggccggggccagagtttcaacattgccccccagaaggaggagccagagatggggtctgtccaggaaaataggatgccggagcccaggagtcgtcagcctagcagttgcctggcctccagatgcctcccaggggagcagatcctagcatgggccccaggggtgaggaagggcctggaaccagaattgtctggaaccctgatctgtaccaactttagggtcaccttccagccctgtggatggcagtggaatcaggacactcccttgaacagtgaatacgattttgccctggtcaacattggacgattagaggctgtgagcggcttgtcccgagtccagctcctccgtccagggtccctgcataaatttatccctgaggagattctgattcatggccgagacttccggctgctcagagttggttttgaggctggaggcctagagcctcaggcttttcaggtgaccatggccattgtccaagccagagctcagagcaatcaagcccaacagtattcggggataaccctgagcaaggctggccagggttctggctccagaaaaccaccaattcctctcatggagacagcggaagactgggagactgagcggaagaagcaggcagccagaggctggagggtcagcacggtcaacgagaggttcgacgtagccaccagcctcccccgttacttctgggtccctaaccgaattctg

SEQ ID NO: 187575 - DNA, 894 bp, Homo Sapiens
  misc_feature (119)..(134): n is a, c, g, or t
tactcaggcttggaaatattttgaacactcagatataaaaattcagtaaacaatttatgcatggtattttctctccctgtcctccctctccctcctcccttcccctatctatttggttnnnnnnnnnnnnnnnngttcaacttcgatttaagtcctagggcctgacaaagtgaccctggataaatgtcatctccagccatctgttttctttagttctcattacatctgtccaggctcttctatcagcatcaatcctttcctgcagggacggaagagttttcaaatccttgctgaaagcattttgttctcctctgtaacagcacagggcatgaaattgtttggagtctttgtaaccagtctgttcagtcctggtccctttccagtcccggtccctttccagcctctggagtcctgacagaagagaagcttgtaaggtagcagcaaaatgctgcatctgttagaatctcacaaactcacttggtctttgaatgtccattcttggataacgtccttatccatcctcttctcttcagtgaactttgatggaatatttccgcagtttcagaaactggaaaagcttgtcttttgtcctcttcttcaaggccatcagggcacgcgttttctcctccacatcttgatctatggcaaaaatgatcttggctctctcctctgctttcttgtctccagagtttctgaagagcctttctagtgattcttggtctgtgttttcaaagatgttgcccacggctttcttacgagaggctgtgtcgaagtggtagccatggatggatgggctgactcgtagcgacgtggacatgatgatggcttggtggcttcgctttgctttcatcgatgtggggatcttccggaattcagctcccaggcttcacccaa

SEQ ID NO: 187576 - DNA, 866 bp, Homo Sapiens
  misc_feature (297)..(310): n is a, c, g, or t
  misc_feature (323)..(358): n is a, c, g, or t
ttggcttctcttccgtcaggactccagaggctggaaagggaccgggactggaaagggaccaggactgaacagactggttacaaagactccaaacaatttcatgccctgtgctgttacagaggagaacaaaatgctttcagcaaggatttgaaaactcttccgtccctgcaggaaaggattgatgctgatagaagagcctggacagatgtaatgagaactaaagaaaacagatggctggagatgacatttatccagggtcactttgtcaggccctaggacttaaatcgaagttgaacnnnnnnnnnnnnnnaaccaaatagatnnnnnnnnnnnnnnnnnnnnnnnnnnnnnnnnnnnnaaaataccatgcataaattgtttactgaatttttatatctgagtgttcaaaatatttccaagcctgagtattgtctattggtatagatttttagaaatcaataattgattatttatttgcacttattacaatgcctgaaaaagtgcaccacatggatgttaagtagaaattcaagaaagtaagatgtcttcagcaactcagtaaaaccttacgccaccttttggtttgtaagaggttttttatacatttcacacaggttgcacaaaagttaaaataatggggtcttttataaatccaaagtactgtgaaaacattttacatattttttaaatcttctgactaatgctaaaacgtaatctaattaaatttcatacagttactgcagtaagcattaggaagtgaatatgatatacaaaatagtttataaagactctatagtttctataatttattttactggcaaatgtcatgccacactaatacattattgtaaactttgtggcttttg

SEQ ID NO: 187577 - DNA, 1264 bp, Homo Sapiens
ttggcttctgtatgtttggcttgggacctggtagtttttaacatttcctgagatgattatgtttttaattgattattcttctttgtggtggcgtaaattaggaataatgcaagatatctttggaaaagaataccacctgctataaaatctgcaaattctgaacttgggggaatttggtcagtaggacaaagaatctggcagagagatttccctgggatctatacaaccatcaacgctcaccagtggtctgagacggtccagccaattatggaagcacttagagatgcaacaaggggacgcgcctttgccctggtctctcaagcgtatacttcaatcatcgccgatgattttgcagcctttgttggacttcctgtagaagaggctgtgaaaggcatattagaacaaggatggcaagctgattccaccacaagaatggttctgcccagaaagccagttgcaggggccctggatgtttcctttaacaagtttattcccttatcagagcctgctccagttcccccaatacccaatgaacagcagttagccagactgacggattatgtggctttccttgaaaactgatttatcactctgagttcaagattcatcttcagaatcctgtatactgacaaacgtagaaatgtaaagtttgtattttcaatttattggatggcttaagcacctcagcattccttactatgtgataaaatacatatagaatataagatatactatatacattttgtccataaacgttatgctgaatagttgttgaaacagttctcattttgtagtatttaataatctggatggagcctgtcagtattacagttagttttctagtgactcataaaataagatttcctgtttcatgtagaatagtgtttgtcaactgtcttttctctgtcccagcacatgccgtactcttatatgtaccattggttgataattataatgattcatttggacttgaagaaagattgtccccaggcacagtatctgaatcactggggattatgattcaccctctttggagaacatgctctcttttcaccccccacctcctgagagccactaatgtaagatacagaaacatagctgaggaacaaatagaccattttcctactaaaccagttttgttaactttagattttttccaatagtgtgagtatatccattgctggccgtggaagggcttgccatgaaaatgcaacttatttaagacatttatgagacttattacttgtgctgtccccttataaaa

SEQ ID NO: 187578 - DNA, 782 bp, Homo Sapiens
  misc_feature (318)..(326): n is a, c, g, or t
ttggtcatttgaagtggtgtctacacttataaaactgtttggtgtgttttgggctgcctacagtgctgcttcattgttagtgggtgaagaattcaagaccaaaaagcctcttctgatttatccaatctttttattatacatttattttttgtcgttatatactggtgtgtgatccaagttatacatgaatagaaaaagatggtgttaaatttgtgtgtaggctgggaattcttgctgaaggaattggagaaaacctgttgctgcaaaattttacatgttccagatggaaagggaagtctaagcgctttttaaaacaannnnnnnnngtatttaattaagcaattgcagttatctgggatttttgggtcagaattttaaattctgtttgattctccatattccagtgaataaaatacaaaagcattgtgtttttaagattgtgtcgatattcacctaaaaacttgtgccaaaagcacctggattggtaattatatttcacttaaagggtaaatttgacaatatcttgataatcaaaagtgctgggattacaggcttaagccaccgtgcccggcacttttgtttttaaaataatatcttactttcatatgattctttcagactgtggtatggcattctgaagcaagtcttaacagagctaaaaatcacccttacccaattctctgcactgacatatgtacacaaagtaatattttattattctccttcataaatggtttctttaattgaacctttgagccttatactatttttaaatttccctt

SEQ ID NO: 187579 - DNA, 1250 bp, Homo Sapiens
  misc_feature (1135)..(1143): n is a, c, g, or t
ttggcactgttatggtcctgtcagggtgccggggtcgtggtgcttgggtggtcgccaccaagaagactttggtggggtagtctcggggcagctcagcggcccgctgtgcccgtttctggcctcgctcgcagcttgcacgtcgagactcgtaggccgcaccgtagggcgagcgtgcgggtcgccgccgcggccgcctcggggtctgggcccagccgcagcctcttctaccgcggccggttgggagtcgccgcgagatgcagcctccgggcccgcccccggcctatgcccccactaacggggacttcacctttgtctcctcagcagacgcggaagatctcagtggttcaatagcatccccagatgtcaaattaaatcttggtggagattttatcaaagaatctacagctactacatttctgagacaaagaggttatggctggcttctggaagttgaagatgatgatcctgaagataacaagccactcttggaagaattggacattgatctaaaggatatttactacaaaatccgatgtgttttgatgccaatgccatcacttggttttaatagacaagtggtgagagacaatcctgacttttggggtcctctggctgttgttcttttcttttccatgatatcattatatggacagtttagggtggtctcatggattataaccatttggatatttggttcactaacaattttcttactggccagagttcttggtggagaagttgcatatggccaagtccttggagttataggatattcattacttcctctcattgtaatagcccctgtacttttggtggttggatcatttgaagtggtgtctacacttataaaactgtttggtgtgttttgggctgcctacagtgctgcttcattgttagtgggtgaagaattcaagaccaaaaagcctcttctgatttatccaatctttttattatacatttattttttgtcgttatatactggtgtgtgatccaagttatacatgaatagaaaaagatggtgttaaatttgtgtgtaggctgggaattcttgctgaaggaattggagaaaacctgttgctgcaaaattttacatgttccagatggaaagggaagtctaagcgctttttaaaacaannnnnnnnngtattttattaagcaattgcagttatctgggatttttgggtcagaattttaaattctgtttgattctccatattcccatgaataaaatacaaaagcattgtgttttt

SEQ ID NO: 187580 - DNA, 983 bp, Homo Sapiens
ttggcgcagaattcacagaattttgcaacttataaggaaggttacaacgtatatggcatcgaaagtgttaaaatttagggggtaggaacgaggctctaatacaaactttttagtgcacgtttagctttcttgttgcgtccttaagctcttttaaataaggaaggtggccaatggatcatcctgtatgtattgttgacgttcttccatgttcccagttggtgactaacctgcagctcaactgtctattttcctctttaatggcacagtagcttgggtgaatgtggacagattcctgccataattgtgctttattatttgtagttcagctttgcactgtttgctttcatttgctagaagctttcagatagaagtaaacttttcaaaaacaaccctgcctttcctctggatgcatttgaaaaccataacgtatgatttctttttctttctttccctcctctctcatttaagatgaccttgaatgatgccatgaggaacaaggcaaggctgtcaattacaggaagtactggagaaaatggacgtgttatgactccagaatttcccaaagcagtgcatgctgtcccttacgtgagtcctggcatgggaatgaatgtcagtgtgactgatctctcgtgattgataagaaccttttgagtgccttacacaatggttttcttgtgtgtttattgtcaaagtggtgagaggcatccagtatcttgaagacttttctttcagccaagaattcttaaatatgtggagttcatcttgaattgtaaggaatgattaattaaaacacaacatctttttctactcgagttacagacaaagcgtggtggacatgcacagctaacatggaagtactataatttacctgaagtctttgtacagacaacaaacctgtttctgcagccactattgttagtctcttgattcataatgacttaagcacacttgacatcaactgcatcagatgtgacatgttttat

SEQ ID NO: 187581 - DNA, 1532 bp, Homo Sapiens
  misc_feature (423)..(457): n is a, c, g, or t
  misc_feature (498)..(511): n is a, c, g, or t
  misc_feature (785)..(1079): n is a, c, g, or t
agtctgtaattctttcctaacccttagtatccagcctcagtcctgaggttttctttacctctgggggctattttatgccggctctctcctgagtgtcacacatctggtcctcaggaaacattctcacatccctggcctgaaaaaaacaatttcagggagatcgcatggcagcagccctctctgggctccccagctaaatggttgtacgaaacacatttcaaagctctctgaagggcttccttgaagttcctttcactggtttcaaagtagaaggtagtaactcctttgtccaagaaggctgaattgagcacttaacaattctccaaagaaatttcttcattggtctctatcctagaccccttctgtatccttgatatggctgaggattctaaaaaatgaccagtcttacatgggagggctggnnnnnnnnnnnnnnnnnnnnnnnnnnnnnnnnnnnctgaaaactgaccacgttcttggatatgttttctttgggtnnnnnnnnnnnnnnagacttttgatagttacccaaagtaggaaaaatcccattctaataaggttatatttatgtagctctgcaaataaacatctagcaaatgtaaaaagtattttctttgccttaaaaatgattaaaattatttgaactcctgaggagtgttatatgaataaaattagtaagttatttggaggaaagttattttttaaaaagacaactggtaaaacagtacaggagaaaggccagcttcctcaagtgaggacagttgtttagaattgactgaggagcnnnnnnnnnnnnnnnnnnnnnnnnnnnnnnnnnnnnnnnnnnnnnnnnnnnnnnnnnnnnnnnnnnnnnnnnnnnnnnnnnnnnnnnnnnnnnnnnnnnnnnnnnnnnnnnnnnnnnnnnnnnnnnnnnnnnnnnnnnnnnnnnnnnnnnnnnnnnnnnnnnnnnnnnnnnnnnnnnnnnnnnnnnnnnnnnnnnnnnnnnnnnnnnnnnnnnnnnnnnnnnnnnnnnnnnnnnnnnnnnnnnnnnnnnnnnnnnnnnnnnnnnnnnnnnnnnnnnnnnnnnnnnnnnnnnnnnngtgactgaggaggaagaggccaggtggctgatggaaaataatcaccagagggtgaacaggactaaggcgatgtattgtatggctcaactacgtaatagtggaagaggtgttattacagaagatactatggctcctgcgtcacagagcagccacctacagagcagcagctcctccccaagagaggagagataagacgccagaatcctcgtagtgaacagttgtcctattaaggattgctctaaagagagaaacctctgggaacgtactcctgtgagcagcacaccacgatgctattataattgtatgagagatgatatatctcttgttgttttgcagaggcaacaactaagatacggagagatcatctgttaaagtgatgtatttctgtggtaataatgatgctcgacagtgctgctagactgcatcttctttaataaagattattgtacgatg

SEQ ID NO: 187582 - DNA, 1917 bp, Homo Sapiens
  misc_feature (1403)..(1449): n is a, c, g, or t
ttggcaagcttattgaattgatcggccacatcagggttctgtacattggcctggcctgcaatacggctcgctatatttatatttcctacctggagaatgcctggactgttctccccatggaagttcttcaaggagtgacacacgcggccatctgggcagcatgcatttcttacctcagtgcagccgttccccctgagctgaggacatctgctcagggcatcctgcagggccttcacctgggtttgggaagaggatgtggtgccatgatcggaggcgtgttagtcaattattttggggctgctgcaaccttccgaggaattggcatggcctgcttggtgatcctactgctctttgccctgatccagtggctggcagtgccagatgaggaagaagacaagacaatgttggcagaaagaattcctgttccctccagtcccgttcctatagcaaccatcgacttggtacagcaacagacagaagatgtcatgccacgcattgagcccagacttccacccaagaaaactaagcaccaggaagaacaggaagatgtgaacaaaccagcctggggagtcagctcttctccctgggtgacctttgtctatgcactctaccaaattaaagagatgatgcaactcacaagagacaaccgtgcttctgagatacagcctttacaggggaccaatgagaatagggaaaattctcctgctggtagagcccagcctgtcccatgtgagactcactctgacccatctagaaaccagccatcccctgacgcagcagcatctcagacgcagaccagccccgctcaccccagtgtggacccgtgcacagaggagagtgaagagcagcaggctcagctggccgcgggaggacactgagggcatcctgctcatctcacaccctgcatggaatcaggctcctcagccaggacacagggtgaggccccccagccaggatatgcctcccctggaggagcacagcactgcatatgcttctaaatatctaaactcattaacatggaaacacacacacaggagctacagtacatattggcaggaaaaggtaaactttcgtaatctcattggaattacaacagggaaatggagttcaatgaggactttcagttctttgcttggttaggttaaggatgatagaatttctctgccagtgcagtaagagttgaaaccggcagttacactaagtaagtggagggaatgaaagtgtttcgaggtgaatgtggatataatttccctcttctgattatttattcttatttggttcctaacacaaactgggaagagatagaattcatctatactttcttttttcttggagagaaccgtttaaaaaattacaagatatatttaaaaagtaaccagataaaagtagcacatgtgcttttnnnnnnnnnnnnnnnnnnnnnnnnnnnnnnnnnnnnnnnnnnnnnnnttcatcagaaactttacatatctttagcaaatatatttttatatgtgtatggcatataatggaaataattctttgagcaacagaagctattattaactactgcaagctaagccgagcttaaaaatgccttttgttttaaatgggctttgagaaaaaaaacagaaacaagcgattatttcaaatcaaccaaccaactcagtatcctgtgttttgatagacaagagtttactaaatatattgatactgtaaatagcctctctcgctatttactatcttatagtaattcaggctctaattagctgagggaatgaaacacacaaaaatcactgaattcctaagagttccttaaataagcagtactagttacaaatcacagtataagatttaagtgcctgggggaaggatacaatttttagaaattacatattgggtcagtttgttttgtttttgtgaggaaaagtggtaaat

SEQ ID NO: 187583 - DNA, 2302 bp, Homo Sapiens
  misc_feature (359)..(417): n is a, c, g, or t
  misc_feature (1455)..(1463): n is a, c, g, or t
  misc_feature (2168)..(2203): n is a, c, g, or t
ttggctgagtttcacgcgcgtatgctttgcccgccatggccgcagtcaaggagcctttggagttccatgccaagcggccttggcgccccgaggaggcagtagaagatccggacgaggaggatgaggataatactagtgaagccgagaatgggttctccctggaggaagtgttacggctcggaggcaccaagcaagattaccttatgctggctactttggatgagaatgaggaagtgatagatggaggcaaaaaaggagcaatcgatgaccttcagcaaggtgaattggaagcatttattcaaaatcttaatttggcgaagtatacaaaagcttccttaattgaagaagatgaaccagcnnnnnnnnnnnnnnnnnnnnnnnnnnnnnnnnnnnnnnnnnnnnnnnnnnnnnnnnnnncagcagaaagtcaaaggacatcagttaataaggtgaaaaataagaataggccagaaccacattctgatgagaatggcagtaccacaccgaaagtaaagaaagataaacagaacatctttgaattttttgagagacagactttgttacttaggcctggaggcaaatggtatgatctggagtacagcaatgaatattctttgaaaccccagcctcaggatgttgtatctaagtacaaaacccttgctcagaagctgtatcagcatgaaatcaacttattcaaaagtaagacgaatagtcaaaagggagcctcttctacctggatgaaggcaattgtgtcatcggggacactaggtgacaggatggcagccatgattcttcttattcaggatgatgccgttcacacacttcagtttgtagaaactcttgtgaaccttgttaaaaagaagggcagcaaacagcagtgccttatggccttggatactttcaaagagttgcttatcacagaccttttgccagacaatcggaagctgaggattttcagccagcgtccttttgacaaactggaacagttgtccagtggcaacaaggactcaagagatagaagactgatattatggtattttgaacaccagctgaaacacttagtggctgaatttgtgcaggtcttagaaactttaagtcatgatacattagtaaccactaaaactcgagcccttaccgttgctcatgagctgctttgtaacaagcctgaggaagaaaaggctcttcttgtgcaagtggtaaataaactgggagatcctcagaacagaattgccacaaaagcatcccatctgttagagacattactttgtaaacatcccaatatgaaaggagttgtgtctggtgaagtagaaaggctactcttccgctcaaatatcagctccaaagctcaatattatgcaatttgctttttaaatcaaatggctctgtcccatgaagaaagtgaattggctaacaaattaataactgtttacttttgcttttttcggacttgtgtcnnnnnnnnngatgttgaatcaaaaatgcttagcgcccttttaacaggtgtgaatagggcatacccttattcccagactggtgatgacaaagtaagggagcagattgacacactgtttaaagtgttgcatattgtgaattttaataccagtgtccaggctttaatgttgcttttccaagtaatgaattctcagcagacaatatcggatcgatattacacagcattatacaggaagatgttggatccagggttgatgacgtgttccaagcaagctatgtttcttaaccttgtctacaaatctctgaaagctgacattgtgttgcgccgggtgaaggcttttgtgaagaggttacttcaagttacttgtcaacagatgccaccatttatatgtggagctttatatcttgtgtctgagatccttaaagcaaaaccaggtttaagaagccaactagatgatcatccggagtctgatgatgaagaaaattttattgatgcaaatgatgatgaagacatggaaaaattcactgatgcagacaaagaaacagagatagtgaaaaaacttgagacagaggaaacagttcctgaaactgatgtagaaaccaaaaaaccagaggttgcttcctgggtgcactttgataatttgaaaggtgggaaacagttaaataaatacgatccattcagtagaaaccctctgttctgtggagctgaaaatacnnnnnnnnnnnnnnnnnnnnnnnnnnnnnnnnnnnncatccctccgtggccctttttgcaaagaccatcccttcaggaaactatattcagtattctgggacccactgcaggatttcactctatgagatttttgga

SEQ ID NO: 187584 - DNA, 1650 bp, Homo Sapiens
  misc_feature (1099)..(1147): n is a, c, g, or t
tttgtacaaaaaagttggggcgggtgcccttgaaaattccctttctcagcgcggcgcgaaggtggctcgccgtcagcgcctgcttccctcgacctcgtcctcctccccgctccggaggagctgcgagatgtggcgcctctgactccacttctccccgcccctgtcaccgagagggggaacgagctctcgcccactcgccggaggagacggccctggactcccaaccccgccggcgaaaccatgagctccgtccagcagcagccgccgccgccgcggagggtcaccaacgtggggtctctgttgctcaccccgcaggagaacgagtccctcttcactttcctcggcaagaaatgtgtgactatgtcttcagcagtggtgcagttatatgcagcagatcggaactgtatgtggtcaaagaagtgcagtggtgttgcttgtcttgttaaggacaatccacagagatcttattttttaagaatatttgacattaaggatgggaaactattgtgggaacaagagctatacaataactttgtatataatagtcctagaggatattttcatacctttgctggagatacttgtcaagttgctcttaattttgccaatgaagaagaagcaaaaaaatttcgaaaagcagttacagaccttttgggccgtcgacaaaggaaatctgagaaaagacgagatcccccaaatggtcctaatctacccatggctacagttgatataaaaaatccagaaatcacaacaaatagattttatggtccacaagtcaacaacatctcccataccaaagaaaagaagaagggaaaagctaaaaagaagagattaaccaaggcagatataggaacaccaagcaatttccagcacattggacatgttggttgggatccaaatacaggctttgatctgaataatttggatccagaattgaagaatcttttcgatatgtgtggaatctcagaggcacaacttaaagacagagaaacatcaaaagttatatatgactttattgaaaaaacaggaggtgttgaagctgttaaaaatgaactgcggaggcaagcaccaccacctccaccaccatcaaggggagggnnnnnnnnnnnnnnnnnnnnnnnnnnnnnnnnnnnnnnnnnnnnnnnnnctgctaggggaagaggcgctcctcccccaccaccttcaagagctcccacagctgcacctccaccaccgcctccttccaggccaagtgtagcagtccctccaccaccgccaaataggatgtaccctcctccacctccagcccttccctcctcagcaccttcagggcctccaccaccacctccatctgtgttgggggtagggccagtggcaccacccccaccgcctccacctccacctcctcctgggccaccgcccccgcctggcctgccttctgatggggaccatcacgttccaactactgcaggaaacaaagcagctcttttagatcaaattagagagggtgctcagctaaaaaaagtggagcagaacagtcggccagtgtcctgctctggacgagatgcactgttagaccagatacgacagggtatccaactaaatctgtggctgatggccagagtctacaccaccaacacctgcacccacttcaggaattgtgggtgcatt

SEQ ID NO: 187585 - DNA, 1937 bp, Homo Sapiens
gccaactttgtacaaaaaagttgggctggcggttccgttaggtctgagggagcgatggcggtacgcgcgttgaagctgctgaccacactgctggctgtcgtggccgctgcctcccaagccgaggtcgagtccgaggcaggatggggcatggtgacgcctgatctgctcttcgccgaggggaccgcagcctacgcgcgcggggactggcccggggtggtcctgagcatggaacgggcgctgcgctcccgggcagccctccgcgcccttcgcctgcgctgccgcacccagtgtgccgccgacttcccgtgggagctggaccccgactggtcccccagcccggcccaggcctcgggcgccgccgccctgcgcgacctgagcttcttcgggggccttctgcgtcgcgctgcctgcctgcgccgctgcctcgggccgccggccgcccactcgctcagcgaagagatggagctggagttccgcaagcggagcccctacaactacctgcaggtcgcctacttcaagatcaacaagttggagaaagctgttgctgcagcacacaccttcttcgtgggcaatcctgagcacatggaaatgcagcagaacctagactattaccaaaccatgtctggagtgaaggaggccgacttcaaggatcttgagactcaaccccatatgcaagaatttcgactgggagtgcgactctactcagaggaacagccacaggaagctgtgccccacctagaggcggcgctgcaagaatactttgtggcctatgaggagtgccgtgccctctgcgaaagggccctatgactacgatggctacaactaccttgagtacaacgctgacctcttccaggccatcacagatcattacatccaggtcctcaactgtaagcagaactgtgtcacggagcttgcttcccacccaagtcgagagaagccctttgaagacttcctcccatcgcattataattatctgcagtttgcctactataacattgggaattatacacaggctgttgaatgtgccaagacctatcttctcttcttccccaatgacgaggtgatgaaccaaaatttggcctattatgcagctatgcttggagaagaacacaccagatccatcggcccccgtgagagtgccaaggagtaccgacagcgaagcctactggaaaaagaactgcttttcttcgcttatgatgtttttggaattccctttgtggatccggattcatggactccagaagaagtgattcccaagagattgcaagagaaacagaagtcagaacgggaaacagccgtacgcatctcccaggagattgggaaccttatgaaggaaatcgagacccttgtggaagagaagaccaaggagtcactggatgtgagcagactgacccgggaaggtggccccctgctgtatgaaggcatcagtctcaccatgaactccaaactcctgaatggttcccagcgggtggtgatggacggcgtaatctctgaccacgagtgtcaggagctgcagagactgaccaatgtggcagcaacctcaggagatggctaccggggtcagacctccccacatactcccaatgaaaagttctatggtgtcactgtcttcaaagccctcaagctggggcaagaaggcaaagttcctctgcagagtgcccacctgtactacaacgtgacggagaagtgcggcgcatcatagagtcctacttccgcctggatacgcccctctacttttcctactctcatctggtgtgccgcactgccatcgaagaggtccaggcagagaggaaggatgatagtcatccagtccacgtggacaactgcatcctgaatgccgagaccctcgtgtgtgtcaaagagcccccagcctacacccttccgcgactacagcgccatcctttacctaaatggggacttcgatggcggaaactttt

SEQ ID NO: 187586 - DNA, 1720 bp, Homo Sapiens
  misc_feature (1193)..(1483): n is a, c, g, or t
caactttgtacaaaaaagttggctcttaccgctgtggagcaactgctggttctatcacaatgaaacggctggtttgtgtgctcttggtgtgctcctctgcagtggcacagttgcataaagatcctaccctggatcaccactggcatctctggaagaaaacctatggcaaacaatacaaggaaaagaatgaagaagcagtacgacgtctcatctgggaaaagaatctaaagtttgtgatgcttcacaacctggagcattcaatgggaatgcactcatacgatctgggcatgaaccacctgggagacatgaccagtgaagaagtgatgtctttgatgagttccctgagagttcccagccagtggcagagaaatatcacatataagtcaaaccctaattggatattgcctgattctgtggactggagagagaaagggtgtgttactgaagtgaaatatcaaggttcttgtggtgcttgctgggctttcagtgctgtgggggccctggaagcacagcggaagctgaaaacaggaaagctggtgtctctcagtgcccagaacctggtggattgctcaactgaaaaatatggaaacaaaggctgcaatggtggcttcatgacaacggctttccagtacatcattgataacaagggcatcgactcagacgcttcctatccctacaaagccatggatcagaaatgtcaatatgactcaaaatatcgtgctgccacatgttcaaagtacactgaacttccttatggcagagaagatgtcctgaaagaagctgtggccaataaaggcccagtgtctgttggtgtagatgcgcgtcatccttctttcttcctctacagaagtggtgtctactatgaaccatcctgtactcagaatgtgaatcatggtgtacttgtggttggctatggtgatcttaatgggaaagaatactggcttgtgaaaaacagctggggccacaactttggtgaagaaggatatattcggatggcaagaaataaaggaaatcattgtgggattgctagctttccctcttacccagaaatctagaggatctctcctttttataacaaatcaagaaatatgaagcactttctcttaacttaatttttcctgctgtatccagaagaaataattgtgtcatgattaatgtgtatttactgtactaattagaaaatatagtttgannnnnnnnnnnnnnnnnnnnnnnnnnnnnnnnnnnnnnnnnnnnnnnnnnnnnnnnnnnnnnnnnnnnnnnnnnnnnnnnnnnnnnnnnnnnnnnnnnnnnnnnnnnnnnnnnnnnnnnnnnnnnnnnnnnnnnnnnnnnnnnnnnnnnnnnnnnnnnnnnnnnnnnnnnnnnnnnnnnnnnnnnnnnnnnnnnnnnnnnnnnnnnnnnnnnnnnnnnnnnnnnnnnnnnnnnnnnnnnnnnnnnnnnnnnnnnnnnnnnnnnnnnnnnnnnnnnnnnnnnnnnnnnnnnncagaaaagaaaatatagtttgattcttcatttttttaaatttgcaaatctcaggataaagtttgctaagtaaattagtaatgtactatagatataactgtacaaaaattgttcaacctaaaacaatctgtaattgcttattgttttattgtatactctttgtctttttaagacccctaatagccttttgtaacttgatggcttaaaaatacttaataaatctgccatttcaaatttc

SEQ ID NO: 187587 - DNA, 1516 bp, Homo Sapiens
gggaatttacatgacaccagtatcctggcaattcacttttttgaatgctacatatcccaatcaccatatattaaattctctattttcttcaaagtgctattgcccacaagagactgaacgatacagcaatttaaaaaaagaccacacaaactaaattgtaatgtcttcaatatctcaattactgttttttaaaaataaaaactgcagtagtgaatttctttaagttcttgctacatgattgaatgggagataacctcaacaattttcattcttaggcatgagcatcttcatgctaaggtagtctatacttaaaagctttattctttcataacacctgggcaacaaatattttaaaatcataaataatgcaaaattaaaatcagttatggtggcacaattcatttggtaactagttgcccaagatgtatagtagaatcaagcaggtttaacttccacatgctctgcaaaaaagggaaacaatggaaatatttcggtatattaatctagcccactattccactcaaggaatctatatcctttctttttctcatctggtctcagttcctttatcctcttagcaaaggcatctcacagtgatgactgagtctaattttaatcatatgcactttttatacaaaatggcccctaaaatgcaagccaactctatatacacaaaaccatgtaaacggtacctctaggtgatttaggtaattctgactatatacagttcttaccaaacaccctgacaagcaccagattccactgtaacacgtttttagagatttaattccattctgattgttctgcttactgtcctgaagatttgcgtccttatttgaagaactgatgtttggtaagtataaaagccagtaacttgagatttctccatcactgaagttgtgtgatcttgatggggataatactattaaagtccaagaaaaaaggtccttcttgtttaggcaaaaaggtactaggaatgatattgaagatcccagaaggtatattttctaattccaggtagcaaaacccacacctatagtcaccactagatttcctcagaaagccatggggaccaggatctcctagagtagaaactgttacaacctcaaatccaacgctatattgccttggtcctcgtagctcaatcagtaacggcccagtcttttctatatggaattggtagatggggttatttttgtgagtctcttggaaatttccacatcctccagcactctgaccactccactttccattaatccgttttgataaggtgtatggtgaaggaatctttgaaaaagtaaagctgcatgctgaatatacccgaaccgtgtaatggattgtgttctgtttttcatattgagaaaccactaatgtaaaggtatgggtgccaggtgtggtcagctttatcttagtcaaataatgagggctgttaattcgaattccatcaatgtatggaggtgggtcagctgggtaataaacttttatcacaatggttgtatacaagactgatggccaa

SEQ ID NO: 187588 - DNA, 928 bp, Homo Sapiens
ttggaaaacgttccacactctggagccccattgtcagccccaggcccagccccaggggtgctcccggtgctgcctgcagggccacaggctcctaggggaaagtgcacccgcagtcactcgcagatggccattttccagggacacactttcaactgagcattgaaagacagacagcgctcgagtggattaggccgcagtggttgagaagctcgagtaacgaatccagaaaactctggagagcccttcagagcatacacaccacgtctacttctcagcgcctctggagcgagtcccgttgccaggagaactactttcttgttctcggaatagatgctgcgcagaagaacctttctggaggccagggccacatcatggaagattgtgacctcaaagagcctgaaggactcctcactgtcagcagcttctgtctccagcattgcaaagccctgatccagaccaagctctcggggccgcctggcagcaaacaggggaggctgatgacatgcagccgcttcctgaagaccccctcatgcggaggtggccagcacatcactattccaaggaaaaggatgttcactccacgcaagctcaaattgacactctttaatagcgacgtttgctaaaatcaggaggactttgtacctttatgaggaatttttcattttcttcctggctgggttgatgtggaaaccagagctgtctgtggagctgttttccagaccccaggcccattcctgggatctctccaacaggacctgtcctgtgttctgggcttgtctcgggtctgaccaggagatggaggatgtgtccttggcagagccaaggggagacagaggtttctggatgccatgacaggctgtcggggtccaggtggcactcatgggccccctgccccatgtgaatgctgctggcacctggtggggggttg

SEQ ID NO: 187589 - DNA, 1999 bp, Homo Sapiens
  misc_feature (1529)..(1547): n is a, c, g, or t
  misc_feature (1912)..(1922): n is a, c, g, or t
ttggaatgatttgctttttatgcctgttctgaatggcagcacgaagcaggcctgttacttgtatgtcgctttggacagaggaaagtggggtaaaatgctacctgtacgtctgacatgaaaacttctcaccgcctcagcagctgaactaaaaacctgaatagccatgacaagagtttgcattttcttgatgattcatctccatgagtgcacaatccctgaactcactgtcttttctccacacttgtcctaagccaaggtagatttgtacgtagacagactggtgagcaagcattatattttatttttacccttgcatgacattttcattttaatcaataacattatttggcctgagcttgtgggtctgttcagactgtctcctctcatggtttgaaactgcatctgaatgcctgccttcaatcctggccaagttggagtagactggtatgagaaaactatgattagttcacatttactggtgcatccttgatcctctcacagatagaggtcttaaaggttggatcatgtaacattgcttagtaaaagaatcttcttctaaggatgatgggctttctacagcctgcttaccactaacagtaaggaatctttcataaacacacctcagtttgttcccagtgggcttattagggaggacctgatgactgattccaggatacttgtacttctaataacatttttcatgaatcatgagaaaatttccacagatacttcccttagaaaatttgctataaactctgtatcattggtagcacaaatttgagcgaggccttgtcaattttaaggtggaaataggaaggaccacaacatgacccgtaagtcaagaaggtagacatttcatatccagcttccttgcttagtctcctttcagtatttggcaataaaagaaagaagaaatagaacagctgaagtctcaaatcattgtctggaattttcctcaccttggctagctccacctgctctttgtctaaggcccttgcctcatcagggattagaactggcccatatgccagaacctgtactaaatgcctaatttgtatggaagagtgcatatttaatctcttttctatactgctcctttctgatgcttatcctttcatctgtgtgattgttttttcccctctactaacaagatcctcccagctttctctctacatgtagaaaggataacatttctcatgaacccactgcccctctgcattttcctcactggttagagattaagtaaataggatagaatatgctgcgtctcccctgacacacactttcttttttgaatgagcaagtctccattttgatttcagcaaagattttttctccttttctttgtcctcaaccatacttagaggaaagaaggaatggtcttccatgaactgattatgcttaattaagcaaagtaaggaaattagtttcatggaagcctaaacaaagctggaatagaaactacacactagacacagcagtagtcatagtcttcacaggtttaggagctactggaccaacattcttgnnnnnnnnnnnnnnnnnnnaaataattctagtctggagctaactgtggagcagccaaatagtagctggcatgttgattcaaaccatgggctgaatttgctcataggctgtgcatcagacaaaagcttgaatatttgtgttgtatgcttgttccaaccaccgcttgtgtgagcatttttgtggcttgtacagaaagtacacttttaaattgtctcttgcatcactaaaatttttttaaaatgagcataacaacgaaaggcatccagctgactttttgattccaagattattgattggattgacttttttgcattaaatttttctcagcaaaataaatcatatggcgagtcaggaataaaaagtcaaaagaaacaaataggaagcnnnnnnnnnnnaaaaaatgtattgcttctgacttttttctgccactgctccctagccctgtttagtttgtatgctgcttttctttttc

SEQ ID NO: 187590 - DNA, 1185 bp, Homo Sapiens
ttggcaataacttactgaccgaacatttcagttatttgtttagaagtgcaaactgctttcagagactttttgcatgtaatatttcttaagattcataagtttctgaactcgtatgtactatcaaatacataaaggtgtaaaattacaacaaaaggcattataattttgttgggggttaattttatgaaaattatgctcaataagagttgtatatttaatatatttgcagtgaacacagaatactttatgcatattactgatttaatttgaatatagttttacagcctccttgacacctataatttacagatcaaaactcagcaataatttgggcagctaatgaatgtcatgaaagctgtagaatctacatcaccatccattgctttaattacatgaaaatgctctagtgttgtgatgcactgctgatgtttccaattcaggtacaagtatgttttaaagaagaaataagtttcccaatcagccaatttaactggctacctgttacctcagctgagttagtttaggaagtttacattcgtttctaattctatacttgttttcaggggttttttaaacacatcctatatatcatgtcaatctggcaagaaatatgacttgctttttgctgagcttaattcagatatcagtaaaattaagtcataaaataatcatgtgtcatgtgactttggcaccctatagacatacttagttttaacttttcaaagtttggcctcctattagaaataatcatgtctcagatgagtaatgtctgtttccagggttcagaaaaggcaaactcatgaaatgccactgaaaagaactttcaacacagcatacttcatgtaaaagaaattgtttgtttgctttctttgtgtagatttctatttgtgttttatgtcatggaaatattccagaattaacagataatagtggtaaagtaatatgcagatagtctaaattcattttgagtttctaggtgtaagcagactaaatgttgcccagaatcagtgttgggttatcagtttatattaaatatactgagttgcccttttgaaaatgcactttgaataatctcaaaaagatgtacaagttatacctgtaaaccacaaaagtgaagcctgagcttctgttcaatttcatagactcctttaccatgtaaaatttgtctgatatttgatttgtgat

SEQ ID NO: 187591 - DNA, 895 bp, Homo Sapiens
aaatgtaggtagagttcactgcttgaggagaactgtacatcacactgttcacaccaatagaggtgatcactaaaatgggtgtctgcaatgtgctggctgaggttctcaaaaattactgtcttataatcacagtatttacaaatgtagggatcctcttcatgcagtttggcatgttctatcagaagcatattggtagagaaactttccttgcatactcgacacacatttgaatcagtacgtttatgcttcaggatcatatgctgctttaagtcagaaaaatatttgctgttaaactcacaaagttcacatttatagaggccactgctattagctctcagtaaaggccatttctgctgggcagtcacattcaaagcttggctcttgtcaagaattttacaaagtttagctggcggttcttcatcagtttggtcttggagactctcagaggaattgttttctgtctctatatcataatcctcagaaatcgcatgcacttctacagcaattggaacatcttcagcagtgtgaacttctataggactctcctcttgggtttgctggttgactgattcaggtgagtcacactcttcatcacaaattacaatatcagcagatttttctgtagaaaaggcagtgtggtctagaattctaagtacaggactgggaaccaggtagttctgatttctgtttctggccttgattccatctgcaaattttggcaagtcatttgacgtctcggtatcagaatcatcatctttgttgtcaaaatattttaaatctggctgtctcatagaacagacactgtaacaatgatcagagaaaattccattgaatccatctgcaattctgcttattccagaggaatctgaataacgagaagggtgtagagtcttcc

SEQ ID NO: 187592 - DNA, 2205 bp, Homo Sapiens
agttggcccgcttccatgcggttcgggtccaagatgatgccgatgtttcttaccgtgtatctcagtaacaatgagcagcacttcacagaagttccagttactccagaaacaatatgcagagacgtggtggatctgtgcaaagaacccggcgagagtgattgccatttggctgaagtgtggtgtggctctgaacgtccagttgcggataatgagcgaatgtttgatgttcttcaacgatttggaagtcagaggaacgaagttcgcttcttccttcgtcatgaacgcccccctggcagggacattgtgagtggaccaagatctcaggatccaagtttaaaaagaaatggtgtaaaagttcctggtgaatatcgaagaaaggagaacggtgttaatagtcctaggatggatctgactcttgctgaacttcaggaaatggcatctcgccagcagcaacagattgaagcccagcaacaattgctggcaactaaggaacagcgcttaaagtttttgaaacaacaagatcagcgacaacagcaacaagttgctgagcaggagaaacttaaaaggctaaaagaaatagctgagaatcaggaagctaagctaaaaaaagtgagagcacttaaaggccacgtggaacagaagagactaagcaatgggaaacttgtggaggaaattgaacagatgaataatttgttccagcaaaaacagagggagctcgtcctggctgtgtcaaaagtagaagaactgaccaggcagctagagatgctcaagaacggcaggatcgacagccaccatgacaatcagtctgcagtggctgagcttgatcgcctctataaggagctgcagctaagaaacaaattgaatcaagagcagaatgccaagctacaacaacagagggagtgtttgaataagcgtaattcagaagtggcagtcatggataagcgtgttaatgagctgagggaccggctgtggaagaagaaggcagctctacagcaaaaagaaaatctaccagtttcatctgatggaaatcttccccagcaagccgcgtcagccccaagccgtgtggctgcagtaggtccctatatccagtcgtctactatgcctcggatgccctcaaggcctgaattgctggtgaagccagccctgccggatggttccttggtcattcaggcttcagaggggccgatgaaaatacagacactgcccaacatgagatctggggctgcttcacaaactaaaggctctaaaatccatccagttggccctgattggagtccttcaaatgcagatcttttcccaagccaaggctctgcttctgtacctcaaagcactgggaatgctctggatcaagttgatgatggagaggttccgctgagggagaaagagaagaaagtgcgtccgttctcaatgtttgatgcagtagaccagtccaatgccccaccttcctttggtactctgaggaagaaccagagcagtgaagatatcttgcgggatgctcaggttgcaaataaaaatgtggctaaagtaccacctcctgttcctacaaaaccaaaacagattaatttgccttattttggacaaactaatcagccaccttcagacattaagccagacggaagttctcagcagttgtcaacagttgttccgtccatgggaactaaaccaaaaccagcagggcagcagccgagagtgctgctatctcccagcataccttcggttggccaagaccagaccctttctccaggttctaagcaagaaagtccacctgctgctgccgtccggccctttactccccagccttccaaagacaccttacttccacccttcagaaaaccccagaccgtggcagcaagttcaatatattccatgtatacgcaacagcaggcgccaggaaaaaacttccagcaggctgtgcagagcgcgttgaccaagactcataccagagggccacacttttcaagtgtatatggtaagcctgtaattgctgctgcccagaatcaacagcagcacccagagaacatttattccaatagccagggcaagcctggcagtccagaacctgaaacagagcctgtttcttcagttcaggagaaccatgaaaacgaaagaattcctcggccactcagcccaactaaattactgcctttcttatctaatccttaccgaaaccagagtgatgctgacctagaagccttacgaaagaaa

SEQ ID NO: 187593 - DNA, 948 bp, Homo Sapiens
  misc_feature (641)..(685): n is a, c, g, or t
ttggaggaagggtctgccccgagctttctggttggcaggtggcagcaggatggtgggtgttcagcctgaatgcccaggagcatttctggggggcagctaagactggcagctgggttggtgtgttagcgggcaggggagccattgtggggtccccaggaaagggcaagggctcagccacatcttggggtctgggaggcccaggctaagccatgtggcagggaccgtcttgccctgctggccacactctggagaagcacttctcagccaaggcacccctgccctgggactggcagggcaggggcaggggcagggacagtggccaggcggcccgaggacttacggtcggcacttctctgttctcccgtgtcagcgtgtggtgtcgcctgcatgggtcgtacctggatggtgtgtccaccatcgacacggaggggctggatttgtttctcaggcaatcctgtattttaattttagatgtatttcctgaagcatatttttcatagaatgtagcgtgtaaatagctttttaaataacttcttttttataagagtaaaagtatctttaggaatttctttctatagagttcttcattaacatttatacgagttttttgctgagtcagatggacagttgggttctgatgnnnnnnnnnnnnnnnnnnnnnnnnnnnnnnnnnnnnnnnnnnnnnaagaactaacgtattgcctgaaaaacaagtgatgtctgtgcagccttacactctgtctttacagaagcaaatagtacacaaaagatctatttcagacacattttgaagatgaatcttcaactttaataccagctctttgttttccttgtatgatgaggggattggggggatacagttattttactagcaccttgtgaagtgtttccgtgttttgtgatgctgtaatttattaatgtttgtagcttttttatatttgtacattt

SEQ ID NO: 187594 - DNA, 2263 bp, Homo Sapiens
ttggaaagctgttatggaacagttccgccacttgccaatgcctttccactggaagcaggaagaactcaagtttaagacaggcttgcggaggctgcagcaccgagtaggggagatccaccttctccgagaagccctgcagaagggggctgaggctggccaagtgtctctgcacagcttgatagaaactcctgctaatgggactgggccaagtgaggccctggccatgctactgcaggagaccactggagagctagaggcagccaaagccctagtgctgaagaggatccagatttggaaacggcagcagcagctggcagggaatggcgcaccgtttgaggagagcctggccccactccaggagaggttgggctagggctgatggggaagagggggcaagctgggggtgggcagctgaccctgctgaaggccctacaggtgagagaaagaagccaggcgggagggccttggagtggaccaagatgcataaaagccagttccagcggggctgtgcacactgtcgttcaggtcgcatcctgtacaagtgggcctagtggaggggcacaagcggggactcatccaacccaggcttctctcctcaagccccatgcctagaggaataggagggcttttccatttggtttattgggtgggaacactttccaatttgccacaaagcactgtaagtggtggcagttgtcctgggtgcaagagccgtcgggggagaggcagctgggtttccacagggggtgtaggcactgagaatgaacctcccacccagaccctaggccaacagatcacagaacccccttcagcccaggtgccttgcagccacacccactacccaccccacttctccacacatgatagcctttctccctgggtataggggaagggggtctgggccggagcaagcagccttaatcctgtgccccctgaccactgtcctggccccaggtgtgaaagcctggtggacatttattcccagctacagcaggaggtaggggcggctggtggggagcttgagcccaagacccgggcatcgctgactggccggctggatgaagtcctgagaaccctcgtcaccagttgcttcctggtggagaagcagcccccccaggtactgaagactcagaccaagttccaggctggagttcgattcctgttgggcttgaggttcctgggggccccagccaagcctccgctggtcagggccgacatggtgacagagaagcaggcgcgggagctgagtgtgcctcagggtcctggggctggagcagaaagcactggagaaatcatcaacaacactgtgcccttggagaacagcattcctgggaactgctgctctgccctgttcaagaacctgcttctcaagaagatcaagcggtgtgagcggaagggcactgagtctgtcacagaggagaagtgcgctgtgctcttctctgccagcttcacacttggccccggcaaactccccatccagctccaggtgaaccgtggcccagccctgccccaatctgggaccccgagtcctcctccaatgccacacacaagggccctggaccctcacctcttgtgactgccccataccccatgtgtctgggattcatgcacactggggcccgggccctgtctctgcccctggtggtcatcgtccatggcaaccaagacaacaatgccaaagccactatcctgtgggacaatgccttctctgagatggaccgcgtgccctttgtggtggctgagcgggtgccctgggagaagatgtgtgaaactctgaacctgaagttcatggctgaggtggggaccaaccgggggctgctcccagagcacttcctcttcctggcccagaagatcttcaatgacaacagcctcagtatggaggccttccagcaccgttctgtgtcctggtcgcagttcaacaaggagatcctgctgggccgtggcttcaccttttggcagtggtttgatggtgtcctggacctcaccaaacgctgtctccggagctactggtctgaccggctgatcattggcttcatcagcaaacagtacgttactagccttcttctcaatgagcccgacggaacctttctcctccgcttcagcgactcagagattgggggcatcaccattgcccatgtcatccggggccaggatggctctccacagatagaagaacatccagccattctctgccaaagacctgtccattcgctcactgggggaccgaatccgggatcttgctcagctcaaaaatctctatccc

SEQ ID NO: 187595 - DNA, 1211 bp, Homo Sapiens
ttggtgtagctcttagcaccactgacatcagtcctgctcggccaaaatctcatgccataaaccatggtactgcatactgtggcagagatactgtgaaagccttattagttcttttggacgaagaagcagctaatgctcctaccaaaaacaaagcagagcttttatatgatgaggaaaacacaatccatcatcatggaacgtctattcttacactttttaggtctcccacacaggtgaataattcgataaaacccctaagagaacgcatctgtgtgtcaatgcaagagaaaaaaattaagatgaagcaaactttaattagatcccaatttgcttgtacttataaagatgactacatgataagcaaggataattggaataatgttaatttagcatcaaagcctttgtgtgttctttacatggaaaatgacctttctgagggtgtaaatccatctgttggaagatcaacaattggaacgagttttggaaatgttcatctggacagaagtaaaaatgaaaaagtatcaagaaaatcaaccagtcagacaggaaataaaagctcaaaaaggaaacaggtggatttggatggtgaaaatattctctgtgataatagaaatgaaccacctcaacataaaaatgctaaaatacctaagaaatcaaatgattcacagaatagattgtacggcaaactagctaaagtagcaaaaagtaataaatgtactgccaaggacaagttgatttctggccaggcaaagttaactcagttttttagactataaatttgtgtcttatatgctttaggtttatgtatctataaaccattcaccaaagacatgcttaatttttaagagatcaaggtgtaaattatgatgatttattattttggtctacagtgtatgtaaggttagtatgttaagcattgtttaaaaatactagtaagtcataattatgcagaattttcacaaagtttaatgcacagagaaagcatatcatttcagttactgatacatcttaacactactttcttttaaaacagacatttaacatacacaagttatagtagcagtatgggcttctcctcccattggcaattaaatgcttttattttcttctgaaaagatgatgtggaccaacaggtatcagacttgcccaaccaaggtcggtagactcttcccagcatacatctgagcactgaaggaagaagaaaagtttaa

SEQ ID NO: 187596 - DNA, 2705 bp, Homo Sapiens
gccaactttgtacaaaaaagttggcccattcatctaccggctggggtctcgggagctggctcgggagaccccattcatctaccggctggagcggcaggaagtgggctctgaagactggattcagtgcttcagcatcgagaaagccggagccgtggaggtgccgggcgactgtgtgccctccgagggtgactaccgcttccgcatctgcacagtcagcggacatggccgtagtccccacgtggtgttccacggttctgctcaccttgtgcccacagctcgcctggtggcaggtctggaggatgtgcaggtatacgacggggaagatgccgtcttctccctcgatctctccaccatcatccagggtacctggttccttaatggggaagagctcaagagtaacgagccggagggccaggtggaacctggggccctgcggtaccgtatagagcagaagggtctgcagcacagactcatcctgcatgccgtcaagcaccaggacagcggtgccctggtcggcttcagctgccccggcgtgcaggactcagctgccctcacaatccaagagagcccggtgcacatcctgagcccccaggacaaggtgtcgttgaccttcacaacctcagagcgggtggtgctgacttgtgagctctcaagggtggacttcccggcaacctggtacaaggatgggcagaaggtggaggagagcgagttgctggtggtgaagatggatgggcgcaaacaccgtctgatcctgcctgaggccaaagtccaggacagtggcgagtttgagtgcaggacagaaggggtctcggccttcttcggcgtcactgtccaagatcctcccgtgcacatcgtggacccccgagaacatgtgttcgtgcatgccataacttccgagtgtgtcatgctggcctgtgaggtggaccgagaggacgcccctgtgcgttggtacaaggacgggcaggaggtggaggagagtgacttcgtggtgctggagaatgaggggccccatcgccgcctggtgctgcccgccacccagccctcagacgggggcgagtttcagtgcgtcgctggagatgagtgtgcctacttcactgtcaccatcacagacgtctcctcgtggatcgtgtatcccagcggcaaggtgtatgtggcagccgtgcgcctggagcgtgtggtgctgacctgtgagctatgccggccctgggcagaggtgcgctggaccaaggatggagaggaggtggtggagagccccgcgctgctcctgcagaaggaagacactgtccgccgcctggtgctgcccgctgtccagctcgaggactccggcgagtacttgtgtgaaattgacgatgagtcggcctccttcactgtcaccgtcacagaacccccagtgcggatcatataccctcgcgatgaggtgaccttgatcgccgtgaccttggagtgtgtggtgctgatgtgtgaactgtctcgggaggatgcccctgtgcgctggtacaaggatgggctggaagtggaggagagcgaggccctggtgctggatagggatgggccacgctgccgcctggtgctacctgctgctcagcccgaggacgggggcgagtttgtatgtgatgctggagatgactcggccttcttcactgtcactgtcacagccccaccagagaggattgtgcacccggcagcccgctccctggatctgcattttggggctccagggcgcgtggagctgcgctgtgaggtggccccagctgggtctcaggtgcgctggtacaaggacgggctggaagtggaggcatcagatgccctgcagctgggtgccgaggggcccacccgcaccctgaccctgccccacgcccagcctgaggacgccggggagtatgtgtgtgagacccggcatgaggccatcaccttcaatgtcatcctggctgagcctccagtgcagttccttgctctagagacaactccaagcccgctctgtgtggcccccggggagccagtggtgctgagctgtgaactgtcccgggctggcgcccccgtggtctggagccacaatgggaggcccgtgcaggagggcgagggcctagagctccatgccgagggcccccgccgagtcctctgcatccaggctgcaggcccagcccatgcagggctctacacctgccagtctggagcagcccccggagccccaagcctcagcttcaccgtccaggtggctgagccccctgtgcgggtggtagctcccgaggcagcccagacgagggttcggagcaccccaggcggggacctagagctggtggtgcacctctccgggccagggggccctgtacgctggtacaaggacggggagcgactggcaagccaggggcgggtgcagctggagcaggccggggccaggcaggtgctgcgggtgcagggggcacggagcggggacgctggggagtacctgtgcgatgcgccccaggacagccgcatcttccttgtcagcgtggaagagccactgctggtgaagctggtctcggacctgacaccactcactgtccacgagggcgatgatgccacgttccggtgtgaagtctccccaccagatgccgatgtcacctggctgcgcaatggggccgtcgtcactccagggcccccaggtggagatggcctagaatggttcaaagccgcatctttaaccttgcgaggctgccaactggggg

SEQ ID NO: 187597 - DNA, 959 bp, Homo Sapiens
ttgggtggaatacacgatcctgcctgcgtggtttactgtaataccagcaagaagtggttctgcaacggacgtggaaatacttctggcagccacattgtaaatcaccttgtgagggcaaaatgcaaagaggtgaccctgcacaaggacgggcccctgggggagacagtcctggagtgctacaactgcggctgtcgcaacgtcttcctcctcggcttcatcccggccaaagctgactcagtggtggtgctgctgtgcaggcagccctgtgccagccagagcagcctcaaggacatcaactgggacagctcgcagtggcagccgctgatccaggaccgctgcttcctgtcctggctggtcaagatcccctccgagcaggagcagctgcgggcacgccagatcacggcacagcagatcaacaagctggaggagctgtggaaggaaaacccttctgccacgctggaggacctggagaagccgggggtggacgaggagccgcagcatgtcctcctgcggtacgaggacgcctaccagtaccagaacatattcgggcccctggtcaagctggaggccgactacgacaagaagctgaaggagtcccagactcaagataacatcactgtcaggtgggacctgggccttaacaagaagagaatcgcctacttcactttgcccaagactgactctgacatgcggctcatgcagggggatgagatatgcctgcggtacaaaggggaccttgcgcccctgtggaaagggatcggccacgtcatcaaggtccctgataattatggcgatgagatcgccattgagctgcggagcagcgtgggtgcacctgtggaggtgactcacaacttccaggtggattttgtgtggaagtcgacctcctttgacaggatgcagagcgcattgaaaacgtttgccgtggatgagacctcggtgtctggctacatctaccacaa

SEQ ID NO: 187598 - DNA, 1756 bp, Homo Sapiens
aaaaagagaagaatgacctggcagacagttcttgtgagccatgatatgattaaccagcaatatcatataagtatctttattaaaacactagtttgaaaagactcaatgattaaactactgtttactggctcagggaaatgtttaagaaatagaaattaattcattctttccccaagaaaaactttaaggtaaacatctttaaacacctaagtgatgaaggagaaaatttgtattccttaaaaaggggtcagtgctgaaagaaaattgcatggtagaccccactgcacaacggttctgcaccaaaagaaaaatgaggaccatattaacataattatgttggagagaagaaaaacccacacttagaagtcaggtttcttttaaaactccttgttacaaatagaatcaatgattatatctcagacataataatgggtcaaactcacaaaatcagtgctacaaaatacagtatttttccatcacttttagttgtaatgtacactatgtacagaaagataatactacctattttaaactaaatatagatgaacaaacagcttgttaaaaaccagaatcagggcttataaatagtgcagaaaatgcaaacgccaaaaaaacgatgcctcctatgattgtcacagttctgacagagattttctgtgctatcattcttcctccaattactgccaatcccgtgcacaggcagtgccccacagttccacccacggctacaccataggggtcctctctagctgccaatacaattgtagttagttgagagcgatcaccccattctgctaagaatgttaatgtaagagcttgaacaaaaatgggtgaaataaaatgcaaccactttttctgaggtactgttatgcttgtacccgtttcaacatctcccggtccatttaaaagtttggttcgttgaaattcttcatctttcttctttaattcagcttgaacttcttccagttcctcttgaccctcatcagggctcatctttaagccttcccgaagcattctaatgccaaaaatggcaaataatacagttgaaacatagtatgtatagaccctggggatgactgtggtggcatagccaaacaaaactgacaagcatgtcattagtcccaaggcaagcattgcaccagccagcacggtcaggcggttatagcgcattgccatgatggctgctataaaaaatgtcttatcacccaattcagatacaataataactgatatggcagcgacaaatgcatggataaatcccaaattagtttgggtagcaggatcttctttattggtatgaactggagctgctggtgtaaatattttctcgacccgggccggctcggggccctgcacagccacaggctgcggctgcagctgctgggccggcgccggcggttctttgttccggtggctaaggtcttcatctgggccggcccggaccgcagccggggcccacagcagcggaaccagaaagagcagaagcagccggggcgccgatgcgcggccgttccctggagccgcggccgccatcccgcctgccgggccggccgcgcacgggcgccgcaagaggaagtgccggcgacgggaagcctcgaccccgaacagcctccgcggcgcgtcctcacgactcgccgccgccgccgcttagggagcagtcagcaccatccgggaggtgcaagcagcgggagtgaggtgaggggcaggccgaagtccgcagccccggctcggcgcccgtcctctccggcggcgccaa

SEQ ID NO: 187599 - DNA, 1025 bp, Homo Sapiens
ttggaaacaaaggtgtgattatgaagaggatgtgagtcctttgggtgtaggagagaaagggtgttgagcttctatttcaagatacttttacctgtgcaaaaagcacattttccacctccttctcatggcatttgtgtaaggtgagtatgattcctattccatctgcattttagaggtgaagaataacgtacaagggattcagtgattagcaagggacccctcactaagtgttgatggagttaggacagagctcagctgtttgaatctcagagcccaggcagctggagctgggtaggatcctggagctggcactaatgtgaggtgcattccctccaacccaggctcagatccggaacctgaccgtgctgacccccgaaggggaggcagggctgagctggcccgttgggctccctgctcctttcacaccacactctcgctttgaggtgctgggctgggactacttcacagagcagcacaccttctcctgtgcagatggggctcccaagtgcccactacagggggctagcagggcggacgtgggtgatgcgttggagactgccctggagcagctcaatcggcgctatcagccccgcctgcgcttccagaagcagcgactgctcaacggctatcggcgcttcgacccagcacggggcatggagtacaccctggacctgctgttggaatgtgtgacacagcgtgggcaccggcgggccctggctcgcagggtcagcctgctgcggccactgagccgggtggaaatcctacctatgccctatgtcactgaggccacccgagtgcagctggtgctgccactcctggtggctgaagctgctgcagccccggctttcctcgaggcctttgcagccaatgtcctggagccacgagaacatgcattgctcaccctgttgctggtctacgggccacgagaaagtggccgtggagctccagacccatttcttggggtgaaagctgcagcagcggagttagagcgacggtaccctgggacgaggctggcctggctcgct

SEQ ID NO: 187600 - DNA, 1487 bp, Homo Sapiens
  misc_feature (1322)..(1330): n is a, c, g, or t
ctttgtacaaaaaagttggcggagccttgaatatgaaattcgctctgacacatcgttcatgttccagcgagtgctggtgtctctgtcagctggtgggagggatgaaggaaattatctggacgatgctctcgtgagacaggatgcccaggacctgtatgaggctggagagaagaaatgggggacagatgaggtgaaatttctaactgttctctgttcccggaaccgaaatcacctgttgcatgtgtttgatgaatacaaaaggatatcacagaaggatattgaacagagtattaaatctgaaacatctggtagctttgaagatgctctgctggctatagtaaagtgcatgaggaacaaatctgcatattttgctgaaaagctctataaatcgatgaagggcttgggcaccgatgataacaccctcatcagagtgatggtttctcgagcagaaattgacatgttggatatccgggcacacttcaagagactctatggaaagtctctgtactcgttcatcaagggtgacacatctggagactacaggaaagtactgcttgttctctgtggaggagatgattaaaataaaaatcccagaaggacaggaggattctcaacactttgaatttttttaacttcatttttctacactgctattatcattatctcagaatgcttatttccaattaaaacgcctacagctgcctcctagaatatagactgtctgtattattattcacctataattagtcattatgatgctttaaagctgtacttgcatttcaaagcttataagatataaatggagattttaaagtagaaataaatatgtattccatgtttttaaaagattactttctactttgtgtttcacagacattgaatatattaaattattccatattttcttttcagtgaaaaattttttaaatggaagactgttctaaaatcacttttttccctaatccaatttttagagtggctagtagtttcttcatttgaaattgtaagcatccggtcagtaagaatgcccatccagttttctatatttcatagtcaaagccttgaaagcatctacaaatctctttttttaggttttgtccatagcatcagttgatccttactaagtttttcatgggagacttccttcatcacatcttatgttgaaatcactttctgtagtcaaagtataccaaaaccaatttatctgaactaaattctaaagtatggttatacaaaccatatacatctggttaccaaacataaatgctgaacattccatattattatagttaatgtcttaatccagcttgcaagtgaatggnnnnnnnnntaagcttcaaactaggtattctgggaatgatgtaatgctctgaatttagtatgatataaagaaaacttttttgtgctaaaatactttttaaaatcaattttgttgattgtagtaatttctatttgcactgtgcctttcaactccagaaacattctga

SEQ ID NO: 187601 - DNA, 1950 bp, Homo Sapiens
ttggagaacctcacatggcgggacatgcaacacctggtggtacagacctcgaagccagcccacctcaatgccaacgactgggccaccaatggtgtgggccggaaagtgagccactcatatggctacgggcttttggacgcaggcgccatggtggccctggcccagaattggaccacagtggccccccagcggaagtgcatcatcgacatcctcaccgagcccaaagacatcgggaaacggctcgaggtgcggaagaccgtgaccgcgtgcctgggcgagcccaaccacatcactcggctggagcacgctcaggcgcggctcaccctgtcctataatcgccgtggcgacctggccatccacctggtcagccccatgggcacccgctccaccctgctggcagccaggccacatgactactccgcagatgggtttaatgactgggccttcatgacaactcattcctgggatgaggatccctctggcgagtgggtcctagagattgaaaacaccagcgaagccaacaactatgggacgctgaccaagttcaccctcgtactctatggcaccgcccctgaggggctgcccgtacctccagaaagcagtggctgcaagaccctcacgtccagtcaggcctgtgtggtgtgcgaggaaggcttctccctgcaccagaagagctgtgtccagcactgccctccagggttcgccccccaagtcctcgatacgcactatagcaccgagaatgacgtgggaccatccgggccagcgtctgcgccccctgccacgcctcatgtgccacatgccaggggccggccctgacagactgcctcagctgccccagccacgcctccttggaccctgtggagcagacttgctcccggcaaagccagagcagccgagagtccccgccacagcagcagccacctcggctgcccccggaggtggaggcggggcaacggctgcgggcagggctgctgccctcacacctgcctgaggtggtggccggcctcagctgcgccttcatcgtgctggtcttcgtcactgtcttcctggtcctgcagctgcgctctggctttagttttcggggggtgaaggtgtacaccatggaccgtggcctcatctcctacaaggggctgccccctgaagcctggcaggaggagtgcccgtctgactcagaagaggacgagggccggggcgagaggaccgcctttatcaaagaccagagcgccctctgatgagcccactgcccaccccctcaagccaatcccctccttgggcactttttaattcaccaaagtatttttttatcttgggactgggtttggaccccagctgggaggcaagaggggtggagactgtttcccatcctaccctcgggcccacctggccacctgaggtgggcccaggaccagctggggcgtggggagggccgtaccccaccctcagcaccccttccatgtggagaaaggagtgaaacctttagggcagcttgccccggccccggccccagccagagttcctgcggagtgaagaggggcagcccttgcttgttgggattcctgacccaggccgcagctcttgcccttccctgtccctctaaagcaataatggtcccatccaggcagtcgggggctggcctaggagatatctgagggaggaggccacctctccaagggcttctgcaccctccaccctgtcccccagctctggtgagtcttggcggcagcagccatcataggaagggaccaaggcaaggcaggtgcctccaggtgtgcacgtggcatgtggcctgtggcctgtgtcccatgacccacccctgtgctccgtgcctccaccaccactggccaccatgctggcgcagccaaagcagaagctctggctgaaccctgtgctgggtgtcctgaccaccctcccctctcttgcacccgcctctcccgtcagggcccaagtccc

SEQ ID NO: 187602 - DNA, 717 bp, Homo Sapiens
actttgtacaaaaaagttggccccagctgggaggcaagaggggtggagactgtttcccatcctaccctcgggcccacctggccacctgaggtgggcccaggaccagctggggcgtggggagggccgtaccccaccctcagcaccccttccatgtggagaaaggagtgaaacctttagggcagcttgccccggccccggccccagccagagttcctgcggagtgaagaggggcagcccttgcttgttgggattcctgacccaggccgcagctcttgcccttccctgtccctctaaagcaataatggtcccatccaggcagtcgggggctggcctaggagatatctgagggaggaggccacctctccaagggcttctgcaccctccaccctgtcccccagctctggtgagtcttggcggcagcagccatcataggaagggaccaaggcaaggcaggtgcctccaggtgtgcacgtggcatgtggcctgtggcctgtgtcccatgacccacccctgtgctccgtgcctccaccaccactggccaccaggctggcgcagccaaggccgaagctctggctgaaccctgtgctggtgtcctgaccaccctcccctctcttgcacccgcctctcccgtcagggcccaagtccctgttttctgagcccgggctgcctgggctgttggcactcacagacctggagcccctgggtgggtggtgggga

SEQ ID NO: 187603 - DNA, 1616 bp, Homo Sapiens
ttgggttggttccctgtggtgcacggcacagcagcaggtgtagaattgagtagccccagcgtgtggtctggccctgctgagagcagacgggaggctgggccagcccatggggagggacttgccactggcaacgagccatctctgtcatgtaggggacgattctggtggagcagggggcttcctggcaggcccgtgttggctacacccttggtcagggtcacctctgcggtagcccccagtgggcgaagtcgcttgtcgttgggatttgtcgtaaaagccaaatgcaggaagagccctggagctcggagtggagccgttgggctcctgctggcagtgcccctgtggccctaggtggccctgggtttgagagtggcaaggagggctgaggtcctgaggacagccctgctgtgccctaggaggccaggtggatggtaccctggcccttctcagggggcccggggtggagccacgtggagcctgggatgacgcctgcctgtcctgtgtcaagcagctgccaacgtgctactctcggagcagggtgacgtgaagctggcggactttggggtagcagggcagctcacagacacgcagattaagaggaacacattcgtgggcacccccttctggatggcacctgaggtcatcaagcagtcggcctacgacttcaaggctgacatctggtccctggggatcacagccatcgagctggccaagggggagcctccaaactctgacctccaccccatgcgcgtcctgttcctgattcccaagaacagcccacccacactggagggccagcacagcaagcccttcaaggagttcgtggaggcctgcctcaacaaagacccccgattccggcccacggccaaggagctcctgaagcacaagttcatcacacgctacaccaagaagacctccttcctcacggagctcatcgaccgctataagcgctggaagtcagaggggcatggcgaggagtccagctctgaggactctgacatgtagggacctggtttatcctcatggtgaccctaggtgctgtgacgtgggtggtccccactccagaagcaggggcgtgggccctgggggtgagggtgaccagatatagtgttgggcagggaccccctcaaggctgcaggacagggcctgctgaggcatcagctggaccccgtggcctggcagagccccgtctggtacctcgggtttcccttggccgtgaggtgtgccctgaggccctcatgcctcctggccctctccccactggccctggcaactcctcatcctcttcagtgatggcgaggcggaggacggggagcagggccccatctggacgttcccccctaccatccggccgagtccacacagcaagcttcacaaggggacggccctgcacagttcacagaagcctgcggagcccgtcaagaggcagccgaggtcccagtgcctgtccacgctggtccggcccgtcttcggagagctcaaagagaagcacaagcagagcggcgggagcgtgggtgcgctggaggagctggagaacgccttcagcctggccgaggagtcctgccccggcatctcagacaagctgatggtgcactggtggagcgagtgcaaagttt

SEQ ID NO: 187604 - DNA, 1442 bp, Homo Sapiens
  misc_feature (360)..(369): n is a, c, g, or t
ccaactttgtacaaaaaagttggcgctcgctcgcccaggccgggctgccctttcgcgtgtccgcgctctcttccctccgccgccgcctcctccattttgcgagctcgtgtctgtgacgggagcccgagtcaccgcctgcccgtcggggacggattctgtgggtggaaggagacgccgcagccggagcggccgaagcagctgggaccgggacggggcacgcgcgcccggaagccccgacccgcggagcccggcgcggggcggagggctggcttgtcagctgggcaatgggagactttcttaaataggggctctccccccacccatggagaaaggggcggctgtttacttcctttttttagnnnnnnnnnntatatttccctcctgctccttctgcgttcacaagctaagttgtttatctcggctgcggcgggaactgcggacggtggcgggcgagcggctcctctgccagagttgatattcactgatggactccaaagaatcattaactcctggtagagaagaaaaccccagcagtgtgcttgctcaggagaggggagatgtgatggacttctataaaaccctaagaggaggagctactgtgaaggtttctgcgtcttcaccctcactggctgtcgcttctcaatcagactccaagcagcgaagacttttggttgattttccaaaaggctcagtaagcaatgcgcagcagccagatctgtccaaagcagtttcactctcaatgggactgtatatgggagagacagaaacaaaagtgatgggaaatgacctgggattcccacagcagggccaaatcagcctttcctcgggggaaacagacttaaagcttttggaagaaagcattgcaaacctcaataggtcgaccagtgttccagagaaccccaagagttcagcatccactgctgtgtctgctgcccccacagagaaggagtttccaaaaactcactctgatgtatcttcagaacagcaacatttgaagggccagactggcaccaacggtggcaatgtgaaattgtataccacagaccaaagcacctttgacattttgcaggatttggagttttcttctgggtccccaggtaaagagacgaatgagagtccttggagatcagacctgttgatagatgaaaactgtttgctttctcctctggcgggagaagacgattcattccttttggaaggaaactcgaatgaggactgcaagcctctcattttaccggacactaaacccaaaattaaggataatggagatctggttttgtcaagccccagtaatgtaacactgccccaagtgaaaacagaaaaagaagatttcatcgaactctgcacccctggggtaattaagcaagagaaactgggcacagtttactgtcagcaagctttcctggagcaaatataattggtaataaaatgtctgccatttc

SEQ ID NO: 187605 - DNA, 815 bp, Homo Sapiens
ttgggtctatgtgactatcttgtaagtcaataaatttctgtatagtccagatggattaaacttctcatttcttttaaatatgtatgaataataatacaaggaagtaggcattccatttaataatcaagagcaagttgtactcaaagcattcagttaaagtgtatctgtgtgtggaactaatttcagacaatagaaaatattagttgaaatgtttaagaattaggcatgaaaaataaatttgagaaattttgtttccttacatgtatttttaaatcataagagttattttctatctgatgtaaaattagtttataaatcttaatcagcttctagatgtttattagcttttatgtcatgaaatgttggagtctcagggttgctgattttctgctaatgggaaaaattgactaagtctttaaaatagtttgcagccttctcccacaggagacaagtgaaagataagtgtgattttagatctttcttgtccatagttgttttcagtggagtcttccattctgtatcttaccctaagatctggttcttccctccccatccccaccccccacccaccgcctgccagctcacactaatagatgattcttaattgccaaatgtgttagagtttgtatatcctactcctgggccttacatgtcgcctgttggggcttaagaccaggttgataagtaggaactgaaagtcttccagattcccagtaaaaaattttatagacatttctgttaaagaaatatatcgattttatgtttttcaattatgttactgtaataccttggtacctgttcatggattattttat

SEQ ID NO: 187606 - DNA, 1598 bp, Homo Sapiens
  misc_feature (320)..(334): n is a, c, g, or t
acaaaaaagttggtacttttacgcctctaacctctcaagactaacattatattgtattgcatttgaacatcaatgagacctcagctaatacttcacatagattctagttagtctggaggttaaggggtaaatacgtccttttggtgttttcttcttggctgacacattagtttattattctgcttcaaatgaataaatttctgtgccagccaagattttaataaagaagctgggtaagtatatgagtattttttaaaaacctatttaatatcctaaaagtaaagcagtgaaattttaaggtgccgattaccatttatcannnnnnnnnnnnnnnggtaagtgaataattgagattaatagtcattttgcaatttgaacttctagaaaataactctgtgagtactgtagccatcactggtgctcatctcactctcagcctttcatggaggtgagttgctgaaggtgaattggctttttgccttgtggtggtagagaactggtgtatgttactcatggctttgctgttgaaactttacatgttcactggatgagtaattttgtttcacagatgcagcatttaaaatcctgaaccctatgactgtcccaagattttttaggctgaatagcaacaatgccttgatagagttcttgttggagggtactcctgagataagagaacattatcttgactctaaaaaagacgtagaccgtcatctgaaatcggcctgtgagcagtttattcagcagcagaccaagctgtttgtagaacagctggaggagttcatgacaaaggtttcagcgttaaaaacaatggccagtcagggaggccccaagtatactctctcacagcagccttgggcacaaccagcaaaggtcagtgaccttgcggcaactgcatataagacaataaaaacaaagctgcctgtgacattgagaagtatgtccttgtacctatccaataaagataccgagttcatcttgtttaaacctgtgaggaataatattcagcaagtcttccagaagttccacgctctgttaaaggaagagttcagccctgaagacatccagatcattgcctgtccatctatggaacagctgagccttctgctgtcagtttctaaataagcaggccagccgggctgtgcacctaaatgtctgtctgggaggagcaggctgagaagtcttgcagtctgcaggacaccgaggaatcgtatgtgggaacgtccccgagaaccacacgagcgtgctgctcagtgctgactgcagaatgaaatagaagcaaagtgttacaggatcagtgttttcttttctaaaacatcaaaatgccaaagattaatctgtgattggtgataactgcctcgtttaaatggtcacaagaaatgtgaagagagagctaggggcagacatgcagtgaaatggttctttgttaaaaatgtgcaataaaaatagattacaataagtagtgcaaagaactttacagaaatcaagcgaattagaaggcctgtaagagtaggtttgctaaacgtgaaacactgtaacacttttaacactgagcattccacagtgaaatgttatttctatgctcttatttaatgtaa

SEQ ID NO: 187607 - DNA, 2424 bp, Homo Sapiens
ttggctgctcctttaagcgtccacaggcggcggagcggccacaatcacagctccgggcattgggggaacccgagccggctgcgccgggggaatccgtgcgggcgccttccgtcccagtcccatcctcgccgcgctccagcacctctgaagttttgcagcgcccagaaaggaggcgaggaaggagggagtgtgtgagaggagggagcaaaaagctcaccctaaaacatttatttcaaggagaaaagaaaaagggggggcgcaaaaatggctggggcaattatagaaaacatgagcaccaagaagctgtgcattgttggtgggattctgctcgtgttccaaatcatcgcctttctggtgggaggcttgattgctccagggcccacaacggcagtgtcctacatgtcggtgaaatgtgtggatgcccgtaagaaccatcacaagacaaaatggttcgtgccttggggacccaatcattgtgacaagatccgagacattgaagaggcaattccaagggaaattgaagccaatgacatcgtgttttctgttcacattcccctcccccacatggagatgagtccttggttccaattcatgctgtttatcctgcagctggacattgccttcaagctaaacaaccaaatcagagaaaatgcagaagtctccatggacgtttccctggcttaccgtgatgacgcgtttgctgagtggactgaaatggcccatgaaagagtaccacggaaactcaaatgcaccttcacatctcccaagactccagagcatgagggccgttactatgaatgtgatgtccttcctttcatggaaattgggtctgtggcccataagttttaccttttaaacatccggctgcctgtgaatgagaagaagaaaatcaatgtgggaattggggagataaaggatatccggttggtggggatccaccaaaatggaggcttcaccaaggtgtggtttgccatgaagaccttccttacgcccagcatcttcatcattatggtgtggtattggaggaggatcaccatgatgtcccgacccccagtgcttctggaaaaagtcatctttgcccttgggatttccatgacctttatcaatatcccagtggaatggttttccatcgggtttgactggacctggatgctgctgtttggtgacatccgacagggcatcttctatgcgatgcttctgtccttctggatcatcttctgtggcgagcacatgatggatcagcacgagcggaaccacatcgcagggtattggaagcaagtcggacccattgccgttggctccttctgcctcttcatatttgacatgtgtgagagaggggtacaactcacgaatcccttctacagtatctggactacagacattggaacagagctggccatggccttcatcatcgtggctggaatctgcctctgcctctacttcctgtttctatgcttcatggtatttcaggtgtttcggaacatcagtgggaagcagtccagcctgccagctatgagcaaagtccggcggctacactatgaggggctaatttttaggttcaagttcctcatgcttatcaccttggcctgcgctgccatgactgtcatcttcttcatcgttagtcaggtaacggaaggccattggaaatggggcggcgtcacagtccaagtgaacagtgcctttttcacaggcatctatgggatgtggaatctgtatgtctttgctctgatgttcttgtatgcaccatcccataaaaactatggagaagaccagtccaatggcgatctgggtgtccatagtggggaagaactccagctcaccaccactatcacccatgtggacggacccactgagatctacaagttgacccgcaaggaggcccaggagtaggaggctgcagcgcccggctgggacggtctctccataccccagcccctctaactagagtggggagcatgccagagagagctcaatgtacaaatgaatgcctcatggctcttagctgtggtttcttggaccagcggcatggacatttgtcagtttgccttctgacggtagcttttggaggaagattcctgcagccactaatgcattgtgtatgataacaaaaactctggtatgacacattttctgtgatcattgttaattagtgacatagtaacatctgtagcagctggttagtaaacctcatgtgggggtggggtgggggtgtattccttgggggatggtttgggccgaatggggagtggaatatttgacatttttcctgttttaaattctaggatagattttaacatcctttgcggtcccagtccaaggtaggctggtgtcatagtcttctcactcctaatccatgaccactgtttttttcctatttatatcaccaggtagcctactgagttaatatttaagttgtcaataaaa

SEQ ID NO: 187608 - DNA, 2038 bp, Homo Sapiens
ttgggtttctatcatccttctgagtgccaccgtccccaacgcccttgagtttgctgactggattgggcggctgaagcgtcgtcagatctatgtgattagcactgtaacccgccccgtgcccctggagcactatcttttcacagggaacagctccaagacccagggggagctctttttgttgctggactcccgaggagccttccatacaaaagggtactatgcagctgtggaggccaagaaggagagaatgagcaaacacgcccagacctttggggccaagcagcccacacatcaggggggccctgcacaggaccgcggagtgtacctgtccctcctggcctccctccgcacacgtgcccagttgcccgtggtggtgttcaccttctcccggggccgctgtgatgagcaggcctcaggcctcacctcccttgacctcaccaccagttcggagaagagcgagatccacctcttcctgcagcgctgccttgctcgcctccgtggctctgaccgccagctgccccaggtcctgcacatgtcagagctcctgaatcgcggcctgggtgtgcaccatagcggcatcctgcccatcctcaaggagatcgtggagatgctcttcagccgtggcctggtcaaggtcttgtttgccacagagacctttgccatgggagtaaacatgcctgctcgtacagtagtgtttgactccatgcgcaaacacgatggctccaccttccgggacctgctccctggggagtatgtgcagatggcaggccgggcagggcggaggggcctggaccccacaggcaccgttatcctgctctgcaagggccgagtgcccgagatggcagacctgcaccgcatgatgatggggaagccgtcccagctgcagtcccagttccgcctcacgtacactatgatcctcaacttgctgcgagtggatgccctcagggtggaggacatgatgaagaggagcttctctgagtttccctcccgcaaagacagcaaggcccatgaacaggccctggctgaactgaccaagaggctgggagctttggaggagcctgacatgactggccaactggtcgacctgcctgaatattacagctggggggaggaactgacagagacccagcacatgatccagcgacgcatcatggagtctgtgaacgggctgaagtctctctcagcaggaagggtggtggttgtgaagaatcaggagcatcacaacgcatttggagtgatcctacaggtctcctcgaactccaccagcagagtattcacaaccctggtcttgtgtgataagcccttgtcccaggacccacaggacagggggccagccactgcagaggtgccctatccagatgacctcgtgggattcaagctgttcctgcctgaagggccttgtgaccacaccgtggtcaagctccagccaggagatatggctgccatcaccaccaaggtgctccgggtgaatggggagaagatcttggaggacttcagcaagaggcagcagccaaaattcaagtcagagatgctagggaggcccttctcctccagaggggcacgtagaggcagggaggggcagtggtctgggagtttcctccagcctgagggagaccatgaagtggtggggttgtagtgagggggctcccccagcctaagggagactgtgaagtggaggttgtagtaagagggcttccacagcctgagggaggcttctgggggagagaagatcttaccccagatcttaagatctgctccctcttcaggaaggatcctccccttgcagccgtgaccactgctgtccaggaactgctgcgtctggctcaggcccacccagccggacctcccaccctcgaccctgtcaatgacctgcagctcaaagatatgtcagttgtagagggtgggctccgggcccggaagctggaggagctgatccagggggctcagtgtgtacacagcccccgttttcctgcccagtacctgaagctgcgggagcgaatgcagatacagaaggagatggagcggctgcgcttcctac

SEQ ID NO: 187609 - DNA, 1126 bp, Homo Sapiens
  misc_feature (421)..(467): n is a, c, g, or t
ttggtttgacgtttatgcaattaaaccaggtcatcctttgcaaccagatttcttcttagatgaatacccagaagcagttagcaagaaagtggaatcaacatttagaattgttaaggactctctcagtgatgatgttgttaaagccactcaagcaatctatctgtttgaactctccggtgaagatggtggcacgtggtttcttgatctgaaaagcaagggtgggaatgtcggatatggagagccttctgatcaggcagatgtggtgatgagtatgactactgatgactttgtaaaaatgttttcagggaaactaaaaccaacaatggcattcatgtcagggaaattgaagattaaaggtaacatggccctagcaatcaaattggagaagctaatgaatcagatgaatgccagactgtgaagnnnnnnnnnnnnnnnnnnnnnnnnnnnnnnnnnnnnnnnnnnnnnnngctcaacagttaaaatctaatgtttgttttctttcctgttatattataaggatatgcacgtttgttctggaaaagatagaatttgtctctaaaagacttgaaattgtaattaaaatggcaagctaatcaaacataagcttcattaagtgggattctaagacagtctgtgtttttatatttcaagggtttaaccctttgagccttacatctcattcactgtctttctccaagaaaagtattttgggcggacagtcagatcaagcagtaaaattagctctttcaaatcttcttgtcatgtaaaatgaagctagtctgttttaaaatttttagttttggattgtatactaatgaaaatcttaatgatgtttttgatttttatatacttattttaaagaaaatcttatatagtacattttacaaaaattataaaaaatgaattagtactggcgaggactaaatgaaacaataatttttcattttgataactagctttccaggtggacttagccataggaaaatattactaatgtaatttaacaaattgctgcatgtattccatttaaaaatatgtttaaattgtcctaaaacaaaataattttctccctaggagtatgcatttggctacagtgttttgaaacagaaaccttagaataggtcat

SEQ ID NO: 187610 - DNA, 2462 bp, Homo Sapiens
accacaaccaccttgtgagttaatggcgggtccagggctcctagtggagcaccagttccacagactttaatagtctatggcagtgattaccttctctaccaaagaagcaaagtgcccaggaaggtgtgttgctttgagtacacacggcaagacaccttctcttctgaggagacgccctcctgtgttaggctgcatctgagcttgcccagtaaggaacatacatgcgataaagaggtctgaagaagtgactggcttgcctccagcaaatgacgtgtggttggaatcgtaagagctttattcaggctttgctgggtgtgtgcattctaggtgaagatgccagctgcttttctgcaaagtctgtggagcagtactatggctggaacattggaaaaaggagagccgctgagtggcaaagagcaatgacaatgcgaaaagtcttacaagaaatcctggagaagaatccgagatttcaccacctgactcccctcaaaaccaagcacatcgctcactggtgccgctgtcatggctacaccccaccggaccctgagagcctgaggaatgacggggactccatcgaggacgtgctgacccagatcgacagcgagcccgagtgcccatcatcattctcctctgctgacaacctctgccgcaaactggaggacctgcaacagttccagaaaagggaacccgagaatgaggaggaggtggacatcctcagcctctccgagccagtgaagataaacatcaagaaggagcaggaagagaaacaagaggaagtcaagttctacctgccaccaaccccagggtctgaatttattggggatgtcacacagaagattgggatcaccctgcagcccgtggcactccacaggaacgtgtatgcgtccgtggtggaggacatgatcctgaaggctacagaacagctggtgaatgatatcctgagacaggctttggcagttggataccagacagcttctcacaacaggattcccaaagaaattacagtgagtaatattcaccaggccatttgcaacattccttttctggacttcctcacaaacaaacacatgggaatattgaatgaggaccagtgagcggagtgaggtgccctggagaagcaggctttgaaggcacagcgaagctgtaactgaggaccctgctgcttgggaaggaggtggtttccagtgtgactcggcatgtcatggctacccaacctttgccgctgcctgttcccacgtgtcaccagcacgctgcactccagatgaaatcctcctaggacaggagtttgtttcctgagtgtggagtgaggctgtcagtggatccgtgctttgtcggccagcgtttctgcagtctttgtaaaggccccacgagagcgggccaggccgtgtgcctcaggcccttctccctgggtgtgcttaagggggctccttgggcccgcctccccaggaggtagaaaatgagtggcaggctagagatttcacccattttgtgggctggagttaccagtagctccagcagttaccctgaagagagattgggcttcagccttcagcaggtggttctctcccatgcctggccttggtgtggaggggctgtactctgagcccaagtgagtcagctataggaagaggccatacctagagccaagaaccatgaaggcctgagagacggcagactgagcagaattccttttttgagcacgagagcattactagaaccattgtcaaagcagtggcaagggacggagaggtcccaacaggagtcaggaagaggtttgattataaccaagaaaactcactatgctaggaatagactgtgtgcaccagtcccagacacttggcagaagtgtagcagcgttacacatgtgtgcgaagcagatcgcaggttccacgccatctgcatggcctgcaggagcttctgctgctgaccccatgctgagtggccagtggggagcggcgcccggcaggctcttctggggtcgtctgtcctatccgtggattgtatatactcttctctgttaaggagtttttcccaagaagaaaagtatttaaaagaaataccagtgagtgccttaaagttggagaagtaactgcccatgcccagaaataaggatgccagtgcccagaagcagtgagattagtctgtgtccacaagcagaggccccctcgatgggagggagtggcaggcaggagaaggtggcgctgccaggtgcccgggtctattggaggcgccccatctcagacttcctaacacagcctgtgtggaaggcagaacaaagaatgcatgcccagtcagaaatctgttctattctgctccaggaaaatcggaaacctgtgagtcagagtcagagaaacttacccaagcaacgtaattcctgttttcatgggtcctgtagatgtttgagtcaggaaggtaaggcggggagtgactgaataaactctgccttttaaattgagcatctg

SEQ ID NO: 187611 - DNA, 2008 bp, Homo Sapiens
  misc_feature (1689)..(1737): n is a, c, g, or t
ttggagaatattgtttttagtttctctataacaacaatacaaggcaacaaactgaagcaagagatgacctgcattgcccttggtgtactctgaactgccgcaaactttatagtttactcaagcatcttaaactctgccatagcagatttatcttcaactatgtttatcatccaaaaggtgctaggatagatgtttctatcaatgagtgttatgatggctcctatgcaggaaatcctcaggatattcatcgccaacctggatttgcttttagtcgcaacggaccagttaagagaacacctatcacacatattcttgtgtgcaggccaaaacgaacaaaagcaagcatgtctgaatttcttgaatctgaagatggggaagtagaacagcaaagaacatatagtagtggccacaatcgtctgtatttccatagtgatacctgcttacctctccgtccacaagaaatggaagtagatagtgaagatgaaaaggatcctgaatggctaagagaaaaaaccattacacaaattgaagagttttctgatgttaatgaaggagagaaagaagtgatgaaactctggaatctccatgtcatgaagcatgggtttattgctgacaatcaaatgaatcatgcctgtatgctgtttgtagaaaattatggacagaaaataattaagaagaatttatgtcgaaacttcatgcttcatctagtcagcatgcatgactttaatcttattagcataatgtcaatagataaagctgttaccaagctccgtgaaatgcagcaaaaattagaaaagggggaatctgcttcccctgcaaacgaagaaataactgaagaacaaaatgggacagcaaatggatttagtgaaattaactcaaaagagaaagctttggaaacagatagtgtctcaggggtttcaaaacagagcaaaaaacaaaaactctgaaaagctctaaccccatgttatggacaaacactgaaattacattttagggaattcatcctctaagaattatgtttttgtttttaatcatatgttccaaacaggcactgttagatgaagtaaatgatttcaacaaggatatttgtatcaggttctacttcacttcattatgcagcattacatgtatatcacttttattgatgtcattaaaacattctgtactttaagcatgaaaagcaatatttcaaagtatttttaaactcaacaaatgtcatcaaatatgttgaattgatctagaaattatttcatatataaatcagaatttttttgcatttatgaacggctgtttttctactttgtaattgtgagacattttcttggggagagaaaattggaatggttccctttttttagaaattgaagtggtcttcatatgtcaactacagaaaaggaaaaaaatagaaattgaaggatttttatgaaattatattgcattactatttgcagtcaaactttgatccttgtttttgaaatcatttgtcaattcggaatgaaaaattataatgtaattttacattacataagttccttttacaattaaaaaatagcacttcttcatcttatgcctgtttgagaagatattaaattttcacattgttgacagtgaaatgctatgttggtttataagattacagaccatttgttttcatgtggataattttagtgcattgctcacccggtatgnnnnnnnnnnnnnnnnnnnnnnnnnnnnnnnnnnnnnnnnnnnnnnnnnaattagataatcacacggaaaattaagctgttcatatctttaaattaggattgcaaaccaaggaaagaacgcatttgagattttaagatgtcacttataaggggagaagtgttcttaaaaagtcaaccagaaaactgttatgccttttatttgtttgcaaggatgtctttgtaatgtgtttcatgaatagaatatcccatagagataagctgacttgaatcattttgagcaattttgccctgtgttatatgtgtttcacgcacatatttgc

SEQ ID NO: 187612 - DNA, 1085 bp, Homo Sapiens
  misc_feature (525)..(533): n is a, c, g, or t
  misc_feature (687)..(704): n is a, c, g, or t
tttgtacaaaaaagttggatgtgtttcatccaaaaaaaatatccaatagagataagctgacttgaatcattttgagcaattttgccctgtgttatatgtgtttcccgcacatatttgcagttggattttctccaacagaaagtggattcactactggcacattaacaagcaccaataggtttttattccaactccgagcactgtggttgagtaacatcacctcaattttttattatccttaaagatattgcattttcatattctttatttataaaggatcaatgctgctgtaaatacaggtatttttaattttaaaatttcattccttctccttcagatgcagttccctattttgtttaatgaagggatatataagctttctaatggtgtcttcagaaatttataaaatgtaaatactgatttgactggctttaagatgtgtttaactgtgaggctatttaacgaatagtgtggatgtgatttgtcatccagtattaagttcttagtcattgatttttgtgtttnnnnnnnnntaggaaagagggaaactgcagctttcattacagattccttgattggtaagctctccaaatgatgagttctagtaaactctgatttttgcctctggatagtagatctcgagcgtttatctcgggctttaatttgctaaagctgtgcacatatgtnnnnnnnnnnnnnnnnnngattattttaggggagatgtaggtgtagaattattgcttatgtcatttcttaagcagttatgctcttaatgcttaaaagaaggctagcattgtttgcacaaaaagttggtgattcccaccccaaatagtaataaaattacttctgttgagtaaactttttatgtcatcgtaaaagctgaaaaaatccctttgtttctatttataaaaaaagtgcttttctatatgtacccttgataacagattttgaagaaatcctgtaagatgataaagcatttgaatggtacagtagatgtaaaaaaaattcagtttaaaagaacatttgtttttacattaaatgtttatttgaaatcaaatgattttgtacataaagttcaataatat

SEQ ID NO: 187613 - DNA, 938 bp, Homo Sapiens
ttggcgcattctactccgtttcacacacggtgctgctacctcgtttgcttcgtgcgtgcgtgcgcagatgtgggccccgcgggagcagctactgggctgggctgcggaagctctgcctgccaaggattctgcctggccctgggaagagaagcctagatatctgggaccagtgactttcgaggatgtggctgtgcttttcactgaggcagagtggaagagactgagccttgagcagaggaacctatacaaagaagtgatgctggaaaatctcaggaatctggtctcattggcagaatcaaagccagaagtccatacctgcccttcttgccctctggcctttggcagtcagcagttcctcagccaagatgagctacacaatcatcctattccaggtttccatgcaggaaatcaactccacccaggaaatccctgcccagaggatcagccacagtcacaacatccttctgataaaaatcacaggggggctgaagcagaagatcaacgagtggaaggaggcgtcagacccttgttttggagtacaaatgaaaggggggctttagtgggtttctctagcctgttccagagaccaccaataagctcttggggaggcaacagaatattagagatacagctcagtccagcccagaatgcaagctctgaggaagtagacagaatttccaagagggcagaaaccccagggtttggagcagtcacgtttggggagtgtgcactagcttttaaccagaagtcaaacctgttcagacagaaggcagtcacagcagaaaaatcttcagacaaaagcagtcacaggtgtgcagggagtgtgggcgaggctttagcaggaagtcacagctcatcatacaccagaggacacacacaggagaaaagccttatgtctgcggaagagtgtgggcgaggctttatagttgagtcagtcc

SEQ ID NO: 187614 - DNA, 1755 bp, Homo Sapiens
ttggagtagacggagccgcagtagacggatccgcggctgcaccaaaccactgcccctcggagcctgattttctggcatccttaaatcttgtgtcaaggattggttataatataaccagaaaccatgacggcggctgagaacgtatgctacacgttaattaacgtgccaatggattcagaaccaccatctgaaattagcttaaaaaatgatctagaaaaaggagatgtaaagtcaaagactgaagctttgaagaaagtaatcattatgattctgaatggtgaaaaacttcctggacttctgatgaccatcattcgttttgtgctacctcttcaggatcacactatcaagaaattacttctggtattttgggaaattgttcctaaaacaactccagatgggagacttttacatgagatgatccttgtatgtgatgcatacagaaaggatcttcaacatcctaatgaatttattcgaggatctactcttcgttttctttgcaaattgaaagaagcagaattgctagaacctttaatgccagctattcgtgcatgtttggagcatcgacacagctatgttagaagaaatgctgttttggccatctataccatctatagaaattttgaacatcttatacctgatgctcctgaactgatacatgattttctggtgaatgagaaggatgcaagttgcaaaaggaatgcatttatgatgctaattcatgcagatcaggatcgagctttggattacttaagtacttgcattgatcaagttcaaacatttggagacattctgcagctggttattgttgaactgatttataaggtctgtcatgctaatccatcagaaagagctcgttttattcgctgcatctataacttattacagtcatccagccctgctgtaaaatatgaagctgctgggacattagtgacactctctagtgcaccaactgcaatcaaggctgctgctcagtgttacattgatttaattattaaggagagcgacaacaatgtaaaactcatagttttggatcgcttgatagaattaaaagagcatcctgctcatgaacgagtactacaggatctggttatggatatcctaagagtattgagcacaccagacttagaagtacgaaagaaaactctgcagttagcactggatcttgtctcttctagaaatgttgaagagctggttattgtcctgaagaaggaagtgataaaaacaaataatgtgtctgagcatgaagatactgacaaatacagacaactcctagtgcgaacattgcattcctgttctgtccgatttccagatatggctgcaaatgttattcctgtgttaatggaatttctcagtgacaacaacgaagcagcagctgctgatgtcttggagtttgttcgtgaagccattcagcgctttgataacctgagaatgcttattgttgagaagatgcttgaagtctttcatgctattaaatctgtcaagatttaccgaggagcattatggatcctgggagaatactgtagtaccaaggaagacattcagagtgtgatgactgagatccgcagtcccttggagagacctcccttgagaggattccttctggatggagatttctttgttgctgcctcccttgccacactctgaccaagattgcattgcgctatgtagctttggttcagagaagaaaaagcaaaattcttttgttgctgaggctatgttgctcatggctactatcctgcatttgggaaaatcctc

SEQ ID NO: 187615 - DNA, 1703 bp, Homo Sapiens
ctttgtacaaaaaagttgggctaatccatcagaaagagctcgttttattcgctgcatctataacttattacagtcatccagccctgctgtaaaatatgaagctgctgggacattagtgacactctctagtgcaccaactgcaatcaaggctgctgctcagtgttacattgatttaattattaaggagagcgacaacaatgtaaaactcatagttttggatcgcttgatagaattaaaagagcatcctgctcatgaacgagtactacaggatctggttatggatatcctaagagtattgagcacaccagacttagaagtacgaaagaaaactctgcagttagcactggatcttgtctcttctagaaatgttgaagagctggttattgtcctgaagaaggaagtgataaaaacaaataatgtgtctgagcatgaagatactgacaaatacagacaactcctagtgcgaacattgcattcctgttctgtccgatttccagatatggctgcaaatgttattcctgtgttaatggaatttctcagtgacaacaacgaagcagcagctgctgatgtcttggagtttgttcgtgaagccattcagcgctttgataacctgagaatgcttattgttgagaagatgcttgaagtctttcatgctattaaatctgtcaagatttaccgaggagcattatggatcctgggagaatactgtagtaccaaggaagacattcagagtgtgatgactgagatccgcaggtcccttggagagatcccaattgtagagtcagaaataaagaaagaagctggtgaattaaaacctgaagaagaaataactgtagggccagttcagaaattggttactgaaatgggtacctatgcaactcagagtgcccttagcagttctagacccaccaagaaagaggaagacagacctcccttgagaggattccttctggatggagatttctttgttgctgcctcccttgccacaactctgaccaagattgcattgcgctatgtagctttggttcaggagaagaaaaagcaaaattcttttgttgctgaggctatgttgctcatggctactatcctgcatttgggaaaatcctctcttcctaagaagccaattactgatgatgatgtggatcgaatttccctgtgcctcaaggtcttgtctgaatgttcacctttaatgaatgacattttcaataaggaatgcagacagtccctttctcacatgttatctgctaaactagaagaagagaaattatcccaaaagaaagaatctgaaaagaggaatgtgacagtacagcctgatgaccccatttccttcatgcaactaactgctaagaatgaaatgaactgcaaggaagatcagtttcagctgagtttactggcagcaatgggtaacacacagaggaaagaggcagcagatcccctagcatctaaacttaacaaggtcacccaattgacaggtttctcagatcctgtatatgcagaagcttacgttcatgtcaaccaatatgatattgtcctggatgtactttgttgtgaaccaaacagtgatactttgcagatttgcacattagaactacctacactagggatctgaaacttgtggaaaagccgtcttccttgactcttgctcctcatgacttcccaaatataaaagctaacgtcaaattagccatcaacaaaaaatggaa

SEQ ID NO: 187616 - DNA, 2767 bp, Homo Sapiens
tcagcggtccagtctccagcttgcaggcgtgcacattggggtgggacgatgggtggccccgcaggtgtacacatttgggtggccccggcccatataccccagtgttatctttgatccagtcccgaaacagagggagccttgtgtacacgcctggcttgttcctctgagcgcagccgtctccccagctcaccacaccggcctggaagatccgcccatccgcctccacgctggacaggggtcccccggaatcaccctggcaggagtccacgccgccgctgaggaagcccacgcacatcatgcgcggcgtgatctgctgcggcaggaggttctcgcaggtggtctggttgatgacgcggatctcacccttttgcaggatcagcgcgccagtgcctccatactgggtgtgtccccagcccgtgacccagatggccttgccggcagggaagacatgggaggcgtccggcaggcagatgggccgcaccatggagctgtactctgccggtttctccagctccagcagcgcgatgtcatagtcgaaggtgaagtcattgaagaaggggtgggagatgatgcgcttgagcctgcgctcctgcaccccaggggcgctgcgctggctctggtcgtgcaagcccaggaaggccgtccactgcgtggggtctgagtacctgaatcctctgtcatcgatgtagcagtgtgcggcagagaccagccagttgggagagatgagggaagcaccgcagatgtggccctggcccagagcatgcaggcttacctgccagggccactcgccctcatccgcatccgtgcccccaacaacacgagcctgtctcgtgaatgaccgcagcccacagtcgcagtccttctcatctgagccgtcgctacagtcctccttcccgtcacactcagggttgcccttgctcaagcagagcccattgaggcagcggtaggtgtgtttggtacaagtgacgacgttcaccttggggcaggaggcctcgtcggacccgtccccacagtcgtccttcccattgcactgctggcttttcgagaggcacttcccattggaacacctgaaggtctgggccggacaactgcacccctgctcgtcgctgttgtctccgcagtcgttcacactgtcgcagacccagaagaggggcttgcagaacttgttcttgcacgtgaactggtggccggcgtcgcaactgcagttgagctcatcgctgtggtcggtgcagtcggcccagccatcacagcgcagctccttccggatacaccgccccgtgcggcacgtgaactgccccgggcatgggtcactggagtcgtaggagaggtattcagctaagaagccggtgtcggtgtaggactgatctgagtggaagcgaactgtgatcttgttgctgttgctggtgacgacgaactgggacctctctccgcagtatttctccccgttgatctccacgtagtccttggggcaggtgcccgcaggcacgccgggctccagcaggtagaagaatttgaagcgcaccttcacatgctggttgttgggcacctcaatgttccatgtgcagtcaatgttgggtgggtagtggcctgggtagtaggggctgttgaatgtcccctgggctttacgtaagcggcctccacagctgctcatcctaggcagctggaagaaggtggcctcaaagccgggatgccgccgctcagtgttggttatcagtgtgatgagcaggacgttctgggaggagtggaaggtcaggttgtaggagggagggtaggtgccacacaactgcaccagggcgtggggctccatggggctcagggtgttgtacaccgtcaccaggtcgctgccgcgctcgtcgcaggacgcaaggtcaaagctgcggaaggtgaggctcagcactgagtcggcgtccccccgcagggcccactggcagcgggcatgagcggggtaggggctgtcagggaagccgggcgtggtgaagcgcatcagctccacaccgcgggcgtgcaggccaaagctgcagctgttgtcctgggtcctctgtactgttttggagtccgtggggaaagccaccactgaggtgaccacaaaggacttcagggagcgcgcccgcgggggcagcatgactacgcgctcctcggccatgacgcgctcggcctcctccaccaggtgctgcgggatgctgaactcagaccagtagtaggcgatgacgctgccctcgctgaaggccgtcacagccgactccttgtggtaggggcccaggaatgggactccgctgtacagcagcttcagcgcgtccttcaccttgctggccaggcttacaaactcagtggagttggagttctcgtaggcatccacaaaattctcatttgtgatcctcatgtagccattgaagaccttctggacacgcacgtcccggtactgcaaatgccacaccaggaagccgatccccagcaagaccaagaggaggccgatcagcacggctgccagcaccacccagcgccccgggccatgcttttccaccttcttgacgttgttgactggcaggaactccacgccttcctccaagccattcactttctcgtgccgggagttgtacttgagtcccgcgccgaagtccttcgggccccctccgcccttgcgggcccgatcgctccccatggtccccgaggccgctcgcgggtctcacaggcgtcgtccctgccggcggccggctcccatggcccgcagggcgcggggcgcggggcgcaggcggcgggattccgccaa

SEQ ID NO: 187617 - DNA, 931 bp, Homo Sapiens
ttggcttaacaagattactggtttgttggcatccaaagctgttggggttgatggtgctgaaaaaaaggaagactacaatgaaacagctccaatgctggagcaggtatgaaatggtagcatttgatttttttcaaggttcccactggaatgatcacggagctctagtatctacgtaattgaaattccccttttgatcagatatgggaataggaagctaattaattgatgatatatttttaactctgccttctccaaggtatacagataactacagacttcattagtgtttgatttcatagactggcattaaagcctttgtctccaaaatttgaaggcctggagacaggcatcccagggtataagcttccagctggatcacctttaactagcttacaaaaagacccttacacaaatactttccatttgtgagttaaaacagggttttttgacatcgaataaagcttcttttgtaagaagtttcttttatattgtaacaattggtgttgttagactgactatgtgttttatgaattgatcaatgagccatacatttttgctaggatgtatattttaataactacaaaaaaagagagtttaaaaaactattaagggtctgtctttaaaccacctaatagaggaatttaaaagtgaaggttgcagttgctagattttgccttggctaccttcagattcccacaatacttgtacataatgaactgtgcatgcttttacattctctaagggcttaacttcttaggcactgtaagactataagaacgcagtaatagccataactggatttccttggttctcctgttttaaaatctgagccttaatgtagttttaatatatcctttttgtattacttttctttattagtagcctaataaaagaagactttgagtatctttgctctcctctagatgcgttt

SEQ ID NO: 187618 - DNA, 3854 bp, Homo Sapiens
  misc_feature (3608)..(3665): n is a, c, g, or t
ttggctggcctccgccgcgcgctcctcctcgtcccagcgctagcgggggcgcggttcctttttgcgagctttccgagtgccaggcgccggccggctgcgaagacgcggtgggccgcccctccgattgaaatcacagaagatattcgtgttcttcttaagagaaaaagaggacatttaaaaacgctatggcaaagagaataaaagctaagcccacttcagacaaacctggaagtccatatcgctctgtcacacacttcgactcactagctgtaatagacatccctggagcagatactctggataaattatttgaccatgctgtatccaagtttgggaagaaggacagccttgggaccagggaaatcctaagtgaagaaaatgaaatgcagccaaatggaaaagtttttaagaagttaattcttgggaattataaatggatgaactatcttgaagtgaatcgcagagtgaataactttggtagtggactcactgcactgggactaaaaccaaagaacaccattgccatcttctgtgagaccagggccgaatggatgattgcagcacagacctgctttaagtacaactttcctcttgtgactttatatgccacacttggcaaagaagcagtagttcatgggctaaatgaatctgaggcttcctatctgattaccagtgttgaacttctggaaagtaaacttaagactgcattgttagatatcagttgtgttaaacatatcatttatgtggacaataaggctatcaataaagcagagtaccctgaaggatttgagattcacagcatgcaatcagtagaagagttgggatctaacccagaaaacttgggcattcctccaagtagaccaacgccttcagacatggccattgttatgtatactagtggttctactggccgacctaagggagtgatgatgcatcatagcaatttgatagctggaatgacaggccagtgtgaaagaatacctggactgggaccgaaggacacatatattggctacttgcctttggctcatgtgctagaactgacagcagagatatcttgctttacctatggctgcaggattggatattcttctccgcttacactctctgaccagtccagcaaaattaaaaaaggaagcaaaggagactgtactgtactgaagcccacacttatggctgctgttccggaaatcatggatagaatttataagaatgttatgagcaaagtccaagagatgaattatattcagaaaactctgttcaagatagggtatgattacaaattggaacagatcaaaaagggatatgatgcacctctttgcaatctgttactgtttaaaaaggtcaaggccctgctgggagggaatgtccgcatgatgctgtctggaggggccccgctatctcctcagacacaccgattcatgaatgtctgcttctgctgcccaattggccagggttatggactgacagaatcatgtggtgctgggacagttactgaagtaactgactatactactggcagagttggagcacctcttatttgctgtgaaattaagctaaaagactggcaagaaggcggttatacaattaatgacaagccaaaccccagaggtgaaatcgtaattggtggacagaacatctccatgggatattttaaaaatgaagagaaaacagcagaagattattctgtggatgaaaatggacaaaggtggttttgcactggtgatattggagaattccatcccgatggatgtttacagattatagatcgtaagaaagatctagtgaagttacaagcaggagagtatgtatctcttgggaaagtagaagctgcactgaagaattgtccacttattgacaacatctgtgcttttgccaaaagtgatcagtcctatgtgatcagttttgtggttcctaaccagaaaaggttgacacttttggcacaacagaaaggggtagaaggaacttgggttgatatctgcaataatcctgctatggaagctgaaatactgaaagaaattcgagaagctgcaaatgccatgaaattggagcgatttgaaattccaatcaaggttcgattaagcccagagccatggacccctgaaactggtttggtaactgatgctttcaaactgaaaaggaaggagctgaggaaccattacctcaaagacattgaacgaatgtatgggggcaaataaaatgttgttgtcttattgacagttgtgcaggaggtagcctggtggttttcaacctctagaattttaagcctttgttgaactgttagaatgtaaggtatatcattctaaagatagagtaaaaagaaaacaaaaccaaaagttattaaaattgttgtccggtttactttaacttagttttgcatagttctagtgcagctgaaattgaaaagttatttccctttagctgtgttattatagagcagaaattctgtttttaaaaattagcctaagatatacttgtttttgtaaagaaaaatatttaatgttgaacaaaataaattggagttggagtagaatgtagtttgaggaaatttgcagcttccaatgcctcttgtcttcctatttcagaagtttaaatattaagcatgacagaaaatatgtattaacactactcaaagcaaaagtgctgcagggctttaaaattctcttccaaccatttatcttgaaggaaaaattcaatagtaatataatacacaaaatcaaataataccttagaaggtattaagattataattgttgcataggttagatatagagtcattgtaatgttgtgaataattacagtgcctaaaataagaatagaacaacatatacaacaccaaaaaatatctagtaatatatttaaagggaaattgagctgctttttttgaaactttgagatctaaaaataactgtaattatttgaatgactaagaggaaagtacattttttgaaatgctgaaaattgcctttctgtgtttattcaaactgaaaagctgagaccaagagcaaggaaggtaaaaagttaacaggcaaacattttctcttagaaaaggtgataaaatcataagtatttggaattagaacccttgcacagcactgaacctgggaaagagatttaaactctgaatttatctttgataacagggattgattttaaaatgtacatgtattaaattacatttgtaatttaaggtctgtttgctgttgctgattttattcttgatcagtagtttgcatttcagaaagcctttcattttgctttaattttagcaaagcgggttataatgaatgacttccccaatatcttgcttgaacttacaggtgattaacttggatgagttttgggaagttaaagggaagaaaacactgttatcattttttcctgtttgggaagagcttagaaactggaaatactagatttgggagaagggcagagttacttgataagggactgatgtttgtgcagtaacttgggagtgtggtttctttttgaatctttaattaaaacctgggattatatatccctgataaatattcacacttgaaccatagttactgtaaaatgcaaaaaatcttaatactgttattctttgcactttttcttaatcnnnnnnnnnnnnnnnnnnnnnnnnnnnnnnnnnnnnnnnnnnnnnnnnnnnnnnnnnnacagatgtgggccaccattgcaacaaaatacattctttttgctctaaaatatttatgaagaaaatacttaaatgttatgtatatggtggtaataagggaaaatcaagtattataaacaagaatgaaggtttttgtaaagatttctgttcagcgttttgcaggtaaaattttaggcaagttttccctgaa

SEQ ID NO: 187619 - DNA, 685 bp, Homo Sapiens
ctttgtacaaaaaagttgggtaccaacaatccatttggcttttatattactgtaagatgttataatgttaatgtggatgtagtgcttttactttacagattgattggaataagattattgcatatgaatttacccacaggactctgaatcatgttacccactcccctcacaatgttgtccacttagtgagttgcattgatctatccgtaccaaatgatgttgaataattacatatctttcttgactatactgatttcttattttggtcactattactaaatctctgttaatattctctcttttaactgaaaagggatgggatagaagggtttgcaatgccatattattggtggagggctgttttaacatctttgaagtatggcttgctgaatatctttaccaacatcttgaatatatattctagtgtccacaagatttagcaaaaagataaagcttgggtggaatatcattttaaaatgttcatgttctgttctatattttcttcacctactctccaaatattgtaatgcaaaaagtctcagtaatgatttggtagtattaattttgtggtcattgtttctcttcgataaatttattttcattaaatacttattagagggttttgaaatgtttttcaaatatgtgaaatgtgaaactgctgtcttttatattaaagtaattaaag

SEQ ID NO: 187620 - DNA, 1828 bp, Homo Sapiens
ttggctaaaaaatattattaatgctgatcgggagtcccacactcatgtctctgtagtgattagtttctgtcgacattgtggagatgatattgctggacttgtaccaaggaaagtaaagagtgctgcagagaagtttaatttgagttttcctcctagtgagataattagtccagagaaacaacagcccttccagaatcttttaaaagagtactttacgtctttgaccaaacacctgaaaagggaccacagggagctccagaatactgagagacaaaacaggcgcattctacattctaaaggggagctcagtgaagatagacataaacagtatgaggaatttgctatgtcttaccagaagctgctggcaaattctcaatccttagcagaccttttggatgaaaatatgccagatcttcctcaagacaaaccaacaccagaagaacatgggcctggaattgatatattcacacctggtaaacctggagaatatgacttggaaggtggtatatgggaagatgaagatgctcggaatttttatgagaacctcattgatttgaaggcttttgtcccagccatcttgtttaaagacaatgaaaaaagttgtcagaataaagagtccaacaaagatgataccaaagaggcaaaagaatctaaggagaataaggaggtatcaagtcccgatgatttagaacttgagttggagaatctagaaattaatgatgacaccttagaattagagggtggagatgaagctgaagatcttacaaagaaacttcttgatgaacaagaacaagaagatgaggaagccagcactggatctcatctcaagctcatagtagatgctttcctacagcagttacccaactgtgtcaaccgagatctgatagacaaggcagcaatggatttttgcatgaacatgaacacaaaagcaaacaggaagaagttggtacgggcactcttcatagttcctagacaaaggttggatttgctaccattttatgcaagattggttgctacattgcatccctgcatgtctgatgtagcagaggatctttgttccatgctgaggggggatttcagatttcatgtacggaaaaaggaccagatcaatattgaaacaaagaataaaactgttcgttttataggagaactaactaagtttaagatgttcaccaaaaatgacacactgcattgtttaaagatgcttctgtcagacttctctcatcaccatattgaaatggcatgcaccctgctggagacatgtggacggtttcttttcagatctccagaatctcacctgaggaccagtgtacttttggagcaaatgatgagaaagaagcaagcaatgcatcttgatgcgagatacgtcacaatggtagagaatgcatattactactgcaacccacctccagctgaaaaaaccgtgaaaaagaaacgtcctcctctccaggaatatgtccggaaacttttgtacaaggatctctctaaggttaccaccgagaaggttttgagacagatgcgaaagctgccctggcaggaccaagaagtgaaagactatgttatttgttgtatgataaacatctggaatgtgaaatataatagtattcattgtgtagccaacctcttagcaggactagtgctctaccaagaggatgttgggatccacgttgtggatggagtgttagaagatattcgattagggaatggaggttaatcaacctaaatttaatcagaggcgcatcagcagtgccaagttcttaggagactttacaattaccgaatggtgagcagctgttattttcagactctgtattcttttacctcattt

SEQ ID NO: 187621 - DNA, 1531 bp, Homo Sapiens
  misc_feature (1199)..(1225): n is a, c, g, or t
actttgtacaaaaaagttggcaaatgtataaacctgaaaagtaccaatactttttgcacatagatcaaaatagagtggagaatttgggctccaaaaatcaggttagtaggctcatttccatgtgcttaaaaatgtttttgttgttatgcattgattaagggctagagcaaatataaaattaaatgtctttttcctccaaataattggttattaatggtaaaatgttggacttggggattactgagattagtatgtgggtagtaaagaattggagtgggagttagtggggagggatgacaaagcttcagctttggtttttgtatttttttagtcttcataacagctacatttctgttgctcttattggccagataaatgtgttatattaaaccaggtaagtattttaaacagagaacattttatttgcatatatccctacaaattggcccattttattgggtggggggataaaaaagggattccctaactttaaataatcagaatatcctgcaattgaaaggagaaaaaaatccaattttgtcagtattttcttagtctgaaaaaaacagcagtagtaatctggtgaatgttattattaggagtgttctgcctctacagtggcatattccatgacattaatagaaaacccttctttcccacccctccccatcttgacattttcttttttaggatgttggttcctgcaaacaagaactgaccctatcacctctgcctcacagtgggtaaatatatcatacatctcttgaaagggaaaatatccatgtcagtttctttcacagtagaagaatggctgcttttgaatggggaggaaagaagacatttttcttaatatcctttttgtcccatctctaaaatgtataaatattttgatttggttttactttaatttctcattcataatttcgcaactgtccttttgggttgccctccaacacattacttccatttcagaaaccatatctgatttaatataaactgctaacttaagaagaggtgaatttgcatttacacttagacactttctaaaaacagggtgaacttaattgaaatttttcagtgttgttaagctattgttatagtagctgccctatagttacaaaaataaaaactataaaaacccatcccctatctacttaatccagatagcctggatttaacaaaaccaatagtataaaaannnnnnnnnnnnnnnnnnnnnnnnnnnagagagagagtacttgattcattaaaaagtcctggaaacagctgttctaggatcttgtcatttttactaaaagtctcgtgcacatgtgaagtgccctctgagtttaagggtttggttaatactggtatatttttataagattgaaattgtgtccccatctttaacttaaacattttcattatcagggtcaatgtgctagaactgaattgtaacatttttagggcacagatggaaaaaaatgttattggctccttgaaaatgtgtgtgtgtggcgaggggaatagatccacaaaagcatgtatgtac

SEQ ID NO: 187622 - DNA, 1347 bp, Homo Sapiens
actttgtacaaaaaagttggatttgaggatcattgtgcccctagaggtgccattagcagaatttgccaagatccgagaaaaattttagctttagttctatttcagcagtcacctgacgtccttgtctatggtcttaaaaacaagaaggcacacatttgagaagatgagattaaggttaggagaaaacctcagtcattgcatgctttttagtatgggccaataaaatctcaacacctgtgggagagtaagaactaagggaatgagtttgggcggcccctcataaaggaccttagaggcagggaacagcaatgccaaatttccctctctcgtgagatgggggatcctgtgcaggctgatgaggcacccatgagaaaagccgaaaaagcatgcatcttagaaatagcccctcaattccaggagtcaacatgccaaagaatgaggctggagacaggtagctccgagggaggacttctggcatgagatctcggcacggcaagcccagcatcgcctcagcccagacaggctccaccaggagatcaagcaagggctgcctttcaggagtcacctcctgagccacttcagagttctggaagtgaccacggaccagggtggaggaatagacttctagttcattctgggacacttgagccagagagttgaaagcttggaaagaccagataagaaacctgccctttgtctccctagggacatgagacaccacattccatttgtgctagaaaaacctatccactgatgagtctaactgttccaaacgcctcccacctggtgtgcacagctgcctgggtccattgtcacttgggtgcatcaggttgtcctccgatttttagatgagtttcctgtctagagatgtcctagtctgctcactggctggtggcagtagggtaccctgcgtcctcgaaaagccagagggttcacctagtcagacgaaactccagaacagtgcttgtggagggcctgactgtcctgctcacccacagccgatctgctgcaggtcagcaactgtgtcgtgagcagctgccaaccaccagcctttctggtgctgttctccagttcacgtctgccagctggtgagggcagaggcagacctggtcagacccagcgcccctcctccctgagggagcatggcacagcctcacacttgaaagacggtgtttggtttcccatctaatcaacttaagggaagccggcatgtacccttcaaggccctgtcaccacctatttcctgatcagttggtataaactgagggtggcttttagagacccagacttggttggcagcgctgccatggaacaccccagcaagcacctcccaccctgcttttcgga

SEQ ID NO: 187623 - DNA, 1232 bp, Homo Sapiens
  misc_feature (418)..(438): n is a, c, g, or t
ttggcacacgggcaccttctggctgacccggatcgtgctcctgaaggccctagccttcgtgtacttcgtggcattcctggtggctttccatcagaacaagcagctcatcggtgacagggggctgcttccctgcagagtgttcctgaagaacttccagcagtacttccaggacaggacgagctgggaagtcttcagctacatgcccaccatcctctggctgatggactggtcagacatgaactccaacctggacttgctggctcttctcggactgggcatctcgtctttcgtactgatcacgggctgcgccaacatgcttctcatggctgccctgtggggcctctacatgtccctggttaatgtgggccatgtctggtactctttcggatgggagtcccagcttctggagacggggttnnnnnnnnnnnnnnnnnnnnntctgtggacgctgtcaaggctgccccagcatacccccacatcccggattgtcctgtggggcttccggtggctgatcttcaggatcatgcttggagcaggcctgatcaagatccggggggaccggtgctggcgagacctcacctgcatggacttccactatgagacccagccgatgcccaatcctgtggcgtactacctgcaccactcaccctggtggttccatcgcttcgagacgctcagcaaccacttcatcgagctcctggtgcccttcttcctcttcctcggccggcgggcgtgcatcatccacggggtgctgcagatcctgttccaggccgtcctcatcgtcagcgggaacctcagcttcctgaactggctgactatggtgcccagcctggcctgctttgatgacgccaccctgggattcttgttcccctctgggccaggcagcctgaaggaccgagttctgcagatgcagagggacatccgaggggcccggcccgagcccagattcggctccgtggtgcggcgtgcagccaacgtctcgctgggcgtcctgctggcctggctcagcgtgcccgtggtcctcaacttgctgagctccaggcaggtcatgaacacccacttcaactctcttcacatcgtcaacacttacggggccttcggaagcatcaccaaggagcgggcggaggtgatcctgcagggcacagccagctccaacgccagcgcccccgatgccatgtgggaggactacgagttcaactgcaagccaggtgaccccagcagacggccctgcc

SEQ ID NO: 187624 - DNA, 1055 bp, Homo Sapiens
  misc_feature (604)..(667): n is a, c, g, or t
ttggctgctttcctgggtcatctgaactttaaaagagtcaatagaattatgagtttttaaattgctatgtaataaatgatagcctcagtggttttttactgttttctcctgtgattcttgacttccgttgggcttcggcactgctaaaagaaatttaaggtcaatgtttgacttttgtctgttagaagaactgcaatgtcacttttcttataggggatgtagaaattctcgacagtcttgaaggataactatatagagcctagcagtttttatctagtttttaaaattatttattagagaaataacataaaacaacttttaattaagaaaaaatgaacaaaaatcccaccactctttgaatttgttcttcagatcttagttcatgcacatgtataaagcatactcaaaaggatttattctttattttaagctgaatcaagtagctgacttttttctcattggtgtttagatattagttgccgctttgacattctttcttgggaaagatgaagatgaaaaacaggacagtgactccgaatctgaggatgatggaccaacagcaagagacctgctagtacaatatgctacagggaagaaaagttcnnnnnnnnnnnnnnnnnnnnnnnnnnnnnnnnnnnnnnnnnnnnnnnnnnnnnnnnnnnnnnnnccagaggtgtttaacttttcagccattcacttgattcatgatccccaagattttgcggaaaaactactaaagcagcttgagtgctgtaaggagaggtttgaagtgaagatgatgctcatgaaccttatctccagattggtgggaattcatgagcttttcctcttcaatttctatccctttttgcaaaggtttctgcagccccaccaaagagaagtaaccaagatccttctgtttgctgcacaagcatctcatcacctagtacccccagagattattcaatcattgcttatgactgtggcaaacaattttgttaccgacaagaactctggagaagtcatgacagtaggaatcaatgctataaaggagataacagctcgatgtcctctgg

SEQ ID NO: 187625 - DNA, 1362 bp, Homo Sapiens
ttgggggatggcgcattttcttgcaccaactaatgcggtgtcgctggcggctgaggagggcggagagttctgtggtgaaatagtgggaaggattcatgtaggcatcgggaagagcctaagtccacattataaaataggaagttgatgcggggtacagttactcccggaccggcggcgtgaaagtcgtgatatcatcgttgaactattagctttgaagtttaaatccaatggagaagactcaagaaacagtccaaagaattcttctagaaccctataaatacttacttcagttaccaggtaaacaagtgagaaccaaactttcacaggcatttaatcattggctgaaagttccagaggacaagctacagattattattgaagtgacagaaatgttgcataatgccagtttactcatcgatgatattgaagacaactcaaaactccgacgtggctttccagtggcccacagcatctatggaatcccatctgtcatcaattctgccaattacgtgtatttccttggcttggagaaagtcttaacccttgatcacccagatgcagtgaagctttttacccgccagcttttggaactccatcagggacaaggcctagatatttactggagggataattacacttgtcccactgaagaagaatataaagctatggtgctgcagaaaacaggtggactgtttggattagcagtaggtctcatgcagttgttctctgattacaaagaagatttaaaaccgctacttaatacacttgggctctttttccaaattagggatgattatgctaatctacactccaaagaatatagtgaaaacaaaagtttttgtgaagatctgacagagggaaagttctcatttcctactattcatgctatttggtcaaggcctgaaagcacccaggtgcagaatatcttgcgccagagaacagaaaacatagatataaaaaaatactgtgtacattatcttgaggatgtaggttcttttgaatacactcgtaatacccttaaagagcttgaagctaaagcctataaacagattgatgcacgtggtgggaaccctgagctagtagccttagtaaaacacttaagtaagatgttcaaagaagaaaatgaataatgttaagccattcttgattggacctcatagcttattttagttaatcttttttttgtcttttagccttaccaccttttaaaaaatttgttattctccagaaacagtaaataggtgagtaggggtggtgcaagtgaattcgttttcatttagaagcccctctgtacagataatcaaaattcaaagttgaaagaatcaaaaagcagccacagttatgtaggtctgatttgaatgt

SEQ ID NO: 187626 - DNA, 911 bp, Homo Sapiens
ttgtacaaaaaagttgggtggttgcggagctggtaagaatcatattctaagaactcagccactcaggtatccaccatggtgctgggtcctgaacagaagatgtcagatgacagtgtttctggagatcatggggagtctgccagtcttggtaacatcaaccctgcctatagtaatccctctctttcacagtcccctggggactcagaggagtacttcgccacttactttaatgagaagatctccattcctgaggaggagtactcttgttttagctttcgtaaactctgggctttcaccggaccaggttttcttatgagcattgcctacctggatccaggaaatattgaatccgatttgcagtctggagcagtggctggatttaagttgctctggatccttctgttggccacccttgtggggctgctgctccagcggcttgcagctagactgggagtggttactgggctgcatcttgctgaagtatgtcaccgtcagtatcccaaggtcccacgagtcatcctgtggctgatggtggagttggctatcatcggctcagacatgcaagaagtcattggctcagccattgctatcaatcttctgtctgtaggaagaattcctctgtggggtggcgttctcatcaccattgcagatacttttgtatttctcttcttggacaaatatggcttgcggaagctagaagcattttttggctttctcatcactattatggccctcacatttggatatgagtatgttacagtgaaacccagccagagccaggtactcaagggcatgttcgtaccatcctgttcagctgtcgcactccacagattgaacaggctgtgggcatcgtgggagctgtcatcatgccacacacatgtacctgcattctgccttagtcaagtctagac

SEQ ID NO: 187627 - DNA, 1198 bp, Homo Sapiens
ttggggaagaagcagctgaagacggaggcagctccacactgtgaactaaaatcatattctaagaactcagccactcaggtatccaccatggtgctgggtcctgaacagaagatgtcagatgacagtgtttctggagatcatggggagtctgccagtcttggtaacatcaaccctgcctatagtaatccctctctttcacagtcccctggggactcagaggagtacttcgccacttactttaatgagaagatctccattcctgaggaggagtactcttgttttagctttcgtaaactctgggctttcaccggaccaggttttcttatgagcattgcctacctggatccaggaaatattgaatccgatttgcagtctggagcagtggctggatttaagttgctctggatccttctgttggccacccttgtggggctgctgctccagcggcttgcagctagactgggagtggttactgggctgcatcttgctgaagtatgtcaccgtcagtatcccaaggtcccacgagtcatcctgtggctgatggtggagttggctatcatcggctcagacatgcaagaagtcattggctcagccattgctatcaatcttctgtctgtaggaagaattcctctgtggggtggcgttctcatcaccattgcagatacttttgtatttctcttcttggacaaatatggcttgcggaagctagaagcattttttggctttctcatcactattatggccctcacatttggatatgagtatgttacagtgaaacccagccagagccaggtactcaagggcatgttcgtaccatcctgttcaggctgtcgcactccacagattgaacaggctgtgggcatcgtgggagctgtcatcatgccacacaacatgtacctgcattctgccttagtcaagtctagacaggtaaaccggaacaataagcaggaagttcgagaagccaataagtactttttcattgaatcctgcattgcactctttgtttccttcatcatcaatgtctttgttgtctcagtctttgctgaagcattttttgggaaaaccaacgagcacgtggttgaagtctgtacaaataccagcagtcctcatgctggcctctttcctaaagataactcgacactggctgtggacatctacaaacggggtgttgtgctgggatgttactttgggcctgctg

SEQ ID NO: 187628 - DNA, 1695 bp, Homo Sapiens
ttggggaacttgctaaccacaaaacccgccaggccggtgcgggagctgcggagcatccgctgcggtcctcgccgagacccccgcgcggattcgccggtccttcccgcgggcgcgacagagctgtcctcgcacctggatggcagcaggggcgccggggtcctctcgacgccagagagaaatctcatcatctgtgcagccttcttaaagcaaactaagaccagagggaggattatccttgacctttgaagaccaaaactaaactgaaatttaaaatgttcttcgggggagaagggagcttgacttacactttggtaataatttgcttcctgacactaaggctgtctgctagtcagaattgcctcaaaaagagtctagaagatgttgtcattgacatccagtcatctctttctaagggaatcagaggcaatgagcccgtatatacttcaactcaagaagactgcattaattcttgctgttcaacaaaaaacatatcaggggacaaagcatgtaacttgatgatcttcgacactcgaaaaacagctagacaacccaactgctacctatttttctgtcccaacgaggaagcctgtccattgaaaccagcaaaaggacttatgagttacaggataattacagattatccatctttgaccagaaatttgccaagccaagagttaccccaggaagattctctcttacatggccaattttcacaagcagtcactcccctagcccatcatcacacagattattcaaagcccaccgatatctcatggagagacacactttctcagaagtttggatcctcagatcacctggagaaactatttaagatggatgaagcaagtgcccagctccttgcttataaggaaaaaggccattctcagagttcacaattttcctctgatcaagaaatagctcatctgctgcctgaaaatgtgagtgcgctcccagctacggtggcagttgcttctccacataccacctcggctactccaaagcccgccacccttctacccaccaatgcttcagtgacaccttctgggacttcccagccacagctggccaccacagctccacctgtaaccactgtcacttctcagcctcccacgaccctcatttctacagtttttacacgggctgcggctacactccaagcaatggctacaacagcagttctgactaccacctttcaggcacctacggactcgaaaggcagcttagaaaccataccgtttacagaaatctccaacttaactttgaacacagggaatgtgtataaccctactgcactttctatgtcaaatgtggagtcttccactatgaataaaactgcttcctgggaaggtagggaggccagtccaggcagttcctcccagggcagtgttccaaaaatcagtacggccttccatttgaaaaatggcttcttatcgggtccctgctctttggtgtcctgttcctggtgataggcctcgtcctcctggggtagaatcctctcggaatcactccgcaggaaacgttactcaagactggattatttgatcaatgggatctatgtggacattctaaggatggaactccggtgtctcttaattcatttagtaaccagaagcccaaatgccatgaagtttctgctgacctgctagtcttagcaggaggttgtatttgagacaagaaatgccccctctgctttcc

SEQ ID NO: 187629 - DNA, 1908 bp, Homo Sapiens
ttggctctggactggaaccttttggagagaacccccggcaggaccaaccccgcacccgccagcaccgcggcaatgtccagcaatagttttccttacaatgagcagtccggaggaggggaggcgacggagctgggtcaggaggcgacctcaaccatttccccctcgggggccttcggcctctttagcagcgatttgaagaagaatgaagatctaaagcaaatgttagagagcaacaaagattctgctaaactggatgctatgaagcggattgttgggatgattgcaaaagggaaaaatgcatctgaactgtttcctgctgttgtgaagaatgtggccagtaaaaatattgagatcaagaagttggtatatgtttacctggttcgatatgctgaagaacagcaggatcttgcactcctgtccataagcacttttcagcgagctctgaaggacccaaaccaactaattcgtgcaagcgctttgagagttctgtcaagtattagagtgccaattattgtacctatcatgatgcttgctattaaggaagcttctgctgacttatcaccatatgttaggaagaatgcagcccatgcaatacaaaaattatacagccttgatccagagcagaaggaaatgttaattgaagtaattgaaaaacttctgaaagataaaagcacattggtagctggcagtgttgtgatggcttttgaagaagtatgcccggacagaatagatctgattcataaaaattaccgcaagctatgtaacttactagtggatgttgaagagtgggggcaggttgtcataatccacatgctaactcgatatgctcggacacagtttgtcagcccttggaaagagggtgatgaattagaagacaatggaaagaatttctacgaatctgatgatgatcagaaggaaaagactgacaaaaagaagaagccgtatactatggatccagatcatagactcttaattagaaatacaaagccttggcttcagagcaggaatgctgcggtggttatggcagttgctcagctgtattggcacatatcaccaaaatctgaagctggcataatttctaaatcactagtgcgtttacttcgtagcaatagggaggtgcagtatattgtcctacaaaatatagcaactatgtcaattcaaagaaaggggatgtttgaaccttatctgaagagtttctatgttaggtcaactgatccaactatgatcaagacactgaagcttgaaattttgacaaacttggcaaatgaagccaacatatcaactcttcttcgagaatttcagacctatgtgaaaagccaggataaacaatttgcagcagccactattcagactataggcagatgtgcaaccaacatcttggaagtcactgacacgtgcctcaatggcttggtctgtctgctgtccaacagggatgaaatagttgttgctgaaagtgtggttgttataaagaaattactgcaaatgcaacctgcacaacatggtgaaattattaaacatatggccaaactcctggacagtatcactgttcctgttgctagagcaagtattctttggctaattggagaaaactgtgaacgagttcctaaaattgcccctgatgttttgaggaagatggctaaaagcttcactagtgaagatgatctggtaaaactgcagatattaaatctgggagcaaaattgtatttaaccaactccaaacagacaaaattgcttacccagtacatattaaatctcggcaagtatgatcaaaactacgacatcagagaccgtacaagatttattaagcagcttattgttccgaatgaaaagagtggagctttaagtaaatatgccaaaaaaatattcctagcacaaaagcctgcaccactgcttgagtctccttttaaa

SEQ ID NO: 187630 - DNA, 2915 bp, Homo Sapiens
agcaatgcttttacataaaagacaactttgtacaaaaaagttggcattttattacccccttgataaacattgcattaagttgccagatgaagacatgtttaaattgcagaacacaagtcagcatagaaaaccttttctctaaccgtatgaactttaacttccttttcttttctgcagggttcagaatctcccatgatgattggtgagttgagaagtgaccttgatgatgttgatccctagaggaacatgcccagcctgagaggagtcaagacacaatactggatgctcagcaccttcttggaatcagaatctcgaaccctttggaagagcctggagattggactgggaaagctgctgtgacttgggcggatcgtgtatttctcaaggaaagcatttttaagccactagaaggtttgggagctgtttggcagtgggagaactccggcatgtggatcagctgtcccgggaccgtggtctatatgtggattcacatttctgtggagattttcggaaatagagccagtggcagacttttttgttaccgaacatacaagagtgagcataaagctgttgctttctctacgatgctacaaaagaaattcctttggtttttatattttaagaaaaagcaagctgcttttagatatgtgggggcaaatttttaatcttgcagtaatattaaacaggaatatccaatttaaaatgatgtaaagatgtaataaaattccttttcattgtaaaatagtaattaagtcaatttacacagacctttgtatttaatatgtctccctatttgtatagaatttcagatgggtctagatgagaaccctatgcataagcttggatcttgatgaaaggttaccaggatcaggatcaaaaattgggaaatactaagctcttgaagatatttttctgatataattagattgaaaagagcaattttgaaaatgctgtgttctccagaagtacagggtgcattatttgacatcaattacttaaagaagttatgagttgttccccaaacagattttaaaaacagcaaaataaaagcactttaagatataattttactgagtttaacttcacagaattatctttttaatgcttggagacatattgaataaactgtagtcttaaatcatgtgatctgcaatcgtttgcttttgcttaaaacataattactgaaacccttggtattggttgtatatgaagttaactatttgagttggtacacactgcttgtgagtttcatagttattgtaatgcagagaaggaatttgagaatttgtttctcctcaacatgactaattaacactgaaaagtcagtcaaggtttaagatttattttcccagaaataaatataaagcaattgaataaccatccatttagtcgtatttccaaagtatagcaccattcactcatttataccagctcccttttatggtgtgggggagaggtttacacccacatatttcatatatattttgtacattttgtattttgaattgctcacattttcggccctgttttgcctttagttacaggtcctgccttattttcatctcaccatgcacagaactagggagccttaggaagtgccaggttttcactgtcagatttgccaagtcacagaggcgcagccagccctgaagtgcctgtctggctgctgtggcattgtgtgggcatgtggccaggcagatggcatctcattactgtgctctcgccatggcccagtcttttcattctctggcagtgagggtttctgtgctgtcagacttcattgttattctgtgacttgctggaggttggcagtggcctttgtcaaacacactgagaagatggaagggccagcacttaagagcagaactgtacccttagagaaacggacagaggcgagtggcaaacttcagacggttccaatggtcttgcagtttgaaatgtgatgttctaccattggttttgagtacgtgaatacttcctgtcctactgtttcccctaccctattctcaccttctctccgcccacatcctcaccaagagattgtgtgggacatgaccttgaaatgctggcgatgatccacactgggatatcatcgctggcgactgcactctcaggagcccaaaatcaggagtgaaattgccacttctagtccccttatttcctatggaaacaacgccttccgcacccctagcacctgccgtcctcactgtaaaggttcatcaggatcgtccaccgtgtatattatacgcttcagatcatgttgcttatattgttgctgcaatgaccatcgttttcactttgctggtaaccacttgattgctgacagctacagtcaatgaacctgctgatgactttttttaatgtagtacaacagtgacagttatgacaggcttaccttggaagagttgtcatttttactgccaattttttggatgaagatgtttttataaacctttcaaaatggtctgcaaacagagcaggaattgcacaattaactcaataatgctgtgtgttctcaagaagctcccttagtgaggccgatcttaagatggccgattctgcccgttgaaggcatcctgggaaagaaaacaagcatcccagcgggcatctcaccacgacttctcctggagtcctcacacggtcactgacaactacagtcagttttaggaactagagtgccgtatcatcagacttaccctgtcctgccccaccttccctgctaacatcgaggtgtgtgcagttaccttctgagcttggaacaagcagactggaattttcctctgctacctcttgtgtataaaatcttgtttataaaatttcaaaaggaagtagatacactacggaagaaccttaattctaaatttggttcatgtgtggcaaagttcttagcttctaagagtataaataaatttttc

SEQ ID NO: 187631 - DNA, 2363 bp, Homo Sapiens
  misc_feature (1894)..(1902): n is a, c, g, or t
ttggcatttctcaagggtaaaattgggatggtaatggtactcatttcattgtcctgtacagtgatatggtaactcccataagaccccacacctagcaagcggcctggtcaaggaaccagaccacactctctctgacttcactacactcccacattcctgggagttgaccccagccatgttggagaatggcaactccttgcaatggcagggagcatcactatttctgctttggtggcaaagcctttaagacacagctgatttctattatctctcgtaatcagttactcctttctccctggaacagaattgaagtcatcaaacacctaccagatgctttccattttttaccatttaatcttcccatcagtctcaagatggcaataccaatcaccatttggcaggcgaggaaataaagtcttggagggattgaggtgactaaagtttcacaatagtgagaggccgaatggaatttgaacccaggtccactaacttcaaagcctgagcatttcgcatctggcacactgctcaggatatccacagtgggccatgtttactcctcctgttatatatgctggtgacctacaaataggtgtctccaaacagggcaacaggagcccaagcctggcttattggccaatttctgaagcactcaatgccactctctattaagcctaattattcaacacttaggcctctaaactttttattagctcattacctacttatttattttgctgagtcaagtcttttaagctaactgcattgtctatgaactaggggacaacaaaggaagtagaagaagtcagtattactaatatcatcaacagctccatctccagctttaaacggaagatcagctttgccagcattgaaatttccagcgacaacgttgactacagtgacttgacaatgaaaaccagcgacaagttcaagtttgtcttccgagaaaagatgggcaggattgttgattatttcacaattcaaaaccccagtaatgttgatcactattccaaactactgtttcctttgatttttatgctagccaatgtattttactgggcatactacatgtatttttgagtcaatgttaaatttcttgcatgccataggtcttcaacaggacaagataatgatgtaaatggtattttaggccaagtgtgcacccacatccaatggtgctacaagtgactgaaataatatttgagtctttctgctcaaagaatgaagctccaaccattgttctaagctgtgtagaagtcctagcattataggatcttgtaatagaaacatcagtccattcctctttcatcttaatcaaggacattcccatggagcccaagattacaaatgtactcagggctgtttattcggtggctccctggtttgcatttacctcatataaagaatgggaaggagaccattgggtaaccctcaagtgtcagaagttgtttctaaagtaactatacatgttttttactaaatctctgcagtgcttataaaatacattgttgcctatttagggagtaacattttctagtttttgtttctggttaaaatgaaatatgggcttatgtcaattcattggaagtcaatgcactaactcaataccaagatgagtttttaaataatgaatattatttaataccacaacagaattatccccaatttccaataagtcctatcattgaaaattcaaatataagtgaagaaaaaattagtagatcaacaatctaaacaaatccctcggttctaagatacaatggattccccatactggaaggactctgaggctttattcccccactatgcatatcttatcattttattattatacacacatccatcctaaactatactaaagcccttttcccatgcatggatggaaatggaagannnnnnnnnaacttgttctagaagtcttaatatgggctgttgccatgaaggcttgcagaattgagtccattttctagctgcctttattcacatagtgatggggtactaaaagtactgggttgactcagagagtcgctgtcattctgtcattgctgctactctaacactgagcaacactctcccagtggcagatcccctgtatcattccaagaggagcattcatccctttgctctaatgatcaggaatgatgcttattagaaaacaaactgcttgacccaggaacaagtggcttagcttaagtaaacttggctttgctcagatccctgatccttccagctggtctgctctgagtggcttatcccgcatgagcaggagcgtgctggccctgagtactgaactttctgagtaacaatgagacacgttacagaacctatgttcacgttgcgggtgagctgccctctccaaatcc

SEQ ID NO: 187632 - DNA, 967 bp, Homo Sapiens
  misc_feature (55)..(63): n is a, c, g, or t
ctttgtacaaaaaagttgggcccttttcccactcgcatggatggaaatggaagannnnnnnnnaacttgttctagaagtcttaatatgggctgttgccatgaaggcttgcagaattgagtccattttctagctgcctttattcacatagtgatggggtactaaaagtactgggttgactcagagagtcgctgtcattctgtcattgctgctactctaacactgagcaacactctcccagtggcagatcccctgtatcattccaagaggagcattcatccctttgctctaatgatcaggaatgatgcttattagaaaacaaactgcttgacccaggaacaagtggcttagcttaagtaaacttggctttgctcagatccctgatccttccagctggtctgctatgagtggcttatcccgcatgagcaggagcgtgctggccctgagtactgaactttctgagtaacaatgagatacgttacagaacctatgttcaggttgcgggtgagctgccctctccaaatccagccagagatgcacattcctcggccagtctcagccaacagtaccaaaagtgatttttgagtgtgccagggtaaaggcttccagttcagcctcagttattttagacaatctcgccatctttaatttcttagcttcctgttctaataaatgcacggctttacctttcctgtcagaaataaaccaaggctctaaaagatgatttcccttctgtaactccctagagccacaggttctcattccttttcccattatacttctcacaattcagtttctatgagtttgatcacctgatttttttaacaaaatatttctaacgggaatgggtgggagtgctggtgaaaagaggtgaaatgtggttgtatgaaccaatcatatttgtgatttttaaaaaaagtttaaaaggaaatatctggttctgaaaccccaccttaagcattgttttta

SEQ ID NO: 187633 - DNA, 903 bp, Homo Sapiens
  misc_feature (638)..(646): n is a, c, g, or t
gccaactttgtacaaaaaagttggatagaaacatcagtccattcctctttcatcttaatcaaggacattcccatggagcccaagattacaaatgtactcagggctgtttattcggtggctccctggtttgcatttacctcatataaagaatgggaaggagaccattgggtaaccctcaagtgtcagaagttgtttctaaagtaactatacatgttttttactaaatctctgcagtgcttataaaatacattgttgcctatttagggagtaacattttctagtttttgtttctggttaaaatgaaatatgggcttatgtcaattcattggaagtcaatgcactaactcaataccaagatgagtttttaaataatgaatattatttaataccacaacagaattatccccaatttccaataagtcctatcattgaaaattcaaatataagtgaagaaaaaattagtagatcaacaatctaaacaaatccctcggttctaagatacaatggattccccatactggaaggactctgaggctttattcccccactatgcatatcttatcattttattattatacacacatccatcctaaactatactaaagcccttttcccatgcatggatggaaatggaagannnnnnnnnaacttgttctagaagtcttaatatgggctgttgccatgaaggcttgcagaattgagtccattttctagctgcctttattcacatagtgatggggtactaaaagtactgggttgactcagagagtcgctgtcattctgtcattgctgctactctaacactgagcaacactctcccagtggcagatcccctgtatcaatccaagaggagcattcatccctttgctctaatgatcaggaatgatgcttattagaaaacaa

SEQ ID NO: 187634 - DNA, 1304 bp, Homo Sapiens
ttggctaagccagaatcctgaccttgctgcacagatgcagaatcctgatacactatcagcaatgtcaaaccctagagcaatgcaggccttgttacagattcagcagggtttacagacattagcaacggaagccccgggcctcatcccagggtttactcctggcttgggggcattaggaagcactggaggctcttcgggaactaatggatctaacgccacacctagtgaaaacacaagtcccacagcaggaaccactgaacctggacatcagcagtttattcagcagatgctgcaggctcttgctggagtaaatcctcagctacagaatccagaagtcagatttcagcaacaactggaacaactcagtgcaatgggatttttgaaccgtgaagcaaacttgcaagctctaatagcaacaggaggtgatatcaatgcagctattgaaaggttactgggctcccagccatcatagcagcatttctgtatcttgaaaaaatgtaatttatttttgataacggctcttaaactttaaaatacctgctttatttcattttgactcttggaattctgtgctgttataaacaaacccaatatgatgcattttaaggtggagtacagtaagatgtgtgggtttttctgtatttttcttttctggaacagtgggaattaaggctactgcatgcatcacttctgcatttattgtaattttttaaaaacatcaccttttatagttgggtgaccagattttgtcctgcatctgtccagtttatttgctttttaaacattagcctatggtagtaatttatgtagaataaaagcattaaaaagaagcaaatcatttgcactctataatttgtggtacagtattgcttattgtgactttggcatgcatttttgcaaacaatgctgtaagatttatactactgataattttgttttatttgtatacaatatagagtatgcacatttgggactgcatttctggaaacatactgcaataggctctctgagcaaaacacctgtaactaaaaaagtgaagataagaaaatactcttaaagctgagtatttcctaattgtatagaatcttacagcatctttgacaaacatctcccagcaaaagtgccggttagtcaatttgttgaaaatacagtagaaaagctgattctggttatctctttaagacaattaattgtacagacacataatgtaacattgtctcaacattcattcacagattgactgtaaattaccttaatctttgtgcagactgaaggaacactgtagtataccccaaagtgcattt

SEQ ID NO: 187635 - DNA, 3663 bp, Homo Sapiens
ttggctcccagccaaggaagagccagtggaggccctgaccttctcccgggaacacgggccaggagtggcggagccagaagtggcaactgcaccccctgaaaaggaaataccttcattggatcaagagaaaaccaaacttgagcctggtcaaccccagctgtctccaggcatttccactattcatctgcatccacagtttccagtagtgattgaaaaaacatcacctcctgtgcctgttgaagtagctcctgaagcttctacgtctagtgccagccaagtgattgctcctactcaagtgacagaaatcaatgaatgtactgtgaaccctgatatctgtggagcaggacactgcattaacctaccagtgagatatacctgtatatgctacgagggctacaggttcagtgaacaacagaggaaatgtgtggatattgatgagtgtactcaggtccaacacctctgctcccagggccgctgtgaaaacaccgagggaagtttcttgtgcatttgcccagcaggatttatggccagtgaggagggtactaactgcatagatgttgacgaatgcctgaggccggacgtctgtggggaggggcactgtgtcaatactgtgggggccttccggtgtgaatactgtgacagcgggtaccgcatgactcagagaggccgttgtgaggatattgatgaatgtttgaatccaagcacttgtccagatgagcagtgtgtgaattctcctggatcttaccagtgcgttccctgcacagaaggattccgaggctggaatggacagtgccttgatgtggacgagtgcctggaaccaaacgtctgcgcaaatggtgattgttccaaccttgaaggctcctacatgtgttcatgccacaaaggctatacccggactccggaccacaagcactgtagagatattgatgaatgtcagcaagggaatctatgtgtaaacgggcagtgcaaaaataccgagggctccttcaggtgcacctgtggacaggggtaccagctgtcggcagctaaagaccagtgtgaagacattgatgaatgccagcaccgtcatctctgtgctcatgggcagtgcaggaacactgagggctcttttcaatgtgtgtgtgaccagggttacagagcatctgggcttggagaccactgtgaagatatcaatgaatgcttggaggacaagagtgtttgccagagaggagactgcattaatactgcagggtcctatgattgtacttgtccggatggatttcagctagatgacaataaaacatgtcaagatattaatgaatgtgaacatccagggctctgtggtccgcaaggggagtgcctaaacacagagggttctttccattgtgtctgccagcagggtttctcaatctctgcagatggccgtacgtgtgaagatattgatgaatgtgtaaacaacactgtttgtgacagtcacgggttttgtgacaatacagctggctccttccgctgcctctgttatcagggctttcaagccccacaggatgggcaagggtgtgtggatgtgaatgaatgtgaactgctcagtggggtgtgtggtgaagccttctgtgaaaacgtggaagggtccttcctgtgcgtgtgtgctgatgaaaaccaagagtacagccccatgactgggcagtgccgctcccggacctccacagatttagatgtagatgtagatcaacccaaagaagaaaagaaagaatgctactataatctcaatgacgccagtctctgtgataatgtgttggcccccaatgtcacgaaacaagaatgctgctgtacatcaggcgcgggatggggagataactgcgaaatcttcccctgcccggtcttgggaactgctgagttcactgaaatgtgtcccaaagggaaaggttttgtgcctgctggagaatcatcttctgaagctggtggtgagaactataaagatgcagatgaatgcctactttttggacaagaaatctgcaaaaatggtttctgtttgaacactcggcctgggtatgaatgctactgtaagcaagggacgtactatgatcctgtgaaactgcagtgctttgatatggatgaatgtcaagaccccagtagttgtattgatggccagtgtgttaatacagagggctcttacaactgcttctgtactcaccccatggtcctggatgcgtcagaaaaaagatgtatacgaccggctgagtcaaacgaacaaatagaagaaactgatgtctaccaagatttgtgctgggaacatctgagtgatgaatacgtgtgtagccggcctcttgtgggcaagcagacaacgtacactgagtgctgctgtctgtatggagaggcctggggcatgcagtgtgccctctgccccctgaaggattcagatgactatgctcagctgtgtaacatccccgtgacgggacgccggcagccatatggacgggacgccttggttgacttcagtgaacagtatactccagaagccgatccctacttcatccaagaccgttttctaaatagctttgaggagttacaggctgaggaatgcggcatcctcaatggatgtgaaaatggtcgctgtgtgagggtccaggaaggttacacctgcgattgctttgatgggtatcacttggatacggccaagatgacctgtgtcgatgtaaatgaatgcgatgagttgaacaaccggatgtctctctgcaagaatgccaagtgcattaacaccgatggttcctacaagtgtttgtgtctgccaggctacgtgccttctgacaagccaaactactgcactccgttgaataccgccttgaatttagagaaagacagtgacctggagtgaaacagaatctacataacctaagcccatatactctgcactgtgtaaaggaaaagggagaaatgtattatacttgagacattgcacctaccccggaaggctggaaatacagaaacagcatggaattgcaagtcctctgaagacaatgagaggatttaggatgagcccgataggtgtggcagaccaaatggacatttctctaaaaaaccagtatatatagtctgttcatatgtaaaattcaatggaagagaggtggaacagtgctgttattttaaacagaaggttgtattattatgttgttttgtttttttactattgcttgattaaatttggcatttaaatagtggtggaaatattttatataattttcattttttggttgtgcagttccttggctactgtttttcttttacttcagttttttaaaaatctcaaatgaaaaagtcttcgatacaatattgttaagctgtattataagtattgttacacagggttatgcaattcccggcctggagcatttttgaaattcaaattgtctgtcctgtggagcaggcagtgattttgttccaaaactttgtatacacatttggagaaaagtactttatattttcagtgttttgtctgattttaatgtccgttcttagccaagctgctagcaggtgttaattggatccctttccttcactgaaatggaagagtttataagcttacgttagtattgtaatatgtaaagtaagcccaacaaaaatttttaaaaatttgatgatccccaatatatctacccattggtatgttaaataaatcaccattttttg

SEQ ID NO: 187636 - DNA, 1611 bp, Homo Sapiens
  misc_feature (1043)..(1053): n is a, c, g, or t
ttggctcctttatattttacccacaatttttgcattcttcaatatatcttgtctacagtaattattactgtggtgttctagtggtgattttctattttgcatttatcccattaagggagaatgtatctcagatcagaaatatttgttttaattatgagatactgtactgtgttacctttctaagattaaaaaaaattatgaactataactggctctaagggtttcttttaagggaattatatattattttagaattcatgaatctttaaataatgtagctgttgtcttttaatttcatggtgaatactaagactggttttgtgatagttattctctttatgtaacttctacatatctctactgttaaaagctatctttttcttatggtaaaattggtttagagtggttgacagtttaaagagggatttgtgatgatatctgttcattttcatagggttggggagcagaatatcaccggcaggatgtaaccagcaccccatgttggattgagattcatcttcatgggcctcttcagtggctggataaagtccttactcagatgggctcccctctgaaccccatatcttctgtttcataatgcagaagtattcttttcaattatattgttagtggacttgttttaattttagagaaactttgagtacagatactgtgagcttacattgaaaacagatattacagcttatttttttctacataattgtgaccaatacatttgtattttgtgatgaatctacatttgtttgtattcatgttcatgtgattaactcttagaagtgttgtaaaagatgcagagtaagtattatgccccagttcagaaatttggcattgatcttaaactggaacatgcttttactttattgccctaacaattttttattaaatttatttgaaaatgcatcacatgatgaaaaattatagtagcttataagagggcatatacagtgaagagtaagttttccctcctactctcgatcttccagaagctgtacttttaccagtttctttgtcccaccaacttnnnnnnnnnnngtacaattcattgttttgcaaaagtgtatggtaggggcttaaaagaaactataaagttttatttgaatgaacactatgcactgctgtaactggtagtgttcagtaaaagcaaaatgatagttttctagatgacataaaatttacatttaatacagataagtgttcttcagtgtaatgtgacttcatgctatatatcttttgtaagacatttccttttttaaaaaaatttttgcaaataactgatctcaagtatatgtcatttactcaaaatctgtcataagcattactttatagctagtgacagtgcatgcacagccttgttcaactatgtttgctgcttttggacaatgttgcaagaactctatttttgacatgcattaatcttttattttgcacttttatgggtgacagtttttagcataacctttgataaaatacactcaagtgacttggacttagatgcttatccttacgtccttggtaccttttttgtattaacaacactgcaattatagattacatttgtaggaagttatgcttttttctgggtttttgttt

SEQ ID NO: 187637 - DNA, 1892 bp, Homo Sapiens
ttggcttgtgaacgaagataagtggagaggcaaggtcagttaccaggactacgagattgagatttcggatgcttcagaggtagaaaaggaaattaataaagcccagaatgccatcgccggggaaggaatgggaatcagtcatgagctaatcaccctggagatcagctcccgagatgtcccggatctgactctaatagaccttcctggcataaccagagtggctgtgggcaatcagcctgctgacattgggtataagatcaagacactcatcaagaagtacatccagaggcaggagacaatcagcctggtggtggtccccagtaatgtggacatcgccaccacagaggctctcagcatggcccaggaggtggaccccgagggagacaggaccatcggaatcttgacgaagcctgatctggtggacaaaggaactgaagacaaggttgtggacgtggtgcggaacctcgtgttccacctgaagaagggttacatgattgtcaagtgccggggccagcaggagatccaggaccagctgagcctgtccgaagccctgcagagagagaagatcttctttgagaaccacccatatttcagggatctgctggaggaaggaaaggccacggttccctgcctggcagaaaaacttaccagcgagctcatcacacatatctgtaaatctctgcccctgttagaaaatcaaatcaaggagactcaccagagaataacagaggagctacaaaagtatggtgtcgacataccggaagacgaaaatgaaaaaatgttcttcctgatagataaaattaatgcctttaatcaggacatcactgctctcatgcaaggagaggaaactgtaggggaggaagacattcggctgtttaccagactccgacacgagttccacaaatggagtacaataattgaaaacaattttcaagaaggccataaaattttgagtagaaaaatccagaaatttgaaaatcagtatcgtggtagagagctgccaggctttgtgaattacaggacatttgagacaatcgtgaaacagcaaatcaaggcactggaagagccggctgtggatatgctacacaccgtgacggatatggtccggcttgctttcacagatgtttcgataaaaaattttgaagagttttttaacctccacagaaccgccaagtccaaaattgaagacattagagcagaacaagagagagaaggtgagaagctgatccgcctccacttccagatggaacagattgtctactgccaggaccaggtatacaggggtgcattgcagaaggtcagagagaaggagctggaagaagaaaagaagaagaaatcctgggattttggggctttccaatccagctcggcaacagactcttccatggaggagatctttcagcacctgatggcctatcaccaggaggccagcaagcgcatctccagccacatccctttgatcatccagttcttcatgctccagacgtacggccagcagcttcagaaggccatgctgcagctcctgcaggacaaggacacctacagctggctcctgaaggagcggagcgacaccagcgacaagcggaagttcctgaaggagcggcttgcacggctgacgcaactcggcgccggcttgcccagttccccggttaaccacactctgtccagccccgtagacgtgcacgcacactgtctgcccccgttcccgggtagccactggactgacgactttgagtgctcagtagtcagactggatagtccgtctctgcttatccgtaaccgtggtgatttaccagaagctgtgaaagcagtttgggttctagcatgaagacagagccccaccctcaatgcacctgagctggcgggattgaaggatgctgtctccttactgg

SEQ ID NO: 187638 - DNA, 1556 bp, Homo Sapiens
  misc_feature (1219)..(1236): n is a, c, g, or t
ttggaaaacatcaaaccgttacagcccagaatcccaggctcagtctgtccatcatcaaagaccaggttcaagggtctctccagaaaatcttgtggacaaatccaggggaagtaggcctggaaaatccccagagaggagtcacgtctcttcggagccctacgagcccatctccccaccccaggttccggttgtgcatgagaaacaggacagcttgctgctcttgtctcagaggggcgcagagcctgcagagcagaggaatgatgcccgctcaccagggagtataagctacttgccttcattcttcaccaagcttgaaaatacatcacccatggttaaatcaaagaagcaggagatttttcgtaagttgaactcctctggtggaggtgactctgatatggcagctgctcagccaggaactgagatctttaatctgccagcagttactacgtcaggctcagttagctctagaggccattcttttgctgatcctgccagtaatcttgggctggaagacattatcaggaaggctctcatgggaagctttgatgacaaagttgaggatcatggagttgtcatgtcccagcctatgggagtagtgcctggtactgccaacacctcagttgtgaccagtggtgagacacgaagagaggaaggggacccatcacctcattcaggaggagtttgcaaaccaaagctgatcagcaagtcaaacagcaggaaatctaagtctcctatacctgggcaaggctacttaggaacggaacggccctcttcagtctcctctgtacattcagaaggggattaccataggcagacgccagggtgggcctgggaagacaggccctcttcaacaggctcaactcagtttccttataaccctctgactatgcggatgctcagcagtactccaccaacaccgattgcatgtgctccctctgcggtgaaccaagcagctcctcaccaacagaacaggatctgggagcgagagcctgccccactgctctcagcacagtacgagaccctgtcggatagtgatgactgaactgcacaaagtgaggggaacagggtgcaggagagggatctctagtttttgtggtttaatttttagtagcaggtcaaaaacctgccctcctgtgacttattccctgagacttttcaggagagccagcccacagatgatgaagaaatgatggaagttcatttggagagtcaaatgggnnnnnnnnnnnnnnnnnnctgcctttgatacaggcaattcagtggactataataatagtggagggttgagatgtagagtttttaaaaagtgaacagttgctgttcttacatctgtaaagaaaaccataatgtctttaaatcactcttctgtaaatagatgacctttttgcagtgtatatccccttgctgtagtatctggtgtacttatgttcaaatcagcgcatcaactttgggggtgatttttaaaaatctttttgtctatctatctttttaaccctagccttctaaacaacctcatacagcccagttacataatgttggctgtcacgggcattgta

SEQ ID NO: 187639 - DNA, 1190 bp, Homo Sapiens
  misc_feature (368)..(376): n is a, c, g, or t
ttgggccacctttcctgttcatgacagctactaacctggagacagtaacatttcattaaccaaagaaagtgggtcacctgacctctgaagagctgagtactcaggccactccaatcaccctacaagatgccaaggaggtcccaggaagtccagctccttaaactgacgctagtcaataaacctgggcaagtgaggcaagagaaatgaggaagaatccatctgtgaggtgacaggcaaggatgaaagacaaagaaggaaaagagtatcaaaggcagaaaggagatcatttagttgggtctgaaaggaaaagtctttgctatccgacatgtactgctagtacctgtaagcattttaggtcccagaatggnnnnnnnnntcagctattggtaatataataatgtcctttccctggagtcagtttttttaaaaagttaactcttagtttttacttgtttaattctaaaagagaagggagctgaggccattccctgtaggagtaaagataaaaggataggaaaagattcaaagctctaatagagtcacagctttcccaggtataaaacctaattaagaagtacaataagcagaggtggaaaatgatctagttcctgatagctacccacagagcaagtgatttataaatttgaaatccaaactactttcttaatatcactttggtctccatttttcccaggacaggaaatatgtccccccctaactttcttgcttcaaaaattaaaatccagcatcccaagatcattctacaagtaattttgcacagacatctcctcaccccagtgcctgtctggagctcacccaaggtcaccaaacaacttggttgtgaaccaactgccttaaccttctgggggagggggattagctagactaggagaccagaagtgaatgggaaagggtgaggacttcacaatgttggcctgtcagagcttgattagaagccaagacagtggcagcaaaggaagacttggcccaggaaaaacctgtgggttgtgttaatttctgtccagaaaatagggtggacagaagcttgtggggtgcatggaggaattgggacctggttatgttgttattttcggactgtgaattttggtgatgtaaaacagaatattctgtaaacctaatgtttgtataaataatgagcgttaacccagtaaaatattcaataagaagtc

SEQ ID NO: 187640 - DNA, 2703 bp, Homo Sapiens
  misc_feature (948)..(980): n is a, c, g, or t
ttggcgctgaccctgagttgttggtgtacacggtcaccctcatcaacaagacgctggcggcgctcccggaccaggactccttctacgatgtgacggatgcactggagcagcagggcatggaagcgctggtccagcgccacctgggcactgcgggcactgacgtcgacctgcgcacgcagcttgtgctctacgagaacgccctgaaattggaggatggagacatcgaagaagccccaggcgctggtgggcggcgggaacgacgaaagccttcttctgaggagggcaagaggagccgccgttctctggaaggcgggggctgccccgcgcgtgccccggaacctggccccacaggccccgcctcaccggtaggccccacctcttccaccggccccgccctgctgacaggccccgcctccagccctgtgggccctccctccggtctccaagcttcagtgaacctttttcctaccatctctgtggcaccctcagctgacacctccagcgagaggagcatctacaaagcccggttcctggagaatgtggcggcagcagaaacagagaagcaggttgcgctggcccagggccgggcagagacacttgccggggccatgcccaatgaggcgggtggacacccagatgcccggcaactctgggactccccagagacagcccctgcagccagaacaccccagagccctgccccctgtgtcctgctccgggcccagcgaagccttgcaccagagcccaaggagccactgataccagcaagccccaaggctgagcccatctgggagctccctacccgtgcacccaggctctctattggggacctggacttttcagatctaggggaggatgaagaccaggacatgctgaatgtagagtctgtggaggctgggaaagacatcccagctccctcacccccactgcccctgctctcgggagtannnnnnnnnnnnnnnnnnnnnnnnnnnnnnnnnatcaaaggccccttcccaccacctccacctctacctctggctgcccctcttccccattcagtgcctgacagctcagccctccccactaagaggaagacagtaaaacttttctggcgtgagctgaagctggctgggggccatggagtctctgcaagccgctttgggccctgcgccaccctctgggcttcactggaccctgtctcagtggacacggcccgactggaacacctctttgagtctcgtgccaaagaggtgctgccctccaagaaagctggagagggccgccggacaatgaccacagtgctggaccccaagcgcagcaacgccatcaacatcggcctaaccacactgccacctgtgcatgtcattaaggctgctctgctcaactttgatgagtttgctgtcagcaaggatggcattgaggtgaggtcacccagctatgggtgttggggggaggtctggccttctcctttggtaggtgggcatttcctgtccctctggtggtgggcatgggcttggcatttctgcagggcagtccccagacactggggcctcccctagatgactgaggggtcaagaccaatgcctcaggcctcaggcctgcattgagggggccatgtcaggctctggctacatcctcagaagctactgaccatgatgcccacggaggaagagcggcagaagattgaggaagcccagctggccaaccctgacatacccctgggcccagccgagaacttcctgatgactcttgcctccattggcggcctcgctgctcgtctacaactctgggccttcaagctggactatgacagcatggagcgggaaattgctgagccactgtttgacctgaaagtgggtatggaacagctggtacagaatgccaccttccgctgcatcctggctaccctcctagcggtgggcaacttcctcaatggctcccagagcagcggctttgagctgagctacctggagaaggtgtcagaggtgaaggacacggtgcgtcgacagtcactgctacaccatctctgctccctagtgctccagacccggcctgagtcctctgacctctattcagaaatccctgccctgacccgctgtgccaaggtggactttgaacagctgactgagaacctggggcagctggagcgccggagccgggcagccgaggagagcctgcggagcttggccaagcatgagctggccccagccctgcgtgcccgcctcacccacttcctggaccagtgtgcccgccgtgttgccatgctaaggatagtgcaccgccgtgtctgcaataggttccatgccttcctgctctacctgggctacaccccgcaggcggcccgtgaagtgcgcatcatgcagttctgccacacgctgcgggaatttgcgcttgagtatcggacttgccgggaacgagtgctacagcagcagcagaagcaggccacataccgtgagcgcaacaagacccggggacgcatgatcaccgagacagagaagttctcaggtgtggctggggaagcccccagcaacccctctgtcccagtagcagtgagcagcgggccaggccggggagatgctgacagtcatgctagtatgaagagtctgctgaccagcaggcctgagacaccacacacaatcgccgcagcagaggcatggtccagagcagctccccaatcatgcccacagtggggcccttccactgcatccccagaaaaccccc

SEQ ID NO: 187641 - DNA, 1520 bp, Homo Sapiens
  misc_feature (390)..(398): n is a, c, g, or t
  misc_feature (614)..(623): n is a, c, g, or t
  misc_feature (666)..(687): n is a, c, g, or t
  misc_feature (894)..(944): n is a, c, g, or t
gccaactttgtacaaaaaagttgggtcaagtgtgtggacaggcaagctcctaataaacagagtccagtgggattcctatttaggagccaaggagtactttggaacagtacaaatatattgctttaaattggaagacgctggaggcactgggatgtgatatgcccctctctctcccaatcagagcctgttgatattacaacagggacagatgtgttagttgctcactagagtttatgtcttatattaaattgtatacagtttttattctaaccactaactaggtagtgtatgccccttcagaacatgcagagtgtatctttttttaaatttctccttccgtttcttaagtattgcgcagatttgttcaactttgtaaatatggacatcacnnnnnnnnnctttgagaaaacacttgtatcagctttgtggtgttttcagggagacagctgtctgcattccctgtagaaacccagcaatgattatgcacgttgagacatgtgctttttatttcttagcaagatattttatctctgtacataaagtagaaaccaagctagggaaacagatactctttacaccatcatgccacgcattgtttttaaagcattgcgttnnnnnnnnnnttaactaaaccaagatgctgtgattttttaagttgcaatatgnnnnnnnnnnnnnnnnnnnnnnaatcattgcagttaagagaaatggaaattagttgtgttaatcttgcagaatgtttgcaggactgactatcaaactggatgatttccatttataccctactgtgtcagttcaagcatcaaaataccttgcatctgagacagacttcctacatcagggacaggtatctgtgtgtcattatacaaaacagttctagggggttgaactacnnnnnnnnnnnnnnnnnnnnnnnnnnnnnnnnnnnnnnnnnnnnnnnnnnngatcttttgtactttaggacattaaattgtacaacttttgtatatataaaagcttaggaactttctgtttagcaggaaggcaacacattcctacacttttaatgtatatgtttgttataatgtccatgtaaacatgccctatgtttgtgccttttaattagtttgtctcaataaacaaaatgtagagaaaaatatgtagctatgactttgttacaactgttcttatccacagtacaaaaatggtttgtttttaatatgtagagcattatgtgtggactactggaaggactcgtgtagggaaagcccaagaatgaccttgctgaggcctggattgggaggcacagtggccacatttggaggaagttcacatttcctggcatgcagacccaaaactgggttctggctctgcctgctgggatctgttatctctggtgggctggcagtcataattcacaattcagacagcccaggcttcctccacagtggtccaaggagcagtcctcagtgggggcaggtgtgggccctacccctaagctagaatgtggttgtcagaaccctgaaagtattagttctaaa

SEQ ID NO: 187642 - DNA, 1156 bp, Homo Sapiens
  misc_feature (460)..(484): n is a, c, g, or t
  misc_feature (898)..(906): n is a, c, g, or t
  misc_feature (1124)..(1133): n is a, c, g, or t
ttgggatgaaatgcccgaattaaaaccaatcataagtagaacccacttcaaaataaaaaaacagcattactatttctaatcccaaggaatcactttattgtaaacactagcagaactcttctccctatacaaggtggatggctgattttaacctgaaattttaaatccacagattgagagctagtgtagaattgtctgtgtttattgtttttatgagtaaatacatgcattgtcataataaaatgcatttcagagaatatgcattttacctttgggaatatgttaatttcaggcagcattccctatgggaaaggtgataccagctctgatatgcaaagcatatgataatttatcattctaacttcaacgtataatagggattgtgacctgatatttggagatgtaaatattgctcagcatattaatcccgatggaatatagcattgtagttgactttttnnnnnnnnnnnnnnnnnnnnnnnnntctacaaattgtgttttgctaagaaaagcctcaactgacagaggagaagtcaagtgtgtggacaggcaagctcctaataaacagagtccagtgggattcctatttaggagccaaggagtactttggaacagtacaaatatattgctttaaattggaagacgctggaggcactgggatgtgatatgcccctctctctcccaatcagagcctgttgatattacaacagggacagatgtgttagttgctcactagagtttatgtcttatattaaattgtatacagtttttattctaaccactaactaggtagtgtatgccccttcagaacatgcagagtgtatctttttttaaatttctccttccgtttcttaagtattgcgcagatttgttcaactttgtaaatatggacatcacnnnnnnnnnctttgagaaaacacttgtatcagctttgtggtgttttcagggagacagctgtctgcattccctgtagaaacccagcaatgattatgcacgttgagacatgtgctttttatttcttagcaagatattttatctctgtacataaagtagaaaccaaaagctagggaaacagatactctttacaccatcatgccacgcattgtttttaaagcattgcgttnnnnnnnnnnttaactaaaccaagatgctgtga

SEQ ID NO: 187643 - DNA, 1616 bp, Homo Sapiens
  misc_feature (1172)..(1197): n is a, c, g, or t
ttgggaagctgttaaagcaaggaagaaagaagctgctaacctgtgccaaacctccacggctgctacgacacctgtgactctcactactccattcagtataacatcctctgtgtcgtctgggactatgtcaaacccagtcacagtggcagctgcaatgagcatgagaagtccagtaaatgtttcaagtgcagttaacataaccagcccaatgaacatagggcatcctgtaactataaccagtccattatccatgacctctcctttaacactcactaccccagtcaacctccccacccccgtcactgccccagtgaatatagcacaccctgtcaccatcacatctccaatgaatctacccacacctatgacattagccgcccctctcaatatagcaatgagacctgtagagagcatgcctttcttgccccaagctttgcctacatcaccgccttggtaaacagtattataaaatcaaaatatgggtaaaagtaaatatttaccagcaacttaacttttagttgattaaagcaaaaagtaaaccatgaaattgggagattttattacattagttaataagagtgtggtagcatttttctccaatttggctgggattattcaaagtagggtgtgtatgtaacttatcactggaccactttagtttaatcagaaattccttttagctgacaacattgcttaaacaggatagtagttggcaagatgaaatgccagaattaaaaccaatcataagtagaacccacttcaaaataaaaaaacagcattactatttctaatcccaaggaatcactttattgtaaacactagcagaactcttctccctatacaaggtggatggctgattttaacctgaaattttaaatccacagattgagagctagtgtagaattgtctgtgtttattgtttttatgagtaaatacatgcattgtcataataaaatgcatttcagagaatatgcattttacctttgggaatatgttaatttcaggcagcattccctatgggaaaggtgataccagctctgatatgcaaagcatatgataatttatcattctaacttcaacgtataatagggattgtgacctgatatttggagatgtaaatattgctcagcatattaatcccgatggaatatagcattgtagttgactttttnnnnnnnnnnnnnnnnnnnnnnnnnntctacaaattgtgttttgctaagaaaagcctcaactgacagaggagaagtcaagtgtgtggacaggcaagctcctaataaacagagtccagtgggattcctatttaggagccaaggagtactttggaacagtacaaatatattgctttaaattggaagacgctggaggcactgggatgtgatatgcccctctctctcccaatcagagcctgttgatattacaacagggacagatgtgttagttgctcactagagtttatgtcttatattaaattgtatacagtttttattctaaccactaactatgtagtgtatgccccttcagaacatgcagagtgtatctttttttaaatttctccttccgtttctaagtattgcgcagatttgttcaactttgtaaatatggacatcacttttttt

SEQ ID NO: 187644 - DNA, 763 bp, Homo Sapiens
ttggggctacaggttcggggcgcgggtctcttccgcggaaactgacattgcgtttccgttgtcggcctcccactgcaggagccatatattgaagaccatgtctgggagcttctactttgtaattgttggccaccatgataatccagtttttgaaatggagtttttgccagctgggaaggcagaatccaaagacgaccatcgtcatctgaaccagttcatagctcatgctgctctcgacctcgtagatgagaacatgtggctatcgaacaacatgtacttgaaaactgtggacaagttcaacgagtggtttgtgtcggcatttgtcactgcggggcatatgaggtttattatgcttcatgacataagacaagaagatggaataaagaacttctttactgatgtttatgatttatatataaagttttcaatgaatccattttatgaacccaattctcctattcgatcaagtgcatttgacagaaaagttcagtttcttgggaagaaacaccttttaagctgaatggagaaaattccaaaataaattatatcaccacaatggtgtatactcaggaatgtgtacattgtaaattacttgattaaatagcctggaaatcttttgtgtattctcagcttatctaaacctaatgaaattccttttatatttaaaaatagtacattctgtctcatgtcacgtatcaatagatcaattggtatttccttgtgaacagtgttatttataaagagttcattatcaataatcatg

SEQ ID NO: 187645 - DNA, 1864 bp, Homo Sapiens
  misc_feature (1265)..(1343): n is a, c, g, or t
  misc_feature (1613)..(1621): n is a, c, g, or t
ttgggatcagtcttctctgaaatctacagacagcagtagttacccaagtccttgtgctagtccttctcctccatcctcaggaaagggctcaaaatctccttcgccaagaccaaacatgcctgttcgatacttcataatgaagagtagcaatttgagaaaccttgaaatttctcaacagaagggtatctggtctacaactcctagtaatgaacggaagctaaatcgagccttttgggaaagcagcatagtttacttggtattttctgttcaaggatctggacatttccagggattttctaggatgtcttctgagattggaagggaaaagagtcaggactggggctctgctggactaggaggagtatttaaggtggagtggatacgaaaagaaagccttccctttcaatttgcacaccatttactcaatccatggaatgacaacaagaaagtgcagataagcagggatgggcaggaactagaacctctggttggtgaacagttgctccagttatgggaacgtcttcccttgggagaaaaaaacacaactgattgacactcagaactcttagctgtggaagaacatcatgcctatttataaccactgaatgcactgactttcaaaaactgaggtggggtgtgtgttacgaatgggctttttaacacttttagagtgttgctttagaactaccatcttcatatacaggagaaaggaagcatttaaatttttatagtgattatagagaatgattatatgatgtttgtaatgaataaaatagtagtttcattatttggcacaatagcagtttattttaaacaaacaatttgaagttaaacatttcatttttaaaacactgaattacagttcttattgatgactttttaatgcagagtaagttgtttaagaaaggcctgaatatatcagaacatctgagcaccattttagaagagtcaactcttaagattatcattagaaaacaaatacgtcaacacctatgaaaagaagcggggaaaacaacaacaaggacaacaacaaaaaaccagtgaaattctacaagtgtcccttttaaaaatagtgtgtgctaactaagggctattcattctgccatttttaacttgagacacatttaagaataaagttggatgttctttttctgtgattatgaaatgcaataaaatctgaataaagggcaaagtttcttcctgatcagattagattaagtgcttagttttattcctaattctgccccttttaacctgatgtgtannnnnnnnnnnnnnnnnnnnnnnnnnnnnnnnnnnnnnnnnnnnnnnnnnnnnnnnnnnnnnnnnnnnnnnnnnnnnnngtcacatctcttatatgagcacagtaattatgacctttttgttttggctacaacttgattgaaacaagttcaaaatttaaacaagttcatacaagtttttaaaaattctcaactggtagcttgcttgctgtgcgtcttccaaactaaagcctgcaagcgccacaattctaagtgccgccttccattttttttcagtatgttttcactggcttatgttttcagatatgattttcctttttcgcatatatggtttaataaatgggggataannnnnnnnngtaaatccgtgcttgtgccaagtctcatatttctttgccatctcagaattatctttttaccaccactgtttataaaatttccttagagactttttgaagggaaaatagagcaactggaaaaatgaaagaaatgtcttggttactgagctctaaatagacaaggtttgatggcacttctcatgatacatttagttattcttataaaagcaaacagccaacatgagtgtaaattaaagacaaaaa

SEQ ID NO: 187646 - DNA, 1854 bp, Homo Sapiens
  misc_feature (1692)..(1704): n is a, c, g, or t
gggctgaccgcgtcgtcaaagctgtccctttccccccaacacatcgcttgacatctgaagaagtatttgatttggatgggattcccagggttgatgttctgaagaaccacttggtgaaagaaggtcgagtagatgaagaaattgcgcttagaattatcaatgagggtgctgccatccttcggagagagaaaaccatgatagaagtagaagctccaatcacagtgtgtggtgacatccatggccaattttttgatctgatgaaactttttgaagtaggaggatcacctgctaatacacgatacctttttcttggcgattatgtggacagaggttattttagtatagagtgtgtcttatatttatgggttctgaagattctatacccaagcacattatttcttctgagaggcaaccatgaatgcagacaccttactgaatattttacctttaagcaggaatgtaaaattaagtattcggaaagagtctatgaagcttgtatggaagcttttgatagtttgcctcttgctgcacttttaaaccaacagtttctttgtgttcatggtggactttcaccagaaatacacacactggatgatattaggagattagatagattcaaagagccacctgcatttggaccaatgtgtgacttgttatggtccgatccttctgaagattttggaaatgaaaaatcacaggaacattttagtcacaatacagttcgaggatgttcttatttttataactatccagcagtgtgtgaatttttgcaaaacaataatttgttatcgattattagagctcatgaagctcaagatgcaggctatagaatgtacagaaaaagtcaaactacagggttctcttcattaataacaattttttcggcacctaattacttagatgtctacaataataaagctgctgtattaaagtatgaaaataatgtgatgaatattcgacagtttaactgttctccacatccttactggttgcctaattttatggatgtcttcacgtggtctttaccgtttgttggagaaaaagtgacagaaatgttggtaaatgttctgagtatttgctctgatgatgaactaatgactgaaggtgaagaccagtttgatggttcagctgcagcccggaaagaaatcataagaaacaaaattcgagcaattggcaagatggcaagagtcttctctgttctcagggaggagagtgaaagtgtgctgacactcaagggcctgactcccacagggatgttgcctagtggagtgttagctggaggacggcagaccctgcaaagtggtaatgatgttatgcaacttgctgtgcctcagatggactggggcacacctcactcttttgctaacaattcacataatgcatgcagggaattccttctgttttttagttcctgtctcagcagctgacctagacagggtactgtattagctagtgtctcattaatacctgatcagggcagaaaactgatagaatgggtattcctttcaattgaaaataatggtcagttcctcagcttttcatgaaatgatatgggagcagctcatatcataatgtctgaaatatttatttattcatctgtctaattcacccttttcttttaaaagccccagtttcagaatgtgaatcagggatattcctgttactaaaatggaaatgtaattccaagtttcnnnnnnnnnnnnnaaatttatgtcattgtattggactatgcttatatttaaaactacttaatttagagttaactacctgcttagccccagaacattactttatgcccttcagttaccaaaagatttgtgcaaaggttttgtaccctggtaaatgatggccaaa

SEQ ID NO: 187647 - DNA, 1748 bp, Homo Sapiens
ttgggtgaagaccagtttgatgtaggttcagctgcagcccggaaagaaatcataagaaacaaaattcgagcaattggcaagatggcaagagtcttctctgttctcagccacagttgaggctattgaggctgaaaaagcaatacgaggattctctccaccacatagaatctgcagttttgaagaggcaaagggtttggataggatcaatgagagaatgccacctcggaaagatgctgtacagcaagatggtttcaattctctgaacaccgcacatgccactgagaaccacgggacgggcaaccatactgcccagtgacccactacttcccagggactctcacatctcgggccccaaatggacagatcacccgaggagctggaggggtcggccaagctgactgtaaatttcacagtctctctgaagaaaccattgtgcttctgagaccctagcccccttcctggatggaggcttgagggccctgggacatgtgctatctgataagattgggtcatcgctgccaaggtggagagcagtgagcaaggggcttggggcaatttccagtggagggcatccacacctccattttatgcttgtggttcacacatttaagtttacaaatcagatttcttttccccttcagtagaattagattttgtttttcaatcatgatttcaaatgcaatcctaagagctaatgtggacttttctttttccatgaaatgtctttaaaggatgaattagcatggtcttaaaatacatttctgaggttactagctgtattttgaattgtgagcaaaatgccgagaaacccagttggcatttatacaaaatgttgacctcaggtctatagttcttaaatgtggctaattctgtaacatagtcttggtattttttaattatgaatgcatatcctatttccaggcagctctcttacttgaacacaaatccaaaactaatttagagtcttttttgcccagatcttttaagacttacaccccagagatttaagaagaaaacctctaaatttcaaaattatgaagaattacagaattactcatttaaggtactttaaaagaagtttgtacattgtcaaagtaaattttaattcaaatcatgtctgtaaaacttgacgtattttgtgtatgcatgttttcattttgcaaatatttaatatatagacctatgatgtacaggtacgacatgtataggttacctagatgttatgagaaattttagtttattgtgagtactcaagttgcttagagagccaccagggtgatttgctgctggctttctatcatttttatgttttaatgcaaaggaaattttaaaatgttctggaagtgtttttgattaagcaatgcagcctagaagcaatggttctgttcaatcattcagatgttagtggaagcataaaagtcaagactgcatgttgaaacctttcttttgatagttactgaactgcttggttaaactaaatggaaccatgtgctaatttttcacaattattgacctgtattgattgccactgtagtttggtatttccctttactttggtggcctgcttccctcatgccctggaatacaactcagagctccaggcagcggaaccatctattgttttgtttgccagaaagtgcaccctgtatggtctcctgtctaagttggaaatattatgcatgtgcaggactattcgagtattttataaacagtagcacacaataaattccatgcatgggccgctgctc

SEQ ID NO: 187648 - DNA, 1117 bp, Homo Sapiens
ctttgtacaaaatacacgatacctttttcttggcagattatgtggacagaggttattttagtatagagtgtgtcttatatttatgggttctgaagattctatacccaagcacattatttcttctgagaggcaaccatgaatgcagacaccttactgaatattttacctttaagcaggaatgtaaaattaagtattcggaaagagtctatgaagcttgtatggaagcttttgatagtttgcctcttgctgcacttttaaaccaacagtttctttgtgttcatggtggactttcaccagaaatacacacactggatgatattaggagattagatagattcaaagagccacctgcatttggaccaatgtgtgacttgttatggtccgatccttctgaagattttggaaatgaaaaatcacaggaacattttagtcacaatacagttcgaggatgttcttatttttataactatccagcagtgtgtgaatttttgcaaaacaataatttgttatcgattattagagctcatgaagctcaagatgcaggctatagaatgtacagaaaaagtcaaactacagggttcccttcattaataacaattttttcggcacctaattacttagatgtctacaataataaagctgctgtattaaagtatgaaaataatgtgatgaatattcgacagtttaactgttctccacatccttactggttgcctaattttatggatgtcttcacgtggtctttaccgtttgttggagaaaaagtgacagaaatgttggtaaatgttctgagtatttgctctgatgatgaactaatgactgaaggtgaagaccagtttgatgtagttcagctgcagcccggaaagaaatcataagaaacaaaattcgagcaattggcaagatggcaagagtcttctctgttctcaaggaggagagtgaaagtgtgctgacactcaaggggcctgactcccacagggatgttgcctagtggagtgttagctggaggacggcagaccctgcaaagtgccacagttgaggctattgaggctgaaaaagcaatacgaggattctctccaccacatagaatctgcagttttgaagaggcaaagggtttgga

SEQ ID NO: 187649 - DNA, 1636 bp, Homo Sapiens
ttggtaaactttttgttaatgtaatttttgagagcgcctcactctgttgttgaaaggtttctgtgatacactatatataaatttcttagcctggggcctgactcatggtaagcattcagtaagttaatattggttatgtaaatggtagctatttttattatttcttaaaacatgaataaacttataagcagattttattatgaaactcagcttgaaaaataggtagttgtgtaggatctctattaatatacattaaatatcatttctatctcctgctaaagaatctcacaaattaagtaaccttaaaggtggtagactcttctagattgatgtacaagactataccaagaatgaccctttggttcatgggttagctggtcttctctggttattggtgattaaaaagtatgtaatgactatttaattcattacttgtgtttgaattcatgtgttttgtttgctaagatctctatctgaatagttactaattttcttcagtttctattttattgttgtctggaagaacttattttcccacctcccaatagtgtggtttcatcatcatgctcaaatatttcaaccaaggaccgtggttgtaggtagcttttctttttacttttttgaacaatatgtaaatatgtatgtttgtactaggtatctaatgttattttattttaatagaattctgcccaaattcctccatatgccctggggaagtcattgaggccctcagctgaaatgattgagactacaaatgattcaggaaaaacagagcttttctgctctattaattgcttatctgcttacagagttaagactgttacttcttcaggtgtccaggtttcatgtcatagttgtaaaacctcagcaatccctcagtatcacctagccatgtcaaatggaactatatacagcttctgcagctccagttgtgtggttgctttccagaatgtatttagcaagccaaaaggaacaaactcttcggcggtgcccctgtctcagggccaagtggttgtaagcccgccctcctccaggtcagcagtgtcaataggaggaggtaacacctctgccgtttcccccagctccatccgtggctctgctgcagccagcctccaacctcttgctgaacaatcccagcaagttgctttaacccatacagttgttaaactcaagtgtcagcactgtaaccatctatttgccacaaaaccagaacttcttttttacaagggtaaaatgtttctgttttgtggcaagaattgctctgatgaatacaagaagaaaaataaagttgtggcaatgtgtgactactgtaaactgcagaaaattataaaggagactgtgcgattctcaggggttgataagccattctgtagtgaagtttgcaaattcctctctgcccgtgactttggagaacgatggggaaactactgtaagatgtgcagctactgttcacagacatccccaaatttggtagaaaatcgattggagggcaagttagaagagttttgttgtgaagattgtatgtccaaatttacagttctgttttatcagatgggccaagtgtgatggttgtaaacgacagggtaaactaagcgagtccataaagtgggcgaggcaacattaaacatttctgtaa

SEQ ID NO: 187650 - DNA, 931 bp, Homo Sapiens
ttggctggacgttggcacagtgctgggatgactatggagacccaaatgtctcagaatgtatgtcccagaaacctgtggctgcttcaaccattgacagttttgctgctgctggcttctgcagacagtcaagctgcagctcccccaaaggctgtgctgaaacttgagcccccgtggatcaacgtgctccaggaggactctgtgactctgacatgccagggggctcgcagccctgagagcgactccattcagtggttccacaatgggaatctcattcccacccacacgcagcccagctacaggttcaaggccaacaacaatgacagcggggagtacacgtgccagactggccagaccagcctcagcgaccctgtgcatctgactgtgctttccgaatggctggtgctccagacccctcacctggagttccaggagggagaaaccatcatgctgaggtgccacagctggaaggacaagcctctggtcaaggtcacattcttccagaatggaaaatcccagaaattctcccgtttggatcccaccttctccatcccacaagcaaaccacagtcacagtggtgattaccactgcacaggaaacataggctacacgctgttctcatccaagcctgtgaccatcactgtccaagtgcccagcatgggcagctcttcaccaatggggatcattgtggctgtggtcattgcgactgctgtagcagccattgttgctgctgtagtggccttgatctactgcaggaaaaagcggatttcagccaattccactgatcctgtgaaggctgcccaatttgagccacctggacgtcaaatgattgccatcagaaagagacacttgaagaaaccaacaatgactatgaaacagctgacggcggctacatgactctgaaccccagggcacctactgacgatgataaaaa

SEQ ID NO: 187651 - DNA, 1705 bp, Homo Sapiens
agcaatgctttactattaaaagaaaactttgtacaaaaaagttggcccaaatgtctcagaatgtatgtcccagaaacctgtggctgcttcaaccattgacagttttgctgctgctggcttctgcagacagtcaagctgctcccccaaaggctgtgctgaaacttgagcccccgtggatcaacgtgctccaggaggactctgtgactctgacatgccagggggctcgcagccctgagagcgactccattcagtggttccacaatgggaatctcattcccacccacacgcagcccagctacaggttcaaggccaacaacaatgacagcggggagtacacgtgccagactggccagaccatcctcagcgaccctgtgcatctgactgtgctttccgaatggctggtgctccagacccctcacctggagttccaggagggagaaaccatcatgctgaggtgccacagctggaaggacaagcctctggtcaaggtcacattcttccagaatggaaaatcccagaaattctcccatttggatcccaccttctccatcccacaagcaaaccacagtcacagtggtgattaccactgcacaggaaacataggctacacgctgttctcatccaagcctgtgaccatcactgtccaagtgcccagcatgggcagctcttcaccaatggggatcattgtggctgtggtcattgcgactgctgtagcagccattgttgctgctgtagtggccttgatctactgcaggaaaaagcggatttcagccaattccactgatcctgtgaaggctgcccaatttgagccacctggacgtcaaatgattgccatcagaaagagacaacctgaagaaaccaacaatgactatgaaacagctgacggcggctacatgactctgaaccccagggcacctactgacgatgataaaaacatctacctgactcttcctcccaacgaccatgtcaacaggctgtattgattggggtgtagactgaactatccggggtctgtttcttttcggtgatgaaagtcttgagaaggtagtaatggataagatgtgaaggagaggagagatggagatttggagtgtaggcggaaatccgaacaccagaagatctgaatggaatgttctggattgaagaaagtgggaaatggcctcaattcacaaagtcacagcctgatagaaaccagtgtgactttactgcccagtgaacccatctcgtcctccagcctttaggaggtaggttggactggagcctgcagtagtttactctccacctgagtcctggtctccggctgggaacccacttaggccatagagaaaaacgcacactgtgcctctccaccgggcctctggagacgaggctcctcggggatacaaacagtggggagaacatgagggacatcctgaccgtacactgcgtcctcctttcccaggtgttgcgttctctctggggttgagtggcgaggtctctcccgagtcccagggccacagtgcaatgtcacatcccctttgtggaaagtgactggtaaaagagaacaaaactggaggaacctaaagtcttcggccacctggtttaatttattcaagagtgattaatcctagatgagaaaaagaattgaaatgggatcggaaaaaccaagcgtgcattgggccggtaatcggacgcgggcctcccgcgttgcgggcgagaagtctac

SEQ ID NO: 187652 - DNA, 1035 bp, Homo Sapiens
  misc_feature (76)..(101): n is a, c, g, or t
  misc_feature (301)..(513): n is a, c, g, or t
ttggctagatgcttactggagccagtgagttaagtccctttctctacatgtatgtgtatatgtatgtatgcatatnnnnnnnnnnnnnnnnnnnnnnnnnngtttcacttattgttttcaacacaaaggcatacttcttcctgctatttgtgtgtatataaaacagcatgttatgtttggattgattagtacaggatgaagaaatcaaacctttttttgaaggttttgatggatgattttcagttctgttacaaaaaatgtgtattttgaagggaacgaactaataaaaaaggttacatannnnnnnnnnnnnnnnnnnnnnnnnnnnnnnnnnnnnnnnnnnnnnnnnnnnnnnnnnnnnnnnnnnnnnnnnnnnnnnnnnnnnnnnnnnnnnnnnnnnnnnnnnnnnnnnnnnnnnnnnnnnnnnnnnnnnnnnnnnnnnnnnnnnnnnnnnnnnnnnnnnnnnnnnnnnnnnnnnnnnnnnnnnnnnnnnnnnnnnnnnnnnnnnnnnnnttatgaaaattttatctgattgctgctgttctttctttctttcttttttaaaattatggtcaggtacttacaatttcatcagaaattcctaaaagaattcgaagtgccttaaaaaatgcagaagaatcaaagcaatttcttaatcagtttctggagcaggaaactcatctcttcagcgccattaacagccatttgctgactgcgcaaccttggatggacgatcttggaaccatgattagccagattgaagagatcgaacgtcatcttgcttaccttaaatggatttcacaaattgaagaactaagtgataacattcagcaatatctgatgaccaataatgtaccggaggcagcctccactctagtgtctatggcagaacttgacattaaacttcaggaatcatcttgtactcatcttcttggtttcatgagagccacagttaaattctggcataaattctcaacgacaagcttacaagtgattttgaggaaattttagcacagcttcattggccattcatcg

SEQ ID NO: 187653 - DNA, 1633 bp, Homo Sapiens
actttgtacaaaaaagttggcaaaagacagaatagccagatctcagaggagcctggctaagcaaaaccctgcagaacggctgcctaatttacagcaaccatgagtacaaatggtgatgatcatcaggtcaaggatagtctggagcaattgagatgtcactttacatgggagttatccattgatgacgatgaaatgcctgatttagaaaacagagtcttggatcagattgaattcctagacaccaaatacagtgtgggaatacacaacctactagcctatgtgaaacacctgaaaggccagaatgaggaagccctgaagagcttaaaagaagctgaaaacttaatgcaggaagaacatgacaaccaagcaaatgtgaggagtctggtgacctggggcaactttgcctggatgtattaccacatgggcagactggcagaagcccagacttacctggacaaggtggagaacatttgcaagaagctttcaaatcccttccgctatagaatggagtgtccagaaatagactgtgaggaaggatgggccttgctgaagtgtggaggaaagaattatgaacgggccaaggcctgctttgaaaaggtgcttgaagtggaccctgaaaaccctgaatccagcgctgggtatgcgatctctgcctatcgcctggatggctttaaattagccacaaaaaatcacaagccattttctttgcttcccctaaggcaggctgtccgcttaaatccagacaatggatatattaaggttctccttgccctgaagcttcaggatgaaggacaggaagctgaaggagaaaagtacattgaagaagctctagccaacatgtcctcacagacctatgtctttcgatatgcagccaagttttaccgaagaaaaggctctgtggataaagctcttgagttattaaaaaaggccttgcaggaaacacccacttctgtcttactgcatcaccagatagggctttgctacaaggcacaaatgatccaaatcaaggaggctacaaaagggcagcctagagggcagaacagagaaaagctagacaaaatgataagatcagccatatttcattttgaatctgcagtggaaaaaaagcccacatttgaggtggctcatctagacctggcaagaatgtatatagaagcaggcaatcacagaaaagctgaagagaattttcaaaaattgttatgcatgaaaccagtggtagaagaaacaatgcaagacatacatttccactatggtcggtttcaggaatttcaaaagaaatctgacgtcaatgcaattatccattatttaaaagctataaaaatagaacaggcatcattaacaagggataaaagtatcaattctttgaagaaattggttttaaggacttcggagaaaggcattagatctggaaaagcttgagcctccttgggttcgtctacaaattggaaggaaatatgaatgaaagccctggagtactatgagcgggccctgagactggctgctgactttgagaactctgtgagacaaggtccttaggcacccagatatcagccactttcacatttcatttcatttttatgctaacatttactaatcatctttttctgcttactgtttttccgaaacattataa

SEQ ID NO: 187654 - DNA, 1296 bp, Homo Sapiens
ttggctgtgtctcagcaggctagtcaggaaagaaatcaaatgaccaatcaagtttcagatgaaacccaatcagaatcaacagaacagacaccttctcggccatcgcaattagatgtctctctttctgcaacaggcccacagtttttgtcagttgagccagcgcattcagttgcatctcaaaaaacccccacctccgcttccagcatgcttgaacttgagacagggcttcatgtaactccttctccttcagagagcagtagcagcagagcagtctctccctttgccaagattcgaagttccatggtccaggttgctagtattacccaagctggattaacccatgggataaactttgcagtgtcaaaagttcagaagagtcctccagaacctgaaatcattaatcaagtccagcaaaatgaacttaaaaagatgtttatacaatgccagacacggataattcagatttagcttttagccataagaatccttccatggcttttatttaaaaatatgaaattttcacctcttggggtattttaattgtactgtctgaacccagggatcacaaattctgttcattggaaagggttttaaacggagtcggaacctgagtagatttccaaattttacagccaggactacagaagtgcatcattctagaatgtgtagacctgagtagcttatacactacagagcactttgcttatttgaaagtaattcagcaacaggtcactttgggatataacctgaacctttttttggagtggggtgggtagactacagtagacacaagggctggacatgcagatgcttaggggattagcgtttttcataatttgttctgtttgtcagttcattcctgtgtgttcttacctctacaaagtaaattacacatttagtttttagtgactttaacatgttactgaagcatttgaatataaagctattttagttttgatggcttaactgttccctgaggagttgagggttattgacactagagaaatgaattctcatttgatcctaattttccccgtattctacttgaacacattaaaaatactctgctgcctatacaatgtaaacctaggagcattaagacttgtcacacagtaaacctgatacatcagaggtgaataccagcacctattaggtttcattttgctgttttcaggaatgtaagaacacccatattggctactggaaattctagcagtcagtcaggttttaatttattccaggaggggcatcctcgacatcttatgtagatgatccacaacttcaaaatttagtctg

SEQ ID NO: 187655 - DNA, 1146 bp, Homo Sapiens
  misc_feature (51)..(63): n is a, c, g, or t
agagcaaaatcagaatgtcctctaagtaaaaagccaagtctgaaaattagnnnnnnnnnnnnntcccctttttttcttgtaattcaagactgtttggtgttcatttgcgtctctgtagtatacgtcaccatccctctttcttagcattggaggagggctaaagtggacagatgcctggcatttgcaattctttctctcctgattcccacaacggggtagcacattccgactcccgtcactcaacaagggctgttggccatgggtggagctgatgcaaccctccatcaccatgttccctgagagcaaaggccacttccagtagtcgcggttcaaagaagctgcagctttgttcactactgctggcagacaccagaaaccatggaaacacttacagggcccgaaacacctttattcactgcttcagagcttccctgcatcagcccacatgattcaacttggcaatatagaaaatggtaaagcagggttcagaaaaatactgatgaacactgcaaatcatgttcagagtagaaattgtgactttgctagcatttcaccaatatttcctgccttgcaaccagtagatatgtaaccaaaatggcttgctgtgaattttgtagcacccaagacaaaagcaataaaatttctgtaagaacatatgcgccatggcagaatacaacatcagcccagaaaaaatgattttcctgggaaggcctgggcagcgatgaatagggctctctatgatacggaagctgggcagagattttcgcttcttccagcccacagtgaggtaattttaaaggcacttttcccttcatttgttctgcattcactgaatgtacattttttgatgtcagaggaacattgcagaaaagatcagacgaaatagtctgacaatggaggcaaagttcaaagcttctctatttccaggtaacagccgcgacagttggtctgcaccaaatctttcgagggcatgtcactgtaacctcttccatagcttttcaaacagttcaagacaaacaaatcacttagtcgttgaacaactataacatctgataccatcacacagaagttgtagcaatagtcactaatcaaagttccttctattcagttgaaaaaagaaaattcctcagctttggtttaagccaa

SEQ ID NO: 187656 - DNA, 1375 bp, Homo Sapiens
ttggctacctaaccttggctgtgggccgataatgcatatgtccagttctcacttaaattatgcaatgatatttctctctgaggaaattatacggaatgtaacttataaaagctttactgaatataagttataagcattttattcattagaactccaaaatagatgttcaaagttcagtccttgccatttgactgagaccacatggtgtgccccttgagtgaggctaatctttaggtttttcctatagaaaacattcttcctccatcagtagccctttatttgatattcagaagtggaaagctttttcattctccagtagaacttttaaaaattgttacagatacctagctcttcacagatatcatgtactgtaaacagtcatgtgtcttaattttattttctctatttgagtgcataattatcctaataatcccaaagacactgacaactcaaggaacagcagtacagtactattagaagttaagtatgttgttgttatttcacatttcatttaattgtggataaatgttagacatctgttgaaataagctcatatggtggaacgacaactatattatgaattattttcagaaatggatctttgaatagcagatcaggatttaaataataaaattatctatgaatcacttttatggtcatacatatatgatacaaatccagagttattggtgcagaaatggctacccgagagcttggtaaatttgccttggtttcttatgttaaatgtattgtgcttcccttctgtctctagaatgtggctcttcagaagacagacaattgacatttaaatttttccaaacaatgaaaaactaaattaaaaacattgcttgatatttcatttaaaattgcaccttgcttaaggtttactgaataactgaaatgtcagcaatttaaaataaattcaattgtgtgataaaatatctcacctataatagaagaaaaggaaaatcatattatttggcaattttgcagcattgtggttgcctaacaggtatatccagcagatgagaaacagtatgaaaggattgtattaacatggtaagttttgccctaaggaaaacgatcttgcattctggattcttgcagcaaagtctcaggtacttaatacgttttcttgttttatcatctgttctatgattcggcttcactttgggtggttattgaattatgtaacagagatttggttttcccaaaatgttatcacatttgaaactatgattgctttgtgttcagtccttttggaacacgtagcttccagcttaagggtagaggaaatatatacctaaaatcatcaatacatgaaagaaaaaggatggaaactatgtcctcagttttacttctaccaaaacatccc

SEQ ID NO: 187657 - DNA, 934 bp, Homo Sapiens
acaggagtaaaccacagccctaccctccaaggtaatttaatggtgagaaaatgagaatcacaaatgtccatgcaagacaaattaaggtcccataagatgaaccttatgggtctcagggagaaagaaatcacattcaagcaagaggctcaggaaagaggcaaagaataatgaagattttgacaggtggcaatagcctttcaggcagaggattatcataaagagtgtgaaagaagtcagaaaactttagtgtggttttagagaacaaagagtacatcttttgtaatttggccagaggtccaatacacgtagcaaaggagtaggaaatgcaataggaaggtaattttggatcacatggacacagactaagtaccaagcagaggagcttgttcttgcttctacaggaagtgaaagctaatcagagctaattttggaagatcacaagagtttgcggaatggactgaaggagaaagcatggaagcagggagtccagagaaggtgactatgtgcctaagcagtaagtaaagagagccccaaccagaagtaccaatgtgggaagagaaaagaggttaaggcaaaacacattaggaactgtgttaggcttcaggggattagagattaggaaggaaggactgatgaagctaaagaaaaatcaaagatgaaaagaacttagtactaggtacagtatttttctgcacacaatgatgttccgtgatcaaggctctaactctggaaagcatgaagaaactccagtccaaaggacagctctgcagccttagcttcagagctaggaggacttgacccagttagagccatggttcccctagactctatctctaaaaagcaggaaatgggtggtttgaggcttcttccttctcagctcctgagtaaaagttgggttcttgcacaatagatttttaaggcttaattctttctt

SEQ ID NO: 187658 - DNA, 926 bp, Homo Sapiens
tttgtacaaaaaagttggcaaataaccagcaggtgggcagatgtcttttttgcgttcctacggacgcgtaggcaagttcgatgcgccggagtgaacagccagggtcccatctctcagccggctcccgggcggtgctagcagggaagagggacgcgccggcgaatgaaacactactagcccggaaagccgccctggaccttccacccgggcagcgagtctggcggcccctcgccgccgccccctccgaccagaacagactgcgctgcgagccccgggcttccgccgcagcgcgcagcaattggaggtgccagaggagaccagcagcagcacttgatttagctgggctgcgggaattccgacctgtacactttccagaagcctgatctctccaagtccgcgcccagggactcgagccccggcttccaggttgacccgagcgcgcccccttcgtgctctcggccgcgttcaccgcgcgaggcctccgggtcctgttaagcccgagcaggtgagcgactgggggtggttcggcgtccgccgagacagagcctggccccgggggtcaccctggggtgctgcctggtacctcccaggtacccgcctcccggagccctaagagaggctgaaaaccacggacgctccaggactccgttttctgtacttttgagtaatttgccatcttttccttgcgcaattcgtacaaagcccttccgtgctcacaaagttgatgattgtgaagaagaaaatgtaggttagaggagaggaagcagcatcaggacaccttaccaccactgttagtaaatgacttgggggtacgggttgcttttccgatctgcaaagtagagggaatgggatgtttgcagacgcagttgctaattgtgcctgagggcgtgggtgcttttgtaccgaaagaacttttggccgttttt

SEQ ID NO: 187659 - DNA, 1439 bp, Homo Sapiens
  misc_feature (131)..(170): n is a, c, g, or t
  misc_feature (298)..(322): n is a, c, g, or t
ttggaatttacctgggtgaattttgtttttgctcaactttagttatttgctcaactttattccttacattgcagtaatttgtttgaatgactgtctagagacatggagagacacggagttgcttgagggtnnnnnnnnnnnnnnnnnnnnnnnnnnnnnnnnnnnnnnnngaaaatttctgttatttgtgtgctcatacataccatttcagtctggtgagtattgttctttcctagagtttacttttaatcttaagtattttccaggtcctttgttgacttctgtttaaaccacagtnnnnnnnnnnnnnnnnnnnnnnnnnacttttgtgtactataatagcttccccaaaattataatttagtcattgtgatgcagatcttcttccaaggcctctactttggattccttgttattaatcattgatgacaaaactagacctagcaagaatccctctatttttttacattgttaactacccaattgacacagagtattttaagtactcatgaaaattgggagacttaagatgctttggggttttactgattttattgtccataggttggcttgtttttaagcctttctttttgtctcataatttagggtttgtctgatccaggtaattatcatgaattttgtcgatttttggctcgtttaaagacaaattatcagctgggagaattagttatggtgaaggaatatcctgaagttattagattgattgctaattttaccattactagcctacagcactgggaatttgctcctaacagtgttcattatttattaactctgtggcaaaggatggtagcatctgttccttttgtgaaatcaactgaaccccacctattagacacttatgcaccagaaatcacgaaggcctttatcacttctcggttggactctgttgccatagttgtgagagatcacttagatgatccactggatgatactgccactgtgtttcagcagttggagcagttgtgcacggtcagcagatgtgaatatgaaaagacatgtgctcttcttgtgcagttattcgaccaaaatgcacagaattaccaaaaacttctgcatccatattctggtgtaactgtggacatcaccattcaggaaggacgtcttgcatggctggtatacttagttgggacagttgtaggaggaagattaacatataccagtacagatgagcatgatgctatggatggagaattatcctgtcgagtttttcagcttatatctttaatggataccggattgcctcgatgttgtaatgagaaaatagagcttgcaattctgtggttcttggatcagtttcgtaaaacatatgttggtgatcaacttcaaagaacctcaaagaagacagacatcttcctgtgaagggcttgtggcaaacctatccaactcgggtttcttcttccttgagaacgatctga

SEQ ID NO: 187660 - DNA, 2228 bp, Homo Sapiens
ttggcaatgaactttgatccccgatggatgatgattcctccttatgtggacccccggctcctccagggtcgtccccctctagacttctaccctcctggtgtgcatccctctggcctagttccccgagagcgttcagacagtgggggctcaagctcagagccatttgaccgtcatgcacctgctatgttacgggaacggggcactccaccggtggatccaaagttggcctgggtgggagatgtcttcaccgccacacccgctgaaccccgcccacttacctcacctctgcgccaggctgcggatgaggatgacaaggggatgaggagcgagactcctccagtacctcccccaccaccctatctggccagttatccaggctttcctgagaatggagcccctgggcccccaatctctcgctttcctctggaggaaccagggccccgtccactcccctggcccccaggcagtgatgaagtggccaagatacaaactccaccacccaagaaggagccccctaaggaggagactgcacagctgacggggccagaagcaggccgaaagcctgcccgcggagtcgggagtggaggccagggccccccaccaccacgcagagagagtcgcacagagacccgctggggccctcgtccagggagcagtcgtcgtggaatccctccagaggagccaggggccccaccccgccgggctgggcctataaagaaacctccaccacctacaaaagtagaagagctgcctcccaagcccctcgaacagggggatgaaacccccaaacccccaaagccagacccactcaagataaccaaggggaagctagggggccccaaggagaccccacccaatggaaatctttcccctgccccaaggcttcggagggactattcgtatgaaagagtgggtcctacctcttgccggggtcggggccgaggcgagtattttgccagagggaggggttttcgggggacctatgggggacgagggcggggagcccgaagccgggaattccgcagttaccgagagtttcgaggagatgatgggcgtggaggtgggacagggggaccaaaccaccctcctgctccccgaggccgcactgccagcgagacacggagcgagggttcagagtatgaggaaatccccaagcggcgccggcagcggggctcagaaacaggcagcgagacccatgagagtgatctggctccttcagacaaggaggctcccacacccaaggagggaacactcacccaggtccctctcgctcccccaccaccaggagccccaccttcaccagccccagcccgcttcactgcccggggtgggcgagtcttcactcccagaggggtgccatctcgccggggccgaggaggagggaggccccctcctcaagtttgcccaggctggagccctccagccaagtctctggctcccaagaaacctcccacaggccctttgccaccaagtaaggagcctttgaaagagaagttgatcccagggcctctgtcccctgtggcgcgcggaggcagcaatggaggtagcaatgtgggcatggaagatggggagcgaccccgaaggaggcgacatgggagggctcagcagcaggataaaccgcctcgtttccggaggctgaagcaggaacgggagaatgccgcaagggggtctgagggcaagccctccctaacccttccagcctccgctcctggacctgaggaggccctcacaacagtcacagtggccccagcacctcgccgggcagctgccaagtctcctgatctgtcaaaccagaactcagaccaagccaatgaggaatgggagactgcatcagagagcagtgacttcaccagtgagcgccgaggggacaaagaggcacccccaccagtactgctgacacccaaggctgtgggaactcctgggggaggtggaggtggagccgtaccaggtatttcagccatgtcccgcggagatctgagccagagagccaaggatttgagtaaacggagcttctcaagtcagcggccaggcatggaacggcagaatcggcgccctggcccagggggcaaggctggcagcagtggcagcagcagtggaggaggcggtgggggtcctggaggaaggaccgggccaggacaaggcgacaagaggagctggccctctcccaagaaccgaagtcgtcctccagaggagcgtccccggggcttcccctgcctcccccaccttcc

SEQ ID NO: 187661 - DNA, 919 bp, Homo Sapiens
ttggctcgccgggaaatgtggtttctccagccggcccggggcggtggccgcaagttgggcttacagcgcggccgatccggcgtggacccgggatggctggaccgggcagcacgggggggcagatcggggctgcggccctggcaggcggcgcgcggtccaaggtagccccgagcgtggacttcgaccatagctgctcggacagtgtcgagtacctgacgctcaacttcgggcccttcgaaacagtgcatcgctggcggcgcctcccgccctgcgacgagttcgtgggtgcccggcgcagcaaacacacagtggtggcctataaagatgccatttatgtatttggtggagacaatgggaagaccatgctcaatgacctcctgcggttcgatgtgaaagactgctcctggtgcagggcctttaccactgggaccccaccggccccccgttaccaccactcggccgtcgtctatgggagcagcatgtttgtctttgggggttacactggggacatttattccaattctaacttgaagaataaaaacgacctctttgaatacaagtttgcaactggccagtggacggagtggaaaattgaaggacggttgccagtcgctaggtcagcccatggggccacggtgtacagtgacaagctgtggatctttgctggctatgacggcaacgccaggttgaatgacatgtggacaattggcctccaggaccgagagctcacctgctgggaggaggtggcccagagtggcgagatccccccatcttgctgcaacttccccgtggctgtgtgccgggacaagatgtttgtattctctgggcaaagcggagcccaaaataaccaacaacctcttccagtttgaattcaaggacaagacgtggacacgcatcccactgaacacctgctccgggg

SEQ ID NO: 187662 - DNA, 2054 bp, Homo Sapiens
  misc_feature (280)..(292): n is a, c, g, or t
  misc_feature (539)..(567): n is a, c, g, or t
  misc_feature (1054)..(1074): n is a, c, g, or t
tgagcaatgctttttctataaaggcacactttgtacaaaaaagttggattaacaatgccataaaaaaagaagtgtatctgttacgtggatatatgggccagcctggatatacaacagagtagtaacctgtgaaacaaacatagaatatcctcttagacattgttcctcataatgcactgacagaattcacatagctcttaatgaaacaatttaagattgatgtacgtacgtttgacttggtctcgctgtcggttaactgtaaagttagggggaagaaagnnnnnnnnnnnnnttaaaagggtagactgagttgagagttttattttaaaaagctaagtcttataattatgaccattaacttgctttggctttattgcagtgactttccaagtttaattattcaaaactttttgaactgactgaattaacttggtatttttaagttgactttttacataaactttataaaccttttataaaaaggaaactataccattactataaatggaaaatcattttacacatcatacctagcaggnnnnnnnnnnnnnnnnnnnnnnnnnnnnnatttattagaatgtgagaaatttattaaaatatagttctaaaaataagtttcttcctgagaagaatgatactgtttatgatgaatccatagtgaaaagacagtgacctctctttcatccagtctagtatatcactaaatcatcattacgatgtttggctatcaagtcattaattactgtcctcctttcactgagctttattcaaattttgacaatcagagcactgggaagaaataaattccacaactgcctttagccttctggatactttcttttataaaatagaaaccttttccacaccagttctgcagcagtcgctattagatgctcgtggtagaacccatcaatcatctggtcctctgggtactggtgagcatccctggtcttctacctgtgagtgggctttgtggtgaattactgtaaatatgctaccctcacttttcttggcagttatgtcgatgaaatcaagagtgtgatgttctagttannnnnnnnnnnnnnnnnnnnnaaatgttcaatattcaactattgaaacaaatgtacatctgtgaactagctaaaatcatcttatgtaccactaatatgcccagcacattttgtaaaacagtcctgatttggcctccaagggtatttattgaactaccagcagtatctaggagaccacgaaggaataccacgaaggaatttatgctccagtgcttgccataatttgtctgagaaggaatctgttaaataaaagcttttatcctctaacctttaccttcatcagaccttataaaaggtcaaatggtgattcttaagttttttagtcacaaatcttacttattcagtattagtgcgaagagtagaatactttcaagtaagcctaaacttacatgaaaacaaattacataaatctagctctgagaataggaaattagtgacaagatcaatctgtaagatgttgagcacttatctgaagtaaatgggtaatgagtttcacatcttataaatacaagttagcatgtgttttctcaagagtccaagggttttcattattggactacagctttaatcttctaaatgttattccccaagattaaagagcatctcaagttagatcaccaaagatcaaaagctaaaaccagaagtatttttgtcattgtggtggtggtagtgttactaattgcctagatttttaaagggaaacatttttttcactgggttgtttcgttgaaaaaaaatagaagcagaaacttgcccaaagtcacagtggtcaaactggaaattgcaccaaaaacttggcatactggttctgaaatccatagttttagcccttatgtatactggttatttggaaaggagaaatatatacgttctgaagtgaagagtgaatgaaagcagaattcagtgaatactttgatacccttgataataatctgcattgtggctacatgtaattttcttcacaagaattgatatatcgaataaaaaatgatgggactgggg

SEQ ID NO: 187663 - DNA, 1964 bp, Homo Sapiens
tgggtgagaagctaagtgaaggagacttactggcagagatagaaactgacaaagccactataggtgagatttcttcagctcttaatggttgaggcactgagtttcccaatgaggaagaggattgccattctttcctataatgagttttgaagtacaggaagaaggttatctggcaaaaatcctggtccctgaaggcacaagagatgtccctctaggaaccccactctgtatcattgtagaaaaagaggcagatatatcagcatttgctgactataggccaaccgaagtaacagatttaaaaccacaagcgccaccacctaccccacccccggtggccgctgttcctccaactccccagcctttagctcctacaccttcagcaccctgcccagctactcctgctggaccaaagggaagggtgtttgttagccctcttgcaaagaagttggcagtagagaaagggattgatcttacacaagtaaaagggacaggaccagatggtagaatcaccaagaaggatatcgactcttttgtgcctagtaaagttgctcctgctccggcagctgttgtgcctcccacaggtcctggaatggcaccagttcctacaggtgtcttcacagatatcccaatcagcaacattcgtcgggttattgcacagcgattaatgcaatcaaagcaaaccatacctcattattacctttctatcaatgtaaatatgggagaagttttgttggtacggaaagaacttaataagatattagaaagggagaagcaaaatttctgtcaatgacttcatcataaaagcttcagctttggcatgtttaaaagttcccgaagcaaattcttcttggatggacacagttataagacaaaatcatgttgttgatgtcagtgttgcggtcagtactcctgcaggactcatcacacctattgtgtttaatgcacatataaaaggagtggaaaccattgctaatgatgttgtttctttagcaaccaaagcaagagagggtaaactacagccacatgaattccagggtggcacttttacgatctccaatttaggaatgtttggaattaagaatttctctgctattattaacccacctcaagcatgtattttggcaattggtgcttcagaggataaactggtccctgcagataatgaaaaagggtttgatgtggctagcatgatgtctgttacactcagttgtgatcaccgggtggtggatggagcagttggagcccagtggcttgctgagtttagaaagtaccttgaaaaacctatcactatgttgttgtaactaactcaagaatttctaaactctcccaggtcacactgattcattcttaacaagatatttatatgttattaaacaggtggttctttttattttaaccagttatttttattattgagtctgtccagataagttatttataatgggcattactgaatttttaaaatgccgattacacccaaatattgtgcacatttaataatcagacaccagatttttagctctgtactcctaattaagggacatgtatgtggccttgcctagccctttggtgataagtacttcctctaggaaatgtacgataggtagaattgtggttccctaaagacaagtacataaaggtgaccctgatgaaaccttgaagttctgaaatttaactgcctaaaatgttctccttagatgtgagagaaagagaaatcaggaaaattaattctcttgggggaagggcttgaattgaagctttactttagaatttagccctggtttgaaattttccattacatgatcttggtttatcatcgatgggaagggtagaaaacttcaaggaaaataagtgaaattttaaaagtcagcattttcttagacctcttcagctgattgtttatttttctatgaattcctacacatggttattccccccttacttgagataatctaaatataaac

SEQ ID NO: 187664 - DNA, 882 bp, Homo Sapiens
ctttgtacaaaaaagttggcctgttcccagcctctgattgcaatttcttttacacaggttgggtagggagagttgtaggtaaggccttaaacaaatgaggccgtttctggaaggatagggctgtgtggtcatgtcccacagcaaacctttgggatcgggggaataagagggtatgggggaaaggttcatagacttaggtgtgagaatgaggtgggaggtgtctggtaaggtcatgggggaagggagatgagagaggagataggcagatgtgggtatggggcccagtgtgagaaggaagacagagaagttcttgaaagctgggggatgtgtgggcaagaggtggattgagcaggatctcagggttatgtcgaggaagggaagaaagaaacagaagtcaggcagaggcgtgtctgtgcaaactggaggactccttccaacttcctggaacaaagcgacatcgccagcagcaggctggcagggagtggttgaggtctgggggccaggccacatggctggagaggaatttcagggagcatagcatcgggaggatgctacatatccagggactccctcctggccttcctgtgtcacttcacaatgtgacagtccccaggcatgcccacaggccaggcccagtcacagctgggcttccacaggtcagaatatgggacaggacatggtcagggagaggaccctgtgagttggtgacatatatgtggcagagatggtagtgttcagctgcttcagcagtgtccccaaccatcccaatagggtgggggcctgtgggccagaggactccatgacagtagccatggagtcccacctgtgccaggtcagagcccaccccggcaggtttcaaagtggtcagcccaatttaaaggg

SEQ ID NO: 187665 - DNA, 1116 bp, Homo Sapiens
  misc_feature (104)..(131): n is a, c, g, or t
ttggcttaattatgctcatttcttcccctaaaccacattatctatatgattggaccctttagtgaaatcagaaaaataaagtaggcatgaataaatgttcaggnnnnnnnnnnnnnnnnnnnnnnnnnnnngtatcagctctttcagtgagtttttattaactagataacacatgtaatacatagtagaatacatttcagaggcagagttcctcggattattttttatggatattagtgttcagcagcttattgtttaaaggggtgccaaatatagcatccttctgttgtttattttaaatatatttttaatgaaaagggacttaaaaagtaaacatgattatctaaattacttaaaattttttaatcttagtaaaaattttaggaaagttatctagtttaaatttcaaatgttttaaaatttgtaggcatttaataaattatctttttttggaggggtggatgctgcatttcattggaaatgtcatttttccaaagtttctagctatatactctctttccttcaaataacataagtctgaaagcaatgaaaacgtcaaaggaaaatgtttatatacatccacatgtttatttaatatgtttctcttaacacctgaaacttgttttaaaacaaaaagcagtattcacttcaaatcataaacttagaattctgtatctcatgtcagaaatatgtttatggccttgcttttaagtggtgctgtttcccacagggcattagttctcagattttggaatgtgaaataatcacctaggaagttggtttaaaatgcacactagtgagcccaccttagacttcttttggggccttcgacctcactttgagaaataccttcttcaggttattctttatgtttgtcctgtggttaaatattagagtattcatgataaaacattttgagaaggggtaagcagtgagttattacccacaatttaaagcaaattttgaatgaatctttaagttaggtatctaccttcccaccagccccccaaaaaacctctcagtagtttctttcagtgtacaaaatgatgagcatttttctatgatgaggttttaaccattattcagggtggtctttatggtgtatatattatccaa

SEQ ID NO: 187666 - DNA, 966 bp, Homo Sapiens
ttcccctttggtttcttctacagcaagtttatcacaaatctgccttttcataggtacaaagatgttccaaagcttctttatagagacctgcttcccgaagaacttgattctgatataagagtagttcactatattcataatccaccttgtcaggggatgtctgttgtgttttctaaattcttctaaaatctttgctgccatttcataatcttctaataaatggtaagcaatagcataaccaatccatgatgctctctgcgcaggtcgaagctgaagtaactgatacctcgtttccctgtaaccctcaagatctcgcatttgaatctgtagtaaggaaaaggtcccttaagatttgaagattgtctttatcccattttagtgcatttctgtaacacttaatggcttcatcatacttcttgtctgacctctgaagaaggccataaacgtgccaacacacatgactcttcaagtcatttctcaaacctctacgaaccaattcataagcttcttcctttttccccaaacagttcaatgttaatcctttcatagccaaggtttctccatgctctgcaaatttgggattagaaagtatttgtttacagaatttcaatccatttctatactgtttatgttcataacacctcaagatccgcttgaagagcgcattctccttgggcgggaggctcacggccggcatcgttccggctgctcccgctgctcccgccaccacccggctcggtcagtcagtttgtccgaccgccgccgctgccgttccgtagctgcttcagccttgaatatctcgatccgccgccaccaccaggcctcgggtgtcgccgcgttgccctacccggacacctcctttttcctcgttgtcttttttcctttctcacttaacgctgccgccgcctcccccactacgggtctccgtcggcggttcacgtggtaactgaacagaccgacagccaa

SEQ ID NO: 187667 - DNA, 963 bp, Homo Sapiens
ttgggcagatcttattccagttccacttacttacatgatcatttcgagagatgtaatgttgattgctgctgttttttatgtcagataccgaactcttccaacaccacgaacacttgccaagtatttcaatccttgctatgccactgctaggttaaaaccaacattcatcagcaaggtgaatacagcagtccagttaatcttggtggcagcttctttggcagctccagttttcaactatgctgacagcatttatcttcagatactatggtgttttacagctttcaccacagctgcatcagcttatagttactatcattatggccggaagactgttcaggtgataaaagactgatgaaagtcatccctcactgttagtaaggaagcagtatacatcaatgggaacagggcccatggaaatgtacaggagtttccctattttggtgttcagcttgaaaaaggacttgtcagaatcaactgtgtcatcaaaatttaagtaatgtgcattgaaaataaggttgatcatgggaatatgcagaatttccaatgtatttttaaatacaaataaaattgtaatttagaatttttaatcttaggtttcttgattaatttataagagatcaattattgtcagtcttttttgtatgttttttaaaaacatagtccagagcatgggcagaattgacacctctcttttaagtgaaatttggattgctcacaaagcactaggaaatgtcatggggttcaaatatatatcctacacaactgggcaatacatttttgtttgatttttaggtctgtgtatacattaacagttcatgtaattaatacctgatcatttgggataatgaaagtgaagttagttgtaaatgaagtaaagtataaaagagaataaaaatgcggtacctttttaagaatattaacatacagaaggtaggaaattcaattatcgggaaatctttccac

SEQ ID NO: 187668 - DNA, 1474 bp, Homo Sapiens
  misc_feature (163)..(193): n is a, c, g, or t
ttggaaacccgaccttggaatcagaagcctggggctcctctagggagtggctggccccccgggaggccagaggaggcccatcgctgtcttctgtgctgaacgagctgcccagtgctgccacccttcggtaccgagaccctggggtgctgccttggggggcgcnnnnnnnnnnnnnnnnnnnnnnnnnnnnnnncagaaaggccttcacagaagtcacccagacagagctgcaggaccctcacccttcccgggaactgccctggcccatgcaggccagacgggcacacaggcaaagaaatgccagcagggaccaggtggtctatggctctggaactaagacggaccgatgggcgcggctacttcggaggtccaaggagaaaacaaaggaaggcttgcgaagcctgcagccctgggcgtggacactgaagaggatcgggggccagtttggcgccggcacggagtcctacttctccctgctgcgcttcctgctccttcttaacgtgctggcctctgtgctcatggcctgcatgacgctgctgcccacctggttgggaggcgctcccccaggccctcccggccccgacatctcctcgccctgcggctcctataacccccactcccagggcctggtcacctttgccacccagctcttcaacttgctctcgggtgagggttacctggaatggtcccctctcttctatggcttctacccgccccgcccacgcctggcggtcacctacctgtgctgggcctttgccgttggcctcatctgcctcctgctcatcctgcatcgctcggtgtctgggctgaagcagacactgctggcggagtccgaggctctgaccagctacagccaccgggtgttctcggcctgggacttcggtctctgcggggacgtccacgtgcggctgcgccagcgcatcatcttgtacgaattaaaggtggagctggaggagacagtggtgcggcgccaggctgcggtgcggacgctgggccagcaagccagggtttggttggtgcgggtgctgctcaacctgctggtggtcgcgctcctgggggcagccttctatggcgtctactgggctacggggtgcaccgtggagctgcaggagatgccccttgtccaggagttgccactgctgaagcttggggtgaattaccttccgtccatcttcatcgctggggtcaattttgtgctgccgcccgtgttcaagctcattgctccactggagggctacactcggagtcgccagatcgtttttatcctgctcaggaccgtgtttcttcgcctcgcctccctggtggtcctgctcttctctctctggaatcagatcacttgtgggggcgactccgaggctgaaggactgcaaaacctgtgggctacaattacaaacaacttccgtgctgggagactgtcctgggcccaggaaatgtacaaacttctgctctttgatctgctgactgtctggcagtc

SEQ ID NO: 187669 - DNA, 1256 bp, Homo Sapiens
ttgggccttgcccgggccgctgccccgtccctggattcggggctggacgcagcaagcggggcgctgtgtccccaagctccccgtcctcggccaggcgggcaccacggcaggggctgagctaccctcatggaagggagaggaccgtaccggatctacgaccctgggggcagcgtgccctcaggagaggcatccgcagcttttgagcgcctagtgaaggagaattcccggctgaaggaaaaaatgcaagggataaagatgttaggggagcttttggaagagtcccagatggaagcgaccaggctccggcagaaggcagaggagctagtgaaggacaacgagctgctcccaccaccttctccctccttgggctccttcgaccccctggctgagctcacaggaaaggactcaaatgtcacagcatctcccacagcccctgcatgccccagtgacaagccagcaccagtccagaagcctccatccagtggcacctcctctgaatttgaagtggtcactcctgaggagcagaattcaccagagagcagcagccatgccaatgcgatggcgctgggccccctgccccgtgaggacggcaacctgatgctgcacctgcagcgcctggagaccacgctgagtgtgtgtgccgaggagccggaccacggccagctcttcacccacctgggccgcatggccctggagttcaaccgactggcatccaaggtgcacaagaatgagcagcgcacctccattctgcagaccctgtgtgagcagcttcggaaggagaacgaggctctgaaggccaagttggataagggcctggaacagcgggatcaggctgccgagaggctgcgggaggaaaatttggagctcaagaagttgttgatgagcaatggcaacaaagagggtgcgtctgggcggccaggctcaccgaagatggaagggacaggcaagaaggcagtggctggacagcagcaggctagtgtgacggcaggtaaggtcccagaggtggtggccttgggcgcagccgagaagaaggtgaagatgctggagcagcagcgcagtgagctgctggaagtgaacaagcagtgggaccagcatttccggtccatgaagcagcagtatgagcagaagatcactgagctgcgtcagaagctggctgatttgcagaagcaggtgactgacctggaggccgagcgggagcagaagcagcgtgactttgaccgcaagctcctcctggccaagtccaagattgaaatgga

SEQ ID NO: 187670 - DNA, 1329 bp, Homo Sapiens
  misc_feature (799)..(846): n is a, c, g, or t
ttggggcggttcccgttccaccgcggagccggatgtttgccgagccttgacaggcgtggcagagggagcagtgcccgagcgcggtttctcttaaggttctgcagggcaaggctgtctgggacaggcttggccatggatccgctctcagagctgcaggatgatctgaccttggatgacaccagcgaggctctgaaccagctgaagctggcctccatcgatgagaagaactggccctcggatgaaatgcctgacttccccaagtcagatgactccaaaagcagctccccggaacttgtcacacacctgaagtgggatgacccatactatgacatcgcccggcaccagatcgtggaggtggcaggagatgacaagtatgggcggaagatcattgtgtttagtgcctgtcgaatgccccccagccaccagctcgaccacagcaagctcctggggtacctgaagcacaccctggaccagtacgtggagagtgactacacacttctgtatctgcaccacggcctgaccagcgacaacaagccctccctcagctggctccgtgatgcctaccgggagtttgaccgcaagtacaagaagaacatcaaggccttgtacatcgtgcatccaaccatgttcatcaaaactctgctcatcctcttcaagcccctcatcagcttcaagttcgggcagaagatcttctatgtgaattacctgagcgagctgagcgagcacgtgaagctggagcagctggggatccctcgccaagtgctcaaatatgacgacttcctgaaatccacacagaagnnnnnnnnnnnnnnnnnnnnnnnnnnnnnnnnnnnnnnnnnnnnnnnnaaccagcagtttggagtctcgctgcagcacctccaggagaagaatccagagcaggagcccattcccattgtactcagggagactgttgcctacttacaggcccacgctctcaccaccgagggcatcttccggaggtcggccaacacccaagtggtccgggaagtgcagcagaagtacaacatggggctgcctgtggatttcgaccagtacaatgagctgcacctgccagcagtcatcctcaagaccttcctccgggagcttcctgagcccctgctcacctttgacctctacccccatgtggtgggcttcctcaacattgatgaaagccagagggtgccagcgacactgcaggtcctccagacgctgcccgaggagaactaccaggtgcttcgtttcctgactgctttcctggtgcagatttctgcacacagtgaccagaacaagatgaccaacactaacctggctgttgttttcggccctaac

SEQ ID NO: 187671 - DNA, 1012 bp, Homo Sapiens
ggaaacatttcctgaattatcactggatagttgaaaacaaagaaataaaaatatataaatatgaaggtcattctccaagtattagaacagaatacggatggaatcacttcagtaaagttattcataaacatttgcatggttacccacatactgtatcaccttccaaaaaatcaaacacatgagaggaaggggaacctcaaatgagatgtcttttctccatgggatttggtcaacgcatatcagtaagataatttctttgctatatacacaacataaacatttgaaaatgcagaatacattgtgtaaattaaaaattttgtcagctttgttgtatggggagtaactacacagaccacccacacaaacatttaaaatatactgtgtatatattatcttacaaaaatcgcatgtgtaagggaataaggcctttatttccagagcatcttaacataggattaatatgggtatattcatcttttatattttagacttcaaattctttaacatctcagctattaacattatgcgtagtacctaagacaacatatgagtagtggcataacacaatttcaactacagtgcttggttgcattcacatgacgtaccatctagaactgaccaaacagaatttcagaactgcccaatttaaagacctgttaagaaaataaaatgcaaccccgtcatatgagcccagtttgtctctcagagcgttgctatatatactggaagcctgacacttcagagtatgtacttaaatgaagtatttggtaataatgtcagcttcagcctgcaaagtgttctagtcagcatagaaatctgaaagtctaaaattacttctgtatgttaattaaaactaactgctgtttgaatttgagtatgttttgtctggaggctagttggagatttttttctcccttctagcaacaaattggctaagtggtcaacctctgtggctcacagttttgtaaaaaaagcatacagaaaagaaactaggctgggcacagtggctcat

SEQ ID NO: 187672 - DNA, 976 bp, Homo Sapiens
tgccaaaatgttttagaaacagcacacttctttcatttttcattttcagaagactctgtacctacacctgatgaagtaagcatgctaacagcaattgcactcttcctgtggtctgctagtaatgaaataataggagtccagtcattacagaatggctgcatgaacagatttaaaaatgcattaaattcatgcgacccatgggttcaagccaaatgttaccagcttctcctctcagtcttccagcattccaatcgtgccctttcaactccttatattcattcattagctccaatagtggttgaaaagctaaaagctgttgaaagaaacagaccagccagtaacatagagcttttagcggttcaagaaggaataaaagttcttgaaacactggttgctcttggtgaagaacaaaacagagtccagctacttgctcttttagttcccactttgatatcttacctgctggatgaaaattcttttgcctcagcaagttcagcttccaaagatcttcatgagtttgcactccagaatttaatgcatattggacctctgtatccacatgctttcaagacagtaatgggggctgctcctgagttgaaagtgcgtctagaaactgccgttcgagcaagccaagcgagcaaagctaaagcggctgccagacaaccagcccccgccatacattctgcaccaacaattaagctaaaaacaagttttttttaatttgtaatttcatttatttgtatttatgttgtcaactagcccctaattagtgatggccactgtatcattccaggctacctatgggttctgttttatttgtatattggtattatagtgcttccaagtaggttaagtgaaataatgctcacaccacttatttgatttttaaggagtgattttttttatcatgtgggtgaatatgttttcattttcctcctaaaatgtttctcttttgttaacttatttaatttttcaa

SEQ ID NO: 187673 - DNA, 2188 bp, Homo Sapiens
ttggctcatctttccgctcttagctgggagtgctccgcctagtcacttttcttaaggtggctcgtcgaggcctgacttcttccccgaaatcacgtccctagacagcctcctattttaccactaactttactcctgcagttattcagcggtaggaaactgaaaccaaaaaccagtgtaagcaagtaaacatctaaactgtttcaggagccgcgtagaaggaacgcggaggtgtgccccggaagcggaagtagattctcctacagaaaggctggactacgcggagtggtgacgtttcctcattgggcggaaggttcgctggcactccgttggtcttccagctggtgggagttgacgacgcggtgctgggcgttgggaccctactttatctagttcgggaagttgggttgtggggtcatacctgtctgtctgctcccagctttcttgggtttcttccgacggcgtggggcctcgctaaggaattcccggcccctcagggccacggctttagcggtgtcttttgcgagttcttcgtaagtacatcttaaagctgtcaagatggttctagcagaccttggaagaaaaataacatcagcattacgctcgttgagcaatgccaccattatcaatgaagaggtattgaatgctatgctaaaagaagtctgtaccgctttgttggaagcagatgttaatattaaactagtgaagcaactaagagaaaatgttaagtctgctattgatcttgaagagatggcatctggtcttaacaaaagaaaaatgattcagcatgctgtatttaaagaacttgtgaagcttgtagaccctggagttaaggcatggacacccactaaaggaaaacaaaatgtgattatgtttgttggattgcaagggagtggtaaaacaacaacatgttcaaagctagcatattattaccagaggaaaggttggaagacctgtttaatatgtgcagacacattcagagcaggggcttttgaccaactaaaacagaatgctaccaaagcaagaattccattttatggaagctatacagaaatggatcctgtcatcattgcttctgaaggagtagagaaatttaaaaatgaaaattttgaaattattattgttgatacaagtggccgccacaaacaagaagactctttgtttgaagaaatgcttcaagttgctaatgctatacaacctgataacattgtttatgtgatggatgcctccattgggcaggcttgtgaagcccaggctaaggcttttaaagataaagtagatgtagcctcagtaatagtgacaaaacttgatggccatgcaaaaggaggtggtgcactcagtgcagtcgctgccacaaaaagtccgattattttcattggtacaggggaacatatagatgactttgaacctttcaaaacacagccttttattagcaaacttcttggtatgggcgacattgaaggactgatagataaagtcaacgagttgaagttggatgacaatgaagcacttatagagaagttgaaacatggtcagtttacgttgcgagacatgtatgagcaatttcaaaatatcatgaaaatgggccccttcagtcagatcttggggatgatccctggttttgggacagattttatgagcaaaggaaatgaacaggagtcaatggcaaggctaaagaaattaatgacaataatggatagtatgaatgatcaagaactagacagtacggatggtgccaaagtttttagtaaacaaccaggaagaatccaaagagtagcaagaggatcgggtgtatcaacaagagatgttcaagaacttttgacacaatataccaagtttgcacagatggtaaaaaagatgggaggtatcaaaggacttttcaaaggtggcgacatgtctaagaatgtgagccagtcacagatggcaaaattgaaccaacaaatggccaaaatgatggatcctagggttcttcatcacatgggtggtatggcaggacttcagtcaatgatgaggcagtttcaacagggtgctgctggcaacatgaaaggcatgatgggattcaataatatgtaaagaaaatgccttaatataaactgactcagttgaatacctaatttgctgagacctcagcgtttcccttctttttgcgaattggggagaaagtgtattttttcttgcttatcaagcactc

SEQ ID NO: 187674 - DNA, 1276 bp, Homo Sapiens
  misc_feature (780)..(793): n is a, c, g, or t
ggagacacaagacttactgcaaaaatatttttccaaggatttaggaaagaaaaattgccttgtattctcaagtcaggtaactcaaagcaaaaaagtgatccaaatgtagagtatgagtttgcactccagaaatttgacattactgtaaattatctcatggaatttttgctaaaattcagagatacgggaagttcacaatctaccttattgtagacatgaaatgcgaacacttacttacatattaatgttaactcaaccttagggacctggaatggttgcattaatgctataatcgttggatcgccacatttcccaaaaataataaaaaaatcactaaccttttttaagggaaaatatttaaagttttacaaaattcaatattgcaattatcaatgtaaagtacatttgaatgcttattaaaactttcccaattaattttaactgtgttattgaatttacttttactaaactactgttctctttgtctcttttttaactaggctctgattttgacccctaatttaagctttaagaatagaaatcagctaatatagaatcagacaaaaaggggattaaatgagcagtttgagttacattattttattgtattaaatttatttgatttatattgtcatgttctcttgccagagagaatctgtaggaaaatactgtatcttgtatactgatcattggctttttctagaaaaactgtctctgattctggacaaagctcagttatagttacgagaaagatatggtacagggaggaaaatactgccnnnnnnnnnnnnnnaaagagattttcagactaaatagaaatgtcaaaatgatgtatcaatggttcttttttagaacaagttttcaaagcataaaaagaggttgagagaaataacatatttattgattcacataagtatgtttttcttcattaatcgtctggagaaacccacttgtcattaatttgttttgggctaggttttcaaacttaccaaattgctttaaaaaagcaatttggaaggtaatttgataggctttccaacttaaccaaattttttattgtaattcttggatagtatttttgtctttttcaattcatttgtctttttcagtatagtttttgttaaggcaaatgtcttcccttaatatcccaaatattgctaataaacggtagaagatgctttggaaattaaaattatctcgctgttggttagactaaacactgttatcttcagcccaatatcacatatggatcaaattattttcctttttgttgttt

SEQ ID NO: 187675 - DNA, 1717 bp, Homo Sapiens
ttggcaggctcatggcgccggcgtcgcggttgctcgcgctctgggcgctggcggctgtggctctacccggctccggggcggagggcgacggcgggtggtacgccttcgtcaggcccgtcatcctgcagggactcacggacaactcgaggttccgggccctgtgctcccgcgacaggttgctggcttcgtttggggacagagtggtccggctgagcaccgccaacacctactcctaccacaaagtggacttgcccttccaggagtatgtggagcagctgctgcacccccaggaccccacctccctgggcaatggtgaggcagccctaggcggcggtagggggtggggacgcttggagtctccaggtgccaggatccctgtccccgccgtctctgttggcagacaccctgtacttcttcggggacaacaacttcaccgagtgggcctctctctttcggcactactccccacccccatttggcctgctgggaaccgctccagcttacagctttggaatcgcaggagctggctcgggggtgcccttccactggcatggacccgggtactcagaagtgatctacggtcgtaagcgctggttcctttacccacctgagaagacgccagagttccaccccaacaagaccacgctggcctggctccgggacacatacccagccctgccaccgtctgcacggcccctggagtgtaccatccgggctggtgaggtcagtggctggcaggagagggccaggccaggctagaggcccgcagctaatctctgctgcacccccttcctccaccaggtgctgtacttccccgaccgctggtggcatgctacgctcaaccttgacaccagcgtcttcatctccaccttcctcggctagccaaaacagctggcaggactgccggtcacacaccagcacgtcccacctcgtgctcacggattttattacacagatagtggcggcaatggcctcagcccagcccaccctcacctgcttttccagcccacaaagggggacgatcacggcccagcaaaagcgatgctgagaggggaaacagtccagagtccaacagcagaacttgggggaagcggtcggggtggccaggaacataaactatgtataggggccgggggcttctgcccagggctcccctggaccaggacgccaggtagggcagggaacctcagtagtcctccacccagccattctcagagatgaatgcgtcaataacctccttcatagccaagttggggatgagctgttcctgggtcagggggctccgggtcacggggtcaaaatgacccacacgctgcagtgacaagaagggcagagggcagtcatggggcccaggaccatgccactggccctgctcccccagccgcaggcctcacctgcaggtgctcctcgatgtccttgcggtcgtaggtgatgccactgggcgtgatgcacggctcccgcatcagctcaaagctgatcttgccacacaggtagtcggggatgtctcgcttctgtggcacaggggcacacggtcagaggctgaaaaggggcactgcacgagcacctgccagccatcggcagcaagcgacacacactcaccttcctcttctcatccacctgagaaaaaagctcgtccatgtccgccatgtacttgtcctgtgaagagttgagtgctgtgcttgggggagacaccccacctcccttcttccatggggca

SEQ ID NO: 187676 - DNA, 1072 bp, Homo Sapiens
ttggttttcccttttagttctaaacagcttgtgaaatgtcctaggagaaaccaaccagttgtagttttgaatcatcctgacgcagatgcaccagaagtagtaagtgtaatgaaaactattgctaaatttaatggacatgtacttaaggtttcattgtcaaaaagaactataaatgctttactgaaaccagtttgttataaccctcctaaaacaacttatgatgatttttccaagaggcacaaaacatttaaacctgttagttctgtgaaagaaagatttgtgctaaaattaacactcaaaaagacaagcaaaaacaattaccagattgtgaagactacctctgaaaatattttgaaggctaaatttaactgttggttttgtggtagagtatttgacaatcaggatacttgggctggtcatgggcagagacatttaatggaagctactcgggattggaacatgttagaatagtttaccataattaccaaggaaaagaaaagtaaaattaccttagaagaaaacaacgggttcagttaccataatgcagacattttctacttcagtatagtacctgaaatcgaacattttaaaagttgattgtatttctgtggaagagtaaaagttgtatgtatgatatttgaaaatgctatccctgcactcaaaagttttgaaagaaactaatcacagcacagaagtaccttgatttaattttttaaacgtgttctcgggaagttagggctaaagaaaattttgataaaacaattttcccactttagttctttagtgactcttagtagagggtaatggctgacacccccattccctctcttcttccaccagccttatgcatctaagtgtagctcctctggagatggagagctctttcatcgtagaactgaaggagtttctcacatttgtgaagatactttgagagaacctgggtaaagaagtcactctatatctgctaaatatagttattttgaaggatattaggctccttgaaagtacatttaactcactacagttacacctcatacaatgcttgaagagttttgggcaagtaaattttttt

SEQ ID NO: 187677 - DNA, 1559 bp, Homo Sapiens
ttggcaagaaggacgcagatactgtgatcctgttgttttaacatatcaagctgaacggatgccagagcaaatcaggctgaaagttggtggtgtggacccaaagcagttggctgtttatgaagagtttgcacgcaatgttcctggcttcttacctacaaatgacttaagtcagcccacgggatttttagcccagcccatgaagcaagcttgggcaacagatgatgtagctcagatttatgataagtgtattacagaactggagcaacatctacatgccatcccaccaactttggccatgaaccctcaagctcaggctcttcgaagtctcttggaggttgtagttttatctcgaaactctcgggatgccatagctgctcttggattgctccaaaaggctgtagagggcttactagatgccacaagtggtgctgatgctgaccttctgctgcgctacagggaatgccacctcttggtcctaaaagctctgcaggatggccgggcatatgggtctccatggtgcaacaaacagatcacaaggtgcctaattgaatgtcgagatgaatataaatataatgtggaggctgtggagctgctaattcgcaatcatttggttaatatgcagcagtatgatcttcacctagcgcagtcaatggagaatggcttaaactacatggctgtggcatttgctatgcagttagtaaaaatcctgctggtggatgaaaggagtgttgctcatgttactgaggcagatctgttccacaccattgaaaccctcatgaggattaatgctcattccagaggcaatgctccagaaggattgccccagctgatggaagtagtgcgatccaactatgaagcaatgattgatcgtgctcatggaggcccaaactttatgatgcattctgggatctctcaagcctcagagtatgatgaccctccaggcctgagggagaaggcagagtatcttctgagggaatgggtgaatctctaccattcagcagcagctggccgcgacagtaccaaagctttctctgcatttgttggacaggtagagcttttggaaagaaagatgcaccagcaaggaatactgaagaccgatgatctcataacaaggttctttcgtctgtgtactgaaatgtgtgttgaaatcagttaccgtgctcaggctgagcagcagcacaatcctgctgccaatcccaccatgatccgagccaagtgctatcacaacctggatgcctttgttcgactcattgcactgctcgtgaaacactcaggggaggccaccaacactgtcacaaagattaatctgctgaacaaggtccttggtatagtagtgggagttctccttcaggatcatgatgttcgtcagagtgaatttcagcaacttccctaccatcgaatttttatcatgcttctcttggaactcaatgcacctgagcatgtgttggaaaccattaatttccagacacttacagctttctgcaatacattccacatcttgaggcctaccaaagctcctggctttgtatatgcctggcttgaactgatttcccatcgga

SEQ ID NO: 187678 - DNA, 1382 bp, Homo Sapiens
acaaaaaagttggctaattggtaatacaacacagttaacatgataagtttttttcctcccatcttggaattaaattggcaaatgagtactgcagaaagtaccattctttggcccctcagatcagaagaaatgtgactgctatgtaatggagtgaacttgacaaagaaggggtggcctatgtatgcacagctactgattgatttattcaaatatttagcgcctttccttagaaatgtggaactcaccaaacctatgcaaatcctctacaagggcactttaagagtgctgctggttcttttgcatgatttcccagagttcctttgtgattaccattatgggttctgtgatgtgatcccacctaattgtatccagttaagaaatttgatcctgagtgcctttccaagaaacatgaggctccccgacccattcactcctaatctaaaggtggacatgttgagtgaaattaacattgctccccggattctcaccaatttcactggagtaatgccacctcagttcaaaaaggatttggattcctatcttaaaactcgatcaccagtcactttcctgtctgatctgcgcagcaacctacaggtatccaatgaacctgggaatcgctacaacctccagctcatcaatgcactggtgctctatgtcgggactcaggccattgcgcacatccacaacaagggcagcacaccttcaatgagcaccatcactcactcagcacacatggatatcttccagaatttggctgtggacttggacactgagggtcgctatctctttttgaatgcaattgcaaatcagctccggtacccaaatagccacactcactacttcagttgcaccatgctgtacctttttgcagaggccaatacggaagccatccaagaacagatcacaagagttctcttggaacggttgattgtaaataggccacatccttggggtcttcttattaccttcattgagctgattaaaaacccagcgtttaagttctggaaccatgaatttgtacactgtgccccagaaatcgaaaagttattccagtcggtcgcacagtgctgcatgggacagaagcaggcccagcaagtaatggaagggacaggtgccagttagacgaaactgcatctctgttgtacgtgtcagtctagaggtctcactgcaccgagttcataaactgactgaagaatcctttcagctcttcctgactttcccagccctttggtttgtgggtatctgccccaactactgttgggatcagcctcctgtcttatgtgggcacgttccaaagtttaaatgcatttttttgactcttggccaaaatttagaagatgctgtgaatatcattttgaacttgtgtaaatacatgaaagaga

SEQ ID NO: 187679 - DNA, 1574 bp, Homo Sapiens
  misc_feature (312)..(427): n is a, c, g, or t
  misc_feature (447)..(586): n is a, c, g, or t
ttggctggctccttgcctttgaggctttagcttagtgttttgaacacacagtaaactctaggtagtttattcccagctgtcctaaaagtctattgtcttttgaattggaagttgcttgaggccacctggcccagtcctggcacatgttaggtgcctcagttaaatatctgcaaaacgaatgtgagcctcatgagcaatgcctacagaggttaaaaacgctcctttgcgtttctcagggagtgttaacactcaagaagtagtgaatgtttgaagcagaggatcttattctctgagattctcatttcttacgtnnnnnnnnnnnnnnnnnnnnnnnnnnnnnnnnnnnnnnnnnnnnnnnnnnnnnnnnnnnnnnnnnnnnnnnnnnnnnnnnnnnnnnnnnnnnnnnnnnnnnnnnnnnnnnnnnnnngagacggagtttcgctcttnnnnnnnnnnnnnnnnnnnnnnnnnnnnnnnnnnnnnnnnnnnnnnnnnnnnnnnnnnnnnnnnnnnnnnnnnnnnnnnnnnnnnnnnnnnnnnnnnnnnnnnnnnnnnnnnnnnnnnnnnnnnnnnnnnnnnnnnnnnnggttgagaaatgggctcattggcttctgaggagagatactgggatgtctcggccttgctgatggcattaccccttccagctgcctctctccagaatgatctcaaccagggtggccagggagcactaattccaagaggcaggccaactggtccttggaggaggagaagagcagactgctggctgaggcagcacttgagttgcgggaggagaacacgaggcaggaacggattctggccctggccaagcgactagccatgctgcggggacaggaccccgagagagtgaccctccaggactatcgcctcccagacagtgatgacgacgaggatgaggagacagccatccaaagagtcctgcagcagctcactgaagaagctgccctggatgaggcaagtggctttaacatccctgcagagcaggcttctcgaccctggacgcaaccccgcggggcagagcctgaggcccaggatgtggaccccaggcctgaggctgaggaagaggagctcccctggtgctgcatctgcaatgaggatgccaccctacgctgcgctggctgcgatggggacctcttctgtgcccgctgcttccggtgggtgcaggtggaatgttctgtgcgagagctcaagggctgcctggatccctgacttgtatccctttgttccacagagagggccatgatgcctttgagcttaaagagcaccagacatctgcctactctcctccacgtgcaggccaagagcactgaagacaccctggtcctcccggaagggcagtcccacaggcagcggcacccatttctgggccccgccacaggacgtccgatgggagagcttgtctggctctactgatgatggataggccccttcctgagccttggtgtccctggaatgaggaaagattctccattcgagagaatgactgggagggaagaagtcggggccctcctattagaagcccagactgggaagtgagaggcatgatggggaga

SEQ ID NO: 187680 - DNA, 1684 bp, Homo Sapiens
ttggctcaagagccacggctttgacaccctgctccagaacctgcatgaggacctgaagccactgttcaagaggttcacgcacacccgctgggcggcccctgtggagaccctggaaaacatcatcgccactgtagacacgaggctgcctgagttctcagagctgcagggctgtttccgggaggagctcatggaggccttgcacctgcacctggtgaaggagtacatcatccaactcagcaaggggcgcctggtcctcaagacggccgagcagcagcagcagctggctgggtacatcctggccaatgctgacaccatccagcacttctgcacccagcacggctccccggcgacctggctgcagcctgctctccctacgctggccgagatcattcgcctgcaggaccccagtgccatcaagattgaggtggccacttatgccacctgctaccctgacttcagcaaaggccacctgagcgctatcctggccatcaaggggaacctatccaacagtgaggtcaagcgcatccggagcatcttggacgtcagcatgggggcgcaggagccctcccggcccctattttcccttataaaggttggttagcttttcctgtggcctgacctgcctgtgagtgcccagcaagccttgggcacaccccgctgggagctgttaagagcagcgctggttctcggttcctcccgggtctcctgtgctctgatgctacttctgcctagccctggcggaggtgcaggccctgtcagctggaactggcagaccttggtttgtttacatgtccgatgggggcaggagctcccatcctgggcagccaaccaggcaacaccaaggactctttgtaaacgatagctgatcgtgtgcacgcaaggaaagaaccaggagggagagtgcagccaggctcagggatccccggacacctctgtccagagcccctccacagtcggcctcatgactgtcctcctcgtgggtggggccgagggccctcttcagctctctggagacaggggccgagcctcacccatctgccctctgcagcccagggccgccgtgagcgggattcagcaatggtggaatggaagacagaactggaagagaaagaaggaaaagatgagctctcgtctggcaggggcttttagggtcctgtggcgagctgtgagcaccgccagcgttagacgtcacatccaggtggccccacggcccctacaggctggccctgcaatggggccctgagccctccctcttcatcccccaaggcctcaactagagggtggtcccccgagggcttggtgtctactaccgaagggcccaagacctcctgggtcctctcaggctcccccttccccaaggcagggacaggccctgggggtgccaccgtgggccctgccacccagaagtctggctgaggtctgggcaggggcagggcaagcttgacctctcactgttgaccctttggcctctgtatttgtttcctattgccgtgacaggtttccacaaacttcgtggatcaaaacgaggtcttccagttctgcgggtcagaaagctgacccggggctcaaatctgggtgtcggcagtcctgcactccttctggaggctctaggggagaattcatttctggccttttcatttttagaggctgaccgtaattcttgacttcaagctcctccatcttc

SEQ ID NO: 187681 - DNA, 1119 bp, Homo Sapiens
ttggcgccatccgcgcagcagctgctaccttgcctggggcagaccctctaccagcatgtgatgtttgtgttccccgtgacgctgctgcattgggcccgcagcccggccctcctgccccacgaagctcccgagctgctcctgctgctgcaccacatcctgttctgcctgctactcttcgacatggagttcttcgtgtggcacctgctgcaccacaaggtgccctggctgtaccgcaccttccacaaggtgcaccaccagaactcgtcctcgttcgcgctggcaacgcagtatatgagcgtctgggaactgttttctttgggcttcttcgacatgatgaacgtcacactgctcgggtgccacccgctcaccaccctgaccttccacgtggtcaacatctggctttccgtggaggaccactccggctacaacttcccttggtccactcacagactggtgcccttcgggtggtacgggggtgtggtgcaccacgacctgcatcactctcactttaactgcaacttcgctccgtactttacacactgggacaaaatactgggaacgctgcggactgcatctgtcccagcgcggtgatgtggctgcggtgggtgcccctaagactcgggactgctgtgcctttcacacttgaatgaagagaaacacctgagctatatatttttttaaagcaactaacttattgctttatgtttatctatgaaaaccatagataaaatctgatgcatttttgtaatctgacaaagtaatttacatactgtttgtgtatcaatacaattttgtgttcttggtattcttagtctagctcacctcaatagccttgaatcctgcatatgaattagacattcatcactggcatatttagaatatctctaaaaggacttgtttgtagaataaggaattttctatgtttcaaagtgttctaaaacctggctaaaagaatgtatttttgtggatggtgttgacttctgactctaaaagcaatcaaacatgtttctgctggacagtgaccaagaattatagtaccttcttatatttttttatagaactgtatatttattttgaaagaaatgttattcgtgctttaaaaaggaaaaaaaccatgaa

SEQ ID NO: 187682 - DNA, 1411 bp, Homo Sapiens
tacaaaaaagttggggctcatcatccgccacatgcccctgctctccaagctccacctcagttactgtaaccacgtcaccgaccagtctatcaacctgctcactgctgttggcaccaccacccgagactccttaaccgagatcaacctgtctgactgcaataaggtcactgatcagtgcctgtccttcttcaaacgctgtggaaacatctgtcatattgacctgaggtactgcaagcaagtcaccaaggaaggctgtgagcagttcatagccgagatgtctgtgagtgtccagtttgggcaagtagaagaaaaactcctgcaaaaactgagttagtccaaggataagtatgtaaatacggggcgggctctgggaggggagagactttacaaaaatgagggcttttattttccatttggaacgtgggacaacagaccacaacgcaattccattttgcaagtctttccaagggagaagctgttcaaccacccgtttgggggatgagtgagccgacactttcctttggtctttctgaatcgtaactgcactgctttctggaccatttctaaggcggcctttacaagaagacattcctgtcggagaggagggtggacttcggagaaattctcatactgaagcatgagcttaggagtttctgttagtggtagtggtgttttggacacttcattccttgcaacaccgaggttttgggtgttgacataaagtggaccacacaccacatctgctgccgtcttgacacttttttttgtttggttggttttgttacatcttacattatgcagaactatttttgtacaaattgtttaaaagttatttatgcaaggtttgaatgcataccagtgtttttattgttttgagattgccaattttcctgatttccttaaggtaggagagaatttaacgtgtacttcatcgacacaacccatctacaaatgtgcccagatctaacaaagtaggctaagaccttccacttaaaagcatgtttaactggaagttgagagtctgctttgtacctcaagagttacatgagcatgttgtggataaatgtaaattatagtcaaagtaagatactctgccaagtttcctctgtagagaattcacttttctcaaattttagaatttcgacttcagcctttgcactcaggaggttctgctccagcatgagctcttgtacttacatagatctaatttatacagtgagtcaagacgtagaataaatgctcccacatagcctttcttttgcttttgcttctctcctctgaagtgtgagttgagttctcatttaagtttgtaacatggctatttcctagttgtaaagttctgcattaataagtgccattgttgtaaaggtggtgttttccctagaccttccctgatggcaattttaccttt

SEQ ID NO: 187683 - DNA, 988 bp, Homo Sapiens
ttggtatagtccttatagttatggatataatgggctgggctacaaccgcctccgtgtagatgatcttccacccagtagatttgttcagcaagctgaagaaagcagcaggggtgcatttcagtccattgaaagtattgtgcatgcatttgcctctgtcagtatgatgatggatgctaccttttcagctgtctataacagtttcagggctgtattggatgtagcaaatcacttttcccgattgaaaatacactttacaaaagtgttttcagcttttgcattggttaggactatacggtatctttacagacggctacagcggatgttaggtttaagaagaggctctgagaatgaagacctctgggcagagagtgaaggaactgtggcatgccttggtgctgaggaccgagcagctacctcagcaaaatcttggccaatattcttgttctttgctgttatccttggtggtccttacctcatttggaaactattgtctactcacagtgatgaagtaacagacagcatcaactgggcaagtggtgaggatgaccatgtagttgccagagcagaatatgattttgctgccgtatctgaagaagaaatttctttccgggctggtgatatgctgaacttagctctcaaagaacaacaacccaaagtgcgtggttggcttctggctagccttgatggccaaacaacaggacttatacctgcgaattatgtcaaaattcttggcaaaagaaaaggtaggaaaacggtggaatcaagtaaagtttccaagcagcaacaatcttttaccaacccaacactaactaaaggagccacggttgctgattctttggatgaacaggaagctgcctttgaatctgtttttgttgaaactaataagttccagttgcacctgattccattgggaaagatggagaaagcaagatctttgatatctttcatgtttgcctgcagttgaacatactttaaagtactttttaaa

SEQ ID NO: 187684 - DNA, 917 bp, Homo Sapiens
gggacaggtcctgggtagcactcgtgcctcaggtgcagtggccgggttggcgatctgtgtcacgagggagatgctctcactgctctctgatggagtcactctgctgggggctcaactgaagtcaccagattctcttcacaggggctctgggggccaggttctccttcagggaatgtagaaattttggccacaggaacctttgcctcttttggagatatgggtgaaatgcccatgagctcctcttcctcctcctcccagccgggctcttcagagatgctctgttccgcccgctgcttcagggcgtccctccgggcctgctcctgctctaactgatggactttatagaaataccgatgccagaattctgaatgggaaacagctgctggaaccatcttggtgtagagggcccggatggaggggctgcctacaaggagctctgagatctcccccttcttctcctccaagcagaactgggaaagccaggcgtcaaacaattccgggggcccatctggttcattacagtaggttgctgggtccgactgcaggctatagaggcgagccttggtgccatcatagggctcagctgtgccagacggtgtgcccatcagggtgatgacatcgcagtcgatggttttgtctggcgaaggggcaaaggtgtctgagatcacccctaggaagtcagataaccctttcttcatcttctctgttgctcctgaggagccttccgtagccagcttctccttgaccacgctggccgtggctgcgatggtacaggccgtgtcatgctgcaccacctgggtaaactccgtcaggtcccgcttcataaactccaaggcttcagaggacttctctttgactgcttggtagctctgctgcagccagctccgccaccatcccacgtcctccccttccgccaa

SEQ ID NO: 187685 - DNA, 970 bp, Homo Sapiens
tttgtacaaaaaagttggccagttgggcggccaactctgcaggaagtggtgggaatccggtcagacttggccgtggaggctggagctccctatgctggcgattggctgcaggggagcttcgtctgggcaaggaagggaccgatcggtaccgcatggtagtagggggtgcccaggcaggggacgcaggcacctaccactgcactgccgctgagtggattcaggatcctgatggcagctgggcccagattgcagagaaaagggccgtcctggcccacgtggatgtgcagacgctgtccagccagctggcagtgacagtggggcctggtgaacgtcggatcggcccaggggagcccttggaactgctgtgcaatgtgtcaggggcacttcccccagcaggccgtcatgctgcatactctgtaggttgggagatggcacctgcgggggcacctgggcccggccgcctggtagcccagctggacacagagggtgtgggcagcctgggccctggctatgagggccgacacattgccatggagaaggtggcatccagaacataccggctacggctagaggctgccaggcctggtgatgcgggcacctaccgctgcctcgccaaagcctatgttcgagggtctgggacccggcttcgtgaagcagccagtgcccgttcccggcctctccctgtacatgtgcgggaggaaggtgtggtgctggaggctgtggcatggctagcaggaggcacagtgtaccgcggggagactgcctccctgctgtgcaacatctctgtgcggggtggccccccacgactgcggctggccgccagctggtgggtggagcgaccagaggacggagagctcagctctgtccctgcccagctggtgggtggcgtaagccacgatggtgtggcagagctgggagtccggcctgtatgaggccctgtcagcgtagagcttggtggggccccaaagcc

SEQ ID NO: 187686 - DNA, 778 bp, Homo Sapiens
ttggccggagcctccccagagctggccgcgcaggatgggcgccctcaggcccacgctgctgccgccttcgctgccgctgctgctgctgctaatgctaggaatgggatgctgggcccgggaggtgctggtccccgaggggcccttgtaccgcgtggctggcacagctgtctccatctcctgcaatgtgaccggctatgagggccctgcccagcagaacttcgagtggttcctgtataggcccgaggccccagatactgcactgggcattgtcagtaccaaggatacccagttctcctatgctgtcttcaagtcccgagtggtggcgggtgaggtgcaggtgcagcgcctacaaggtgatgccgtggtgctcaagattgcccgcctgcaggcccaggatgccggcatttatgagtgccacaccccctccactgatacccgctacctgggcagctacagcggcaaggtggagctgagagttcttccagatgtcctccaggtgtctgctgcccccccagggccccgaggccgccaggccccaacctcacccccacgcatgacggtgcatgaggggcaggagctggcactgggctgcctggcgaggacaagcacacagaagcacacacacctggcagtgtcctttgggcgatctgtgcccgaggcaccagttgggcggtcaactctgcaggaagtggtgggaatccggtcagacttggccgtggaggctggagctccctatgctgagcgattggctgcaggggagcttcttctgggccaggaa

SEQ ID NO: 187687 - DNA, 763 bp, Homo Sapiens
agagctggccgcgcaggatgggcgccctcaggcccacgctgctgccgccttcgctgccgctgctgctgctgctaatgctaggaatgggatgctgggcccgggaggtgctggtccccgaggggcccttgtaccgcgtggctggcacagctgtctccatctcctgcaatgtgaccggctatgagggccctgcccagcagaacttcgagtggttcctgtataggcccgaggccccagatactgcactgggcattgtcagtaccaaggatacccagttctcctatgctgtcttcaagtcccgagtggtggcgggtgaggtgcaggtgcagcgcctacaaggtgatgccgtggtgctcaagattgcccgcctgcaggcccaggatgccggcatttatgagtgccacaccccctccactgatacccgctacctgggcagctacagcggcaaggtggagctgagaggtactgggccctgggacggggtggagccacacaccctctcaaggcagaaagtcaaggccacaagtgacctatctagttgccccttaggttttgtagccaaggaacttgaggcccaaagaggttaagtgatttgcacaaagtcacccaataactcagtggctgatgtgggactcaaacccagagttcctcacccaggccagtgctcatcttatcatattaagacccctcctgggagaagaagtgtccttaagttgtccagtccactttccattcccagaacgaagaagactgttggggttgaata

SEQ ID NO: 187688 - DNA, 2002 bp, Homo Sapiens
ttggcttcatgtcacattggctagcaccatgtcaagagcccatttctaagccagtcactaataaaaataatgaaattaccatggctggcttagactgattaagattcacccctgggttagggagggccccacctccctaaaaacacatcttcccttgaaaacctggacaaaattacggttttgtttgcaaggatgaattgagttgggagggcaaccaacagtgtctgccacaacaggaaggttgttcagcctcactgtttctccttacaggctctgccaacataaatgaccgcagcatgctgggaaagcgtgacagtgaaatggctgtcattgtgcaagatacagagactgttccttcagtaatggatggaaaagagtaccaagctggccggtttgcccgaggacttcggctacagtgctttagggttgtccttggctatcttgatgacccaagtgaggacattcaggatccagtgagtgacaaattcttcaaggaggtgtgggtttcaacagcagctcgaaatgctacaatttatgacaaggttttccggtgccttcccaatgatgaagtacacaatttaattcagctgagagactttataaacaagcccgtattagctaaggaagatcccattcgagctgaggaggaactgaagaagatccgtggatttttggtgcaattccccttttatttcttgtctgaagaaagcctactgccttctgttgggaccaaagaggccatagtgcccatggaggtttggacttaagagatattcattggcagctcaaagacttccaccctggagaccacactgcacacagtgacttcctggggatgtcatagccaaagccaggcctgacgcattctcgtatccaacccaaggaccttttggaatgactggggagggctgcagtcacattgatgtaaggactgtaaacatcagcaagactttataattccttctgcctaacttgtaaaaagggggctgcattcttgttggtagcatgtactctgttgagtaaaacacatattcaaattccgtataccaaaatccatttcctttgtaacaagaatttaccagtaactgtgatctaggttgccaaaagttgtctgaatctccttattcttctctgatcttcatttatgcagccaatgtctagctggacctgccctcatcttgcagttcatacaggcactgtttgagagattgtttattattagatgttgtaatgctgcttcaagattcttcatggttacatgggatgcccctgctcatctggtcctgaagtagtaacattcacccaaatgaggatatagtcattattccttttcagtcactgtacgaacacggcagactttagcctacacagtagactgtgttaggcacttctggtaacattgacactatatcttgacaccactaagcaacaggaaggaataaattccaatattgagacagagatttatttcattttgctcccaaaggcactgacaacatgagtccttgtgattaggcccacctgatcaaatgtaaaaacatgcatgggatatttgattacgtaacaaccagctaaaactgagagcacacagccttcggaaaccctcaaggtgtcgaggaggatcagatccagataagagaagatgattccttctagtcctgtaaaatttcctgtcatccttagctgctgggttgattgaaatttgatctctacatttcaaaatcaaactagtgaatacagtttgtctttcaagagaatcagaggcatcgtaactcctaccaagttagtaagtatgagtctaaccttgtttgacattcaggtcttctgctacatttatctttctttgagaaaaattaattgattataaaatatgtgctactttcacttacattattaaatatgtattaacgccttctcaccagggcttccagtgaagttacaatgccctagtctgtgaattagtctggaaacgttgttttccttttccggatgttagagtacc

SEQ ID NO: 187689 - DNA, 1524 bp, Homo Sapiens
ttggcaatgaggtcggggtcgatgtcaaccgtgccattgcccacccttacagccaggccttgatccagtatgtttgtggcctgggacctcggaaagggacccacctcctgaagatcctgaagcagaacaacacccggctcgagagccggacccagctggtcaccatgtgccacatgggtcccaaagtcttcatgaattgtgctggcttcctcaagatcgacacggcctccctgggggacagcactgactcatatattgaagtccttgatggttcccgtgtccaccctgagacttatgagtgggctaggaagatggcagtggatgccctggaatacgatgaatcagccgaggatgccaatcctgcaggagcccttgaagaaatcttggaaaacccagagcgactgaaagacctggaccttgatgcctttgcagaagagctggagaggcagggctatggtgacaaacacatcacactctatgacatccgggcagagctgagctgtcgatataaggacctccggacagcctaccgctctcccaacacagaggagatcttcaatatgttaaccaaagaaacaccagagaccttctacattggaaagctcatcatctgcaatgtcactggcattgcccacaggcgtccccagggtgagagctatgaccaggcgatccgcaatgatgagacagggctgtggcagtgccccttctgtcagcaggacaatttccctgaactaagcgaggtgtggaaccactttgacagcggttcgtgcccaggccaggccatcggtgtcaaaacacggctagacaatggtgtcaccggcttcatccccaccaaattcctcagtgacaaagtggtaaagcggccagaagaacgagtgaaggtgggaatgactgttcactgccgcatcatgaagattgacattgagaagttcagtgcagacctgacctgccgcacctcagacctcatggacaggaacaatgagtggaagctgcccaaagacacctactatgactttgatgctgaagctgcagaccacaagcaggaggaggacatgaagcggaagcagcagcggaccacatacatcaagagagtgatcgcacacccatccttccataatatcaatttcaagcaagcagaaaagatgatggagaccatggaccagggtgatgtgattatccgaccaagcagcaagggcgagaaccacctgacagtgacctggaaagtcagtgatggcatctaccagcatgtggatgtgcgggaggagggcaaggaaaatgccttcagcctgggagccactctgtggatcaacagtgaggaattcgaagatttggatgagattgttgctcgctatgtccagcccatggcatcctttgcccgggaccttctgaatcacaagtattatcaggactgcagcggtggggaccgcaagaaattagaggagctgctcatcaaaactaaggaggagaagcccaccttcatcccttatttcatctgtgcctgcaaggaactgcccggcaagttcc

SEQ ID NO: 187690 - DNA, 1202 bp, Homo Sapiens
cctataaaagccaactttgtacaaaaaagttggcttcccgagtctcaccctcccaggcagctcctacactcaactgcttctctaggaaaggtctcacctccagcctggagcagtcgggattacagaaagccccatccttggcttagggagcgccatgacgactgaaattggttggtggaagctgactttcctccggaaaaagaaatccactcccaaagtgctgtatgagatccctgacacctatgcccaaacagagggagatgcagaacccccgaggcctgacgctggaggccccaacagcgactttaacacccgcctggagaagattgtggacaagagcacaaagggcaagcacgtcaaggtctccaactcaggacgcttcaaggagaagaagaaagtgagagccacgctggcagagaaccctaacctctttgatgatcacgaggaaggacggtcatcaaagtgaagggctgaggagggtgctagcacctcttggctccctgccatcagccagatctgagacaggaccttgccacgctggcctctttggccatagctgaagctgtggggccagttgatacctgctggcaggaaatggctgttttttaggtttgtatttatgtgccgccacttttgtaaggcctgggagatcccagggtcctccaccctccccctgaccacatacaaaggcactctagttcaagggtgaaaagtctcacccaggaggaacagccctccttgaagcaatggcagggccagcagggaggtgggcatggcagggaatggagtgagccagacagacttcacctccttactggacacagggtcaagggcgagtttcaattgctgctccctttactttctctacctgtgactactccctggaccaatcctgaggagggcacattttccagaagccacgtgataggggctggtttctgtggagccagaggcagagacactgaacttgagctcacctcctaacaccggcagtaaacttcctggaactttgccctcaggtgcgggaggggacagaggaccctggcactctgttagggtgctgtagaagactagattgatggtagtttggcctgttagttcctgttttggccatgacttttgcagatggcaagtcacacaccctcaagggaagctacacgggccaaatcgggggagtggggtgggggattttctcttctccc

SEQ ID NO: 187691 - DNA, 1518 bp, Homo Sapiens
ttggcacaacttcagctccattaattcgccgtcagctctcacatgaccacgaatctgttggccctcctagcctggatgctcagcccaactcaaagacagaaagatcaaaatcatatgatgagggtctggatgattacagagaagatgcaaaattgtcctttaagcacgtatctagtctgaagggaatcaagatcgcagacagccaaaagtcatcagaagactctgggtccagaaaagattcttcctcagaggtcttcagtgatgctgccaaggaagggtggcttcatttccgaccccttgtcaccgataagggcaagcgagttggtggaagtattcggccatggaaacagatgtatgttgtccttcggggtcattcactttacctgtacaaagataaaagagagcagacgactccgtctgaggaagagcagcccatcagtgttaatgcttgcttgatagacatctcttacagtgagaccaagaggaaaaatgtgtttcgactcaccacgtccgactgtgaatgcctgtttcaggctgaagacagagatgatatgctagcttggatcaagacgatccaggagagcagcaacctaaacgaagaggacactggagtcactaacagggatctaattagtcgaagaataaaagaatacaacaatctgatgagcaaagcagaacagttgccaaaaacacctcgccagagtctcagcatcaggcaaactttgcttggtgctaaatcagagccaaagactcaaagcccacactctccgaaggaagagtcggaaaggaaacttctcagtaaagatgataccagtcccccaaaagacaaaggcacatggagaaaaggcattccaagtatcatgagaaagacatttgagaaaaagccaactgctacaggaactttcggcgtccgactagatgactgcccaccagctcatactaatcggtatattccattaatagttgacatatgttgcaaattagttgaagaaagaggtcttgaatatacaggtatttatagagttcctggaaataatgcagccatctcaagtatgcaagaagaactcaacaagggaatggctgatattgatatacaagatgataaatggcgagatttgaatgtgataagcagtttactaaaatccttcttcagaaaactccctgagcctctcttcacaaatgataaatatgctgattttattgaagccaatcgtaaagaagatcctctagatcgtctgaaaacattaaaaagactaattcacgatttgcctgaacatcattatgaaacacttaagttcctttcagctcatctgaagacagtggcagaaaattcagaaaaaaataagatggaaccaagaaacctagcaatagtgtttggtcccacccttgttcgaacatcagaagacaacatgacccacatggtcacccacatgcctgaccagtacaagattgtagaaacgctcatccagcaccatgactggtttttcacagaagaaatgctgaagagcctcttacaac

SEQ ID NO: 187692 - DNA, 1199 bp, Homo Sapiens
  misc_feature (227)..(235): n is a, c, g, or t
  misc_feature (850)..(871): n is a, c, g, or t
  misc_feature (876)..(913): n is a, c, g, or t
  misc_feature (916)..(929): n is a, c, g, or t
ttggtatttaacctatttccacattctctctcactcacattttctcagtgtgcccttctcttatctgccatgtccatagccataattccaccatcatacagatcaggcagtgtttaaaatgatggtaggtagcacagtggacagtctttgatcatcatgtagaatatggctatgaatcaggaaagagattagaacatttaataatgtatgtacagctggtgcttagnnnnnnnnnaatctaaatttaattaccttattggatatttgatatttggtatttaatcacagtcatctttaacagcttacactgattggtgttttatctcctgtgatcctttgatggctttttttgcctaccatttcacagaggtttagacagcagtagtagctccctaggagagtttactgatgaaacagcctctgcaagattttaaaagttttgttcttttatagactgatttagaaaaacaaatgattagttaaaaaaagaaaatatacatttgttggtaactaatgttattttttaaaacctggacctttctggaagggcagcatataaaaacatcagtcccgaggaggggacaacaatactacctcactactacatctgtgatgactggttgttcaaacacaatggagtgtgtaaggtatatgttttataattcataaccatagcctcgatcatcaagaaatactttcgaaatttcattttccttcagaatatcttaagagtgctaaatttttaactgcctttttgtcgagtcaaactgtgggattctgatttgtattaaaattgtaagctcctcactggtatactatcatcctggaggggtgttgtatggctgagcannnnnnnnnnnnnnnnnnnnnnagacnnnnnnnnnnnnnnnnnnnnnnnnnnnnnnnnnnnnnnatnnnnnnnnnnnnnnaatgctaaccttgtagcatgtgaagaatgtctgtaccttgatacgatagttacataatcagtatatttggtttctagatcactgtgcttattttgtttcaatctctgactaaaaatacttaaatttggtttgttaattcttattttagaaattataattttagtttatatttattttcggttatagcttactgaagaaatctttccagttagaaggagttctaatattcacatgttctaatactttgtttattgtaaaaacagctaattt

SEQ ID NO: 187693 - DNA, 1358 bp, Homo Sapiens
  misc_feature (293)..(301): n is a, c, g, or t
  misc_feature (917)..(941): n is a, c, g, or t
  misc_feature (943)..(992): n is a, c, g, or t
ttggttcagttctgtgtacattttaaaggataatggtgaacattttaatgggtttcccttgccctttccatatttaacctatttccacattctctctcactcacattttctcagtgtgcccttctcttatctgccatgtccatagccataattccaccatcatacagatcaggcagtgtttaaaatgatggtaggtagcacagtggacagtctttgatcatcatgtagaatatggctatgaatcaggaaagagattagaacatttaataatgtatgtacagctggtgcttagnnnnnnnnnaatctaaatttaattaccttattggatatttgatatttggttatttaatcacagtcatctttaacagcttacactgattggtgttttatctcctgtgatcctttgatggctttttttgcctaccatttcacagaggtttagacagcagtagtagctccctaggagagtttactgatgaaacagcctctgcaagattttaaaagttttgttcttttatagactgatttagaaaaacaaatgattagttaaaaaaagaaaatatacatttgttggtaactaatgttattttttaaaacctggacctttctggaagggcagcatataaaaacatcagtcccgaggaggggacaacaatactacctcactactacatctgtgatgactggttgttcaaacacaatggagtgtgtaaggtatatgttttataattcataaccatagcctcgatcatcaagaaatactttcgaaatttcattttccttcagaatatcttaagagtgctaaatttttaactgcctttttgtcgagtcaaactgtgggattctgatttgtattaaaattgtaagctcctcactggtatactatcatcctggaggggtgttgtatggctgagcannnnnnnnnnnnnnnnnnnnnnnnncnnnnnnnnnnnnnnnnnnnnnnnnnnnnnnnnnnnnnnnnnnnnnnnnnnatgagagagagaaatgctaaccttgtagcatgtgaagaatgtctgtaccttgatacgatagttacataatcagtatatttggtttctagatcactgtgcttattttgtttcaatctctgactaaaaatacttaaatttggtttgttaattcttattttagaaattataattttagtttatattaatttcggttatagcttactgaagaaatctttccagttagaaagaggttctaatattcacatgttctaatactttgtttattgtaaaacagctaaatttggagatacgtagagccttgttttctctgtgtggttcagctactttccatttggtattacacagtcaaatttacatttatctatt

SEQ ID NO: 187694 - DNA, 993 bp, Homo Sapiens
ttgggccagcggccgccaaggaaatgagcaggcctggccggcccgggccccgagggaggccagccgcgagcggagaggtcggcggtccgcagagcagggtcccgtggaccggagagcgggatgccgaggtgctcaggaacagcccatggaagaatcatatgaagaggtggtgactgaggtcgtaagcaggagtggacatgtttggatttccaacagctaccctgctggactgtcatggaagatatgcccagaatgtagcgttcttcaatgtgatgactgaagcccaccacaaatatgaccactctgaggctacaggatcctcaagctgggatatccaaaattctttcagaagagagaagctggaacaaaaatccccagattcgaagacactacaggaagattcacctggagtgagacaaagggtctatgagtgccaggagtgtggaaaatccttccggcaaaaaggtagtctaacgttacatgagagaatccacactggtcaaaagccttttgagtgcacccactgtggaaaaagcttcagggccaaaggcaatcttgttacacatcaacggatacacacgggagagaagccttatcagtgcaaggagtgtgggaaaagcttcagtcaacgaggtagtctcgctgtccacgagagactccacactggacagaaaccctacgagtgtgctatttgtcagagaagcttcaggaatcagagtaaccttgctgttcacaggagagttcacagtggtgagaagccctatagatgtgatcagtgtggaaaagccttcagtcagaaaggaagcttaattgttcacatcagagtccacacaggcctgaagccctatgcctgtacccagtgcaggaagagtttccacaccagggggaattgtattctgcatggcaaatccacacaggagagacaccctatctgtgcggccagtgtggaaaaaagcttcacccagagagggagtctggctgtgcaccagcgaa

SEQ ID NO: 187695 - DNA, 1416 bp, Homo Sapiens
actttgtacaaaaaagttggctcgtccgcccgccagtcctctcaacgcgcgcttggccgcccgacgacgcgggagccgcacgcgccggacgaggctcgctgcgctccctgttgcccagcgcgggcccgttgaggcggagccctcagttcccggccaggacacggtctgggccgccgaatctccggccgaagagcggcggcggcagcggcgggaaaaaaatgaagaatgaaattgctgccgttgtcttctttttcacaaggctagttcgaaaacatgataagttgaaaaaagaggcagttgagaggtttgctgagaaattgaccctaatacttcaagaaaaatataaaaatcactggtatccagaaaaaccatcgaaaggacaggcctacagatgtattcgtgtcaataaatttcagagagttgatcctgatgtcctgaaagcctgtgaaaacagctgcatcttgtatagtgacctgggcttgccaaaggagctcactctctgggtggacccatgtgaggtgtgctgtcggtatggagagaaaaacaatgcattcattgttgccagctttgaaaataaagatgagaacaaggatgagatctccaggaaagttaccagggcccttgataaggttacctctgattatcattcaggatcctcttcttcagatgaagaaacaagtaaggaaatggaagtgaaacccagttcggtgactgcagccgcaagtcctgtgtaccagatttcagaacttatatttccacctcttccaatgtggcaccctttgcccagaaaaaagccaggaatgtatcgagggaatggccatcagaatcactatcctcctcctgttccatttggttatccaaatcagggaagaaaaaataaaccatatcgcccaattccagtgacatgggtacctcctcctggaatgcattgtgaccggaatcactggattaatcctcacatgttagcacctcactaacttcgtttttgattgtgttggtgtcatgttgagaaaaaggtagaataaaccttactacacattaaaagttaaaagttcttactaatagtagtgaagttagatgggccaaaccatcaaacttatttttatagaagttattgagaataatctttcttaaaaaatatatgcactttagatattgatatagtttgagaaattttattaaagttagtcaagtgcctaagtttttaatattggacttgagtatttatatattgtgcatcaactctgttggatacgagaacactgtagaagtggacgatttgttctagcacctttgagaatttactttatggagcgtatgtaagttatttatatacaaggaaatctattttatgtcgtttgtttaagagaattgtgtgaaatcatgtagttgcaaattaaaaaatagttttgaggc

SEQ ID NO: 187696 - DNA, 1305 bp, Homo Sapiens
ttggctcaagacatggataataatggcaaagaggaatctaagattgatcatttgaccaacaacagaaatgatcttatttcaaaggaggaacagaacagttcatctttgctagaagaaaacaaagttcatgcagatttggtaatatccaaaccagtgtcaaaatctccagaaagattaaggaaagatatagaagtattatccgaagatactgattatgaagaagatgaagtcacaaaaaagagaaaggatgtcaagaaggacacaacagataaatcttcaaaaccacaaataaaacgtggtaaaagaaggtattgcaatacagaagagtgtctaaaaactggatcacctggcaaaaaggaagagaaggccaagaacaaagaatcactttgcatggaaaacagtagcaacagctcttcagatgaagatgaagaagaaacaaaagcaaagatgacaccaactaagaaatacaatggtttggaggaaaaaagaaaatctctacggacaactggtttctattcaggattttcagaagtggcagaaaaaaggattaaacttttaaataactctgatgaaagacttcaaaacagcagggccaaagatcgaaaagatgtctggtcaagtattcagggacagtggcctaaaaaaacgctgaaagagcttttttcagactctgatactgaggctgcagcttccccaccgcatcctgccccagaggagggggtggcagaggagtcactgcagactgtggctgaagaggagagttgttcacccagtgtagaactagaaaaaccacctccagtcaatgtcgatagtaaacccattgaagaaaaaacagtagaggtcaatgacagaaaagcagaatttccaagtagtggcagtaattcagtgctaaatacccctcctactacacctgaatcgccttcatcagtcactgtaacagaaggcagccggcagcagtcttctgtaacagtatcagaaccactggctccaaaccaagaagaggttcgaagtatcaagagtgaaactgatagcacaattgaggtggatagtgttgctggggagctccaagacctccagtctgaagggaatagctcgccagcaggttttgatgccagtgtgagctcaagcagtagtaatcagccagaaccagaacatcctgaaaaagcctgtacaggtcagaaaagagtgaaagatgctcacggaggaggaagttcatcaaaaaagcagaaaagaagccataaagcaacagtggtaaacaacaaaaagaaggaaaaggcacaaatagtagtgatagtgaagaacttt

SEQ ID NO: 187697 - DNA, 1739 bp, Homo Sapiens
ttggcagagatcgcagcagctgggcaggtgccttgccagggtcctgatgctcctccagttcaggatgaaggccaggggcctgggttcgaagcacgggtagtggtcttggtagaaagcatgatcccacgctccacctggaagggtcctgaacgtctggcccatggaagccccttccggggcatgagccttctgcacctggctgctgcccagggctatgcccgcctcatcgagaccctgagccagtggcggagtgtggagactggaagcttggacttagagcaggaggttgacccgctcaacgtggatcatttctcttgcacccctctgatgtgggcttgtgccctgggacacctggaagctgctgtgctccttttccgttggaaccgacaggcactgagcattcccgactctctgggccgtctgccattgtctgtggctcattcccggggtcatgtgcgccttgcccgctgccttgaggaactacagagacaggagccttcggtggagcccccatttgccctatcgccaccctcctccagcccagacactggtctgagcagcgtctcctcgccctcggagctgtcggatggcaccttttccgtcacgtcagcctattctagtgccccagatggcagtcccccccctgcacctctgccagcctctgagatgactatggaggacatggccccaggccagctttcctctggtgtcccagaagcccccctactcctcatggactatgaggctaccaactccaaggggcccctctcctcccttcctgccctcccaccagcttcagatgatggggctgctccggaggacgctgacagcccacaggctgtggatgtgatcccggtggacatgatctcactagccaagcagatcatcgaagccacaccggagcggattaaacgagaggacttcgtggggctgcccgaggctggagcctcaatgcgggagcggacaggggctgtggggctcagtgagaccatgtcctggctggccagctacctggagaatgtggaccatttccccagctcaacccctcccagcgaactgccctttgagcgaggtcgcctggctgtcccttcagcaccctcctgggcagagtttctctctgcatccaccagtggcaagatggaaagtgattttgccctgctgacactatcagatcacgagcagcgggaactgtatgaggctgcccgagtcatccagacggccttccgaaagtacaagggccggcggctgaaggagcagcaggaggtagcagcagctgtaatccagcgctgttaccggaagtacaagcagtttgcactctataagaagatgacccaggcggccatcctgatccagagcaagttccgaagctactatgaacagaagcgatttcagcagagccgccgagcggctgtgctcatccagcagcactaccgctcctaccgccgcaggcccggccctccccaccggacttcggccaccctgcctgcccgcaacaaaggctcctttctcaccaagaagcaggaccaggcagcccggaagatcatgagattcctgcggcgctgccgacacaggatgagggaactgaagcagaaccaggagctggaaagggcttccccagccggggactggccacatgacctggccaccgccctttctcaccaccctgggggcgcctcgtgcagtcttaacagggagagggctttctggggcaaggggagcccctgtcggcagctttcctg

SEQ ID NO: 187698 - DNA, 940 bp, Homo Sapiens
ttgggtctcgggcctcgacctttgaattccccgctccggctccaagatgtcagcaacgctgatcctggagcccccaggccgctgctgctggaacgagccggtgcgcattgccgtgcgcggcctggccccggagcagcgggttacgctgcgcgcgtccctgcgcgacgagaagggcgcgctcttccgggcccacgcgcgctactgcgccgacgcccgcggcgagctggacctggagcgcgcacccgcgctgggcggcagcttcgcgggactcgagcccatggggctgctctgggccctggaacccgagaagcctttttggcgcttcctgaagcgggacgtacagattccttttgtcgtggagttggaggtgctggacggccacgaccccgagcctggacggctgctgtgccaggcgcagcacgagcgccacttcctcccgccaggggtgcggcgccagtcggtgcgagcgggccgggtgcgcgccacgctcttcctgccgccaggacctggacccttcccagggatcattgacatctttggtattggagggggcctcttggaatatcgagccagcctccttgctggccatggctttgccacgttggctctagcttattataactttgaagatctccccaataacatggacaacatatccctggagtacttcgaagaagccgtatgctacatgcttcaacatccccaggtaaaaggcccaggcattgggcttttgggcatttctctaggagctgatatttgtctctcaatggcctcattcttgaagaatgtctcagccacagtttccatcaatggatctgggatcagtgggaacacagccatcaactataagcacagtagcattccaccatttgggctatgacctgaggagaatcaaggtagctttctcaagccacatgaacatcttggatataaggaatgc

SEQ ID NO: 187699 - DNA, 956 bp, Homo Sapiens
ccaactttgtacaaaaaagttggagaaaaggttcgtcatcaatgtaccaatatttaaggacaagaatacaccatctccatttatagaaacatttactgaggatgatgaagcttcaagggcttctaagccggatcatatttacatggatgccatgggatttggaatgggcaattgctgtctccaggtgacattccaagcctgcagtatatctgaggccagatacctttatgatcagttggctactatctgtccaattgttatggctttgagtgctgcatctcccttttaccgaggctatgtgtcagacattgattgtcgctggggagtgatttctgcatctgtagatgatagaactcgggaggagcgaggactggagccattgaagaacaataactataggatcagtaaatcccgatatgactcaatagacagctatttatctaagtgtggtgagaaatataatgacatcgacttgacgatagataaagagatctacgaacagctgttgcaggaaggcattgatcatctcctggcccagcatgttgctcatctctttattagagacccactgacactgtttgaagagaaaatacacctggatgatgctaatgagtctgaccattttgagaatattcagtccacaaattggcagacaatgagatttaagccccctcctccaaactcagacattggatggagagtagaatttcgacccatggaggtgcaattaacagactttgagaactctgcctatgtggtgtttgtggtactgctcaccagagtgatcctttcctacaaattggattttctcattccactgtcaaaggttgatgagaacatgaaggtagcacagaaaagagatgctgtcttgcagggaatgttttatttcagaaagatatttgcaaaggtggcaatgcagtggtggatggttgtggcaaggcccagaacagcacgga

SEQ ID NO: 187700 - DNA, 1080 bp, Homo Sapiens
  misc_feature (174)..(182): n is a, c, g, or t
  misc_feature (530)..(539): n is a, c, g, or t
tataaaatataggaccaaaccctagtatttaaacataaacagggtcagctgaagcagcctttattgcaatctcctcaacttagcatattacactttaaatatttatgcctgtaaagatctgcataatctacaatacagagttatttcagaagcagttgacttaactagttgagnnnnnnnnncaacaaacttcaacgcaaagctataataattatctgaaacttatttacaattaaacatttagggtcctgatttacaaaactcagtgcctttcatgatttattgatgagttttatagagaaagtaaccagtatgtagaatattccccaggtaaaatctggagtgaatggcttttagaggaaagtctatcagtatgcttaactaaaaactaaagagtgacaaaactgtatacagcagcaatcagaataacaggccacaagagaagaacgccatttttgacaatatcctttgtatgtataggaagaaaaatgattgccaccccccacccctgccgccaacttttttagttnnnnnnnnnnttgtccttaataatcactacatgtgaattctgggtaataatctcctttctttctatagagttgtgtttaaacttaattcctgcatcagcaaatttaaacaaagaaaagttcctttgataacagccatcagagttcaatgggtatttattcagaggggaaagcttggggcaaggtgaccaagtgattattccaattgcaaaagaaacatcatagataaggtgctagaaacccaagattacccttgaagcactttcaatggattcaagtgatttaatgtagacaacaaaggaaatgacaaaggaaaattaacgagagaaaatgtttttaaagagaaaaatttcaataaatcaggtcccaggtagtctttaaaagaacaaaaatttacagtaaacattttaactctggaatgcaagtattgtacaattaccagtacatttacaaaactgcttagacagtaggttgctccagagtaagaatttaaaaatgtacaagccagttcatgatgacttttcgtcggggacaaacttttttgtacaaagtt

SEQ ID NO: 187701 - DNA, 389 bp, Homo Sapiens
  misc_feature (206)..(215): n is a, c, g, or t
tgtacaaaaaagttggtgatagactttcctctaaaagccattcactccagattttacctggggaatattctacatactgcttactttctctataaaactcatcaataaatcatgaaaggcactgagttttgtaaatcaggaccctaaatgtttaattgtaaataagtttcagataattattatagctttgcgttgaagtttgttgnnnnnnnnnnctcaactagttaagtcaactgcttctgaaatagctctgtattgtaaattatgcagatctttacaggcataaatatttaaactgtaatatgctaacttgaaaagattgcaatatttgttgcttcagctaaccctgtttatgtttaaataccacccgcttgttctatattttatac

SEQ ID NO: 187702 - DNA, 1697 bp, Homo Sapiens
  misc_feature (1149)..(1203): n is a, c, g, or t
ttggctttaataagggcaagacagaaaattctggttcttatggtgggtgacaaaggtggctaaggaaaacacttgcagacagcttgattggtatttgtcatagtgcttcagggaggcaaaaagggagctcttgtgcccaggctgtgctagatagtgttgaatggaggcagaaaatagcactttatggtttattatagctggcaatccaaaaaagaaactgtttgagaccagttcgagaaattccatttgctctattcttcctagctctaagatggtttgcaggcttgaccttcaagacagcataaagtgagtccttttgtccctcttcaggttgcacctgtctaactatgacagggatcatagcaggttgcttaatgatacagcaggatcctggcttccagaatccctggacctggggcatccccaactggtccaaccgtccgggtgagtttagtgattctggtttgcccttccctagttagagaaaaactgctctgacatgttcatatttatttatttgtatttccttggtctgggtgagtttcttcacccagtctttgagctaaagattaggtcgaaggtactggggctggccccagaagcctgcagtttttattattaccagcagagggagctacagggagcagtccggtgccttcctattgtttactttttaaacttttgagaagtagcaatggactcgtgagagtgggtatacagctgtgtgggctttgtcctagactgaggcttacagacaggaagggtaagagagacctaagccagctcctagacccttgcctgaggaaatcagtccaccagtgtagagggcctcccttcactccagcatggaccattctattgccagattcttctggtcacagcatgggccttactggatactcaggattgggctttaagcagacctctgggtgtgacacagcctctttcagcccccagcccaaacagcagaaataggcataatttctgctgtgacaccccctacccacaaattggagagtatatcttgctatactctataccaagcctctttctagaatttttccaacaggttttgttttgttttttggcttaactcagaaccatggtgagcgttctgctttgttttgttggagacagggtctctgtcannnnnnnnnnnnnnnnnnnnnnnnnnnnnnnnnnnnnnnnnnnnnnnnnnnnnnngcccaagcagtcctcccacatggtgagctttgaatgggcatagacagggttcccagcccaatagtcgggattggggtataggttctacatgggaaagtatccagtctcttgctttactcagtgtcctgtgaccaccagaggcatgagagggacaacacactcttttcgctctaccacaaggggtgactagaagatgagcaagtctaataaaaagatacggccttatttgttatttgtctgacaaccatccttacgatggtaatcctgtgagtgcctgatggacatctatctttgtgtttttctcaaaccatggaaggttgagaggaatatacagtatctgggggctgacttactctactagctaggagcatcacagcagagagatagggacagagaccagagtcatgccagcttggggtcttgggaagagaggcagatggttactctgttctggaatgggactctgcagctctatgcagtggccaacattctga

SEQ ID NO: 187703 - DNA, 1473 bp, Homo Sapiens
  misc_feature (469)..(493): n is a, c, g, or t
aattttcatcaaatcttgagagggtaagggagaggctgagtgagatgcgggtagcttgctcctcagaggcagagagactctactgcctggcatagaaaaataaatcagtgtatgaaatccaagccaaggcaaacggcagctttaaaaaagtcatcttccaataaataatttactatagaggaatatttttaacggcaaaacactgataaattcagaagttatttttgtaaaaaaaatatgtttatttactctcatgtataaaaataaggtttttggggccatcctctcctgggggtgcccatgcccttcttttggagagggggccgaggggtgaccttttaggccttacccgtaagctattttaatacacctgctcacccccctcttcctccactacctgctgtagcccattccttccttctggtgtaaagctacagaagaagtcgtggaacaaaattataccgaggcnnnnnnnnnnnnnnnnnnnnnnnnnatcaaactccccagcaaacttgctgactgcatttccacacattaccaacacctgccaggacttcacagcagggtgacccgctaagcaagctggcctaggttcagcccacactgctgctacctactcttcaagacattaggtgtgaacagagaaggggaatgaggtgacctgggtttgaatgacccagggcccaatgcacaagagagaattttgatgtcaaattagggtggcaaggagaaaacaaaaaagatccaacttagaaacagaaccatgattcaacatttgcaaaaagcatcatcaataagcctgaagaaggccacggactgtgcatccgctggctcagagaaaggctgggcagccggaacagcagcttcctgggtaaccaggcaacaatctcagcgcctgggagtcagggctgcgcactccactctggccagaacacaaacggcattggcactgtaagctctcagttacgtggccctcttttctctcctctatttctccaaacatatgtgcacacccagaggaactgagtggcaattccagggtgcgggcgggcaggaggggagagaggacaaagagagaataagatgagctaaatgttttgtgaaaagccaccgcccatccgaaagcttgtgacttcccttgccccaacaatctttgtaggttgccccttttcccattcctacccaagaacacaggggtgggggagagggaaggctctctttgtcaaaaagcagttatctacatttcagaagaaaagcagagacaatcacggttatatatcaattgcttggcagacagagtgacgaagactcactggagcacatgtgctttctcctccctttgtccttctcttattcaaacagccacatgtcaaagtccagccactcttaagacacatggccaacttccaggcttcacgaaactcactgcctttttgcacagaagtaaaaaccaccaacttttttgtacaaagt

SEQ ID NO: 187704 - DNA, 1369 bp, Homo Sapiens
tacaaaaaagttggcgagcgcctagctgcgcgcagccacccacgagaccccagtctgaggtgcggggtcctggggcccagcgcgggtggccgccgcggcccctcgggctgcgtggggagggggcttccgcccctgttgtcattgctcctgcagccttttcgctgggactgcgcgacaccgccccccgaccgggtgcccgctgtgtgccaggccgggtgctgggcacggtcccgcgagtgccctataaggactgccaggcaataatgaaggttcttttactgaaggatgcgaaggaagatgactgtggccaggatccgtatatcagggaattaggattatatggacttgaagccactttgatccctgttttatcgtttgagtttttgtctcttcccagtttctctgagaagctttctcatcctgaagattacgggggactcatttttaccagccccagagcagtggaagcagcagagttatgtttggagcaaaacaataaaactgaagtctgggaaaggtctctgaaagaaaaatggaatgccaagtcagtgtatgtggttggaaatgctactgcttctctagtgagtaaaattggcctggatacagaaggagaaacctgtggaaatgcagaaaagcttgcagaatatatttgttccagggagtcctcagcactgcctcttctatttccctgtggaaacctcaaaagagaaatcctgccaaaagcgctcaaggacaaagctccacctgccgtggctcccaagactgtcagcacctagaaaccagttcttgcctctgaagcatgctgccgtcctcgatgcagatgtcttagctgtcacctgcgcaccttttgctgtcacatagttagtctgggagcaaagtctatcagtggtttggagtaccagctttcggatgagataaaaacagatttgaattctccctcttgctgtttattagctatgtgaatgaagaagcctgagttttcactacttttcacctaccatctggctgcccctcataagtcaatatctgactgaaattgcggattgccatggaaagcataactgtgtatcagacagttgcacacccaggaatccaagggaacctgaacagctactattcccagcagggggttccagccagcatcacattttttagtccctctggcctcacatacagtctcaagcacattcaggagttatctggtgacaatatcgatcaaattaagctcctggatggaggagagttgctgaagaagttcgtgcagggaggaataaaggatcacacaggaatttgagagccaaagtaaagtgcaactggccccccaggcccagaggggctagcagtgagaactgaagatgttccctctgga

SEQ ID NO: 187705 - DNA, 1478 bp, Homo Sapiens
  misc_feature (378)..(432): n is a, c, g, or t
  misc_feature (950)..(1014): n is a, c, g, or t
  misc_feature (1293)..(1339): n is a, c, g, or t
ttggagtcatttctgaactgagttgttcaatattttagcgatatcagtatagaatagatgcctgtgggccaaatttttttcaaggaaggagccattccctgctgtttgacaccacattctgtattgttttgtacactgtgctaggttcctataaatgattatcttactgaccagttgaacatttctatgaatataagccagggagtttttttcttgctttttccctgactcttacctgttttcataggttctctttgtaaagaatccttttctggtcaagtttcttcttcatcactcatgccacttactccattctggaccctccttcagtcaaatgttcctgtgcttcaacctccattacccttggaaatgccaccnnnnnnnnnnnnnnnnnnnnnnnnnnnnnnnnnnnnnnnnnnnnnnnnnnnnnnngcggaagatggtgagatccaggaggtagagatggaggatgagggaagtgaggagccccctgccccaggaacagaggaagatacccctttgaaaccttcagcacaaaccacagttgtaactagccagagttcagttgattccaccatctctagttcttcttccactaaaggaataaagaggaaagctacagaaattagcactgcagtggttcagaggtcagctaccattggcagttctccagttctctatagccagtcagctatagctacaggtcaccaggcagcagggattggaaaccaggcaacaggaattggacatcagacaataccagttagccttccagcagcaggaatgggtcatcaggccagaggaatgagcctgcagtcaaattaccttggactagcggcagcacctgcaattatgagttatgcagaatgttctgtcccaattggagtgactgctccctcattgcagccagttcaggcccgaggtgctgtgcctaccgctaccattatagnnnnnnnnnnnnnnnnnnnnnnnnnnnnnnnnnnnnnnnnnnnnnnnnnnnnnnnnnnnnnnnnngaaaagacaaaaaaaggaaggaaagacaaggcaaagaagagtaagaccaaaatgccatctttggtaaaaaagtggcagagtatccagcgtgagttagatgaagaggacaattctagttccagtgaagaggatcgggaatcaactgcacagaagcgaattgaagagtggaaacagcagcagctggttagtggcatggcagagagaaatgctaattttgaagcccttcctgaggattggagagcaaggctgaagagaaagaaaatggctccaaacacatannnnnnnnnnnnnnnnnnnnnnnnnnnnnnnnnnnnnnnnnnnnnnncagttcaaaagtcttaaccagttttattgtcaaataaactataaatgtgtatggggggagatcttaataaatttcctgggcaaggagtgtatgcatacaaaggttttcacttttgtgaaatgtaattttttctggtttt

SEQ ID NO: 187706 - DNA, 1371 bp, Homo Sapiens
ctttgtacaaaaaagttggctgcgttctttctctcctcttctctctcttaccccgttctgtcttccttctccatttctcgcaccatcttgcagcactcccccaagtcctcctgagctcgtgaaccttcctcttaagctggtgcctctagggggcccctccattcctgccttctcgctctgcctcctgcttctcaccaccttcggcgttgcctgaagatttgctgaaagtagttcttggggccctgccaggcacctggctcagagcccagcagagatgccaaagctttagggcttcacattgcaggctggcacaggtttgctgccctgctgcttggcagggctgtccagaggcacccagggatttaaaggcagcccttcctgcgccttttccgtcgtcctagaggaaactctcagctgcctcctcttcgcttcctcttccttggctccagtcccagtctgctccaaggcggggcatgtgatatcagccagttgggtttctgggtgtcgtgtggccctgcccctctgtgcccggcaccttggccggctccttctgccaggtgtcgttaattgctctgccttcgtcatcgtcacagggccttcaaggagagcgaggtctcacgggcctgactggagacaagggggagccgggtcctccagggcaaccaggttacccaggtgccacgggccccccaggactgcctggcatcaagggggagcgtggctacaccgggtcagcgggagagaaaggagagccgggccccccaggatctgaaggcctcccaggccccccaggcccagcgggtcccagaggagagcgaggaccccaaggtaactccggtgagaagggcgaccagggatttcaaggccagccaggctttccgggcccaccgggtccccctggattcccaggcaaagttggatcacctggcccacctggccctcaagcagagaagggcagcgaagggattcgaggcccatcaggcctgcctggctcccctgggccaccgggacctcctgggattcagggccccgccggtctggatggtttggatgggaaggacggcaagcctggcttgaggggggaccctggtcctgctggcccccctggactcatgggaccaccgggctttaaggggaaaacaggacatcctggcctcccaggacctaagggtgactgtggcaaaccaggtccccctggcagcactggccggcctggcgcagagggtgaacctggtgccatgggatcccagggaagatccggtcctccgggacacgttgggtcaccagggcctccaggtcagccaggaccagctgggatctctgcagtgagtctgaaaggagactgaggagccaccggagaaaggggccttg

SEQ ID NO: 187707 - DNA, 879 bp, Homo Sapiens
ttgggtatcctcctgagaggcacccatatgtggggttcacacctccaccagtcatcctgctggagcacacccattacgggtcaccttctagggacactacgagagccactatggcctccatatttgcctggagtgggaacagaaggcagtggggcagggggaaggagtcaggggctgggtggggaccgcccgctcctgcagtttctcatgatttttctctccaagggccttcaaggagagcgaggtctcacgggcctgactggagacaagggggagccgggtcctccagggcaaccaggttacccaggtgccacgggccccccaggactgcctggcatcaagggggagcgtggctacaccgggtcagcgggagagaaaggagagccgggccccccaggatctgaaggcctcccaggccccccaggcccagcgggtcccagaggagagcgaggaccccaaggtaactccggtgagaagggcgaccagggatttcaaggccagccaggctttccgggcccaccgggtccccctggattcccaggcaaagttggatcacctggcccacctggccctcaagcagagaagggcagcgaagggattcgaggcccatcaggcctgcctggctcccctgggccaccgggacctcctgggattcaggggccccgccggtctggatggtttggatgggaaggacggcaagcctggcttgagggggggaccctgggtcctgctggcccccctggactcatgggaccaccgggctttaaggggaaaacaggacatccctggccctcccaggacctaaggggtgactgtggcaaaccaggtccccctggccagcacttggccgggcctgggcgcataagggtgaacctggtg

SEQ ID NO: 187708 - DNA, 1118 bp, Homo Sapiens
ccatgggtggactgaggagtcccccaacaccaaacatctggggcacagcagccatgcctggcagcatcatgggcagcatgctcagggtacttttgacctcttcactgttggcatcgtggcaaagccagctggaaaccccaccagcccggtgagggggatgcctggcatatttctcatgttctgaagtcttaccaggtccatcccagcaatcagtccattcatgaacagtggccccattccagagggagagtctgccacaatggaaggagccttcaggagttcgctccgaggccgcctccccctcctgcgggggcccgtatctcgaagaataggctcagccagagtgtgattgaacttgttttctggaagaaaccccctcagtcctggctccttggggatggcaggaactctctcttccccgctcagggagctgacatctaattttccaggttctttacagcgtggcctcctctgctttggtttgtctgaaaaatttgccccaaagccaggaacttctaaggagtagtcagcctgctgccttagccagtcaagcagactcttgctgggaatggatttctcggcttggctgctggctgccgtagctggctcaggagccgaggtggcaggccctggcccctcagggtgtgtggtgctcaaggtggcctgccctgggtcttcatggacttccaagattcccgcctgaagtgtctgctccttcaaaaagatgaggtccatccctccttcaacatgtttccgcctccctctccgcctcctcgtggctgcatcatctcttctgaggcttccattgacaatctgtccagtcacaggatggatcaggccagcttgcagaatcccagacaagtccatgccaagggctccctgaagtgaactgatagccccaatcttaggggtgctggcgctcactgggaaaggggatgtggctcctggggacccctctgatgagcaggagaggtccatagctgactccccatgccagccattgaggatgataggggtgtgcccgtgggtggcagagaactgctccaggccccgagcctttgcatccctctccacctcaaactcatagggagggcctgtgcttttccaacttttttgta

SEQ ID NO: 187709 - DNA, 972 bp, Homo Sapiens
gctgccctaagtgacaaccctttgccttttcaggactttgcctctttccacagagctgcaggttctgtctaggctgcttttactgccatgggggctgcctggtccctgagtaagcagtgggtagccctggatggctgaggggctggggaagccagctgggccagaccaggaaggagcctgaggcacagcaccaaggcatggggtagggtgggctttgaggcacggcctccccatgcccagacccaggcccaaacaggaggctcctgtgcaccagcaagtgcagcaaagctggctgcagtgacaaggaagtcagagggagggctggtttgcctcaaccctcgccctggatgtggcaaaagataccacaccgaaggaagctgtaggggatctgggacttagtcaggctagctaagggcactgagtgattacagggcaaggccacagagcagcaggaagttgtaagtgcaggggccaggcacagtctgagtggagagccatgatggcactcatccctggctggctcctgggcccaggcccttgctcagaatacagtgcccaggcccgcctgggcattgccttaattcctgtctgaggctgccttccttcatcctcctcaagctgactgctatcagcaggagaagggaatgcagaaccacccccaccctaactccagtgtctccagaactgagcagggaccctccccatgacggagacagacaacccaatggcagggcctgggggagttctaacctcccgtgcccaagcctgacttcccttccctctccagatactgaggaaagtgggttggaggtgggccatgagggtgggggacagggggagggagagccatttcctaagaagagcccaggttgtctcaccccagggagactggtttcaaggagctgttccttcagaaaggacgatgggaaatggaagtcacagcacggctggggaactgggggactggttagg

SEQ ID NO: 187710 - DNA, 1744 bp, Homo Sapiens
ttggtcctcttgttcgatcttttgcagatataggcaagaaacattctgaccctcacttgcttgaaaggaatggtattttggcctctccccagtctgctcctggaaacttggacaatagtaaaagtggagaaattaaaggtaatggaagtggtggaagcagagaaaatagtactgttgacttcagcaaggttgatatgaatttcatgagaaaaattcctacgggtgctgaggcatccaacgtcctggtgggcgaagtagactttttggaaaggccaataattgcatttgtgagactggctcctgctgtcctccttacagggttgactgaggtccctgttccaaccaggtttttgtttttgttattgggtccagcgggcaaggcaccacagtaccatgaaattggacgatcaatagccactctcatgacagatgagattttccatgatgtagcttataaagcaaaagacagaaatgacctcttatctggaattgatgaatttttagatcaagtaactgtcctacctccaggagagtgggatccttctatacgcatagaaccaccaaaaagtgtcccttctcaggaaaagagaaagattcctgtgtttcacaatggatctacccccacactgggtgagactcctaaagaggccgctcatcatgctgggcctgagctacagaggactggacgagtgcaatagagtctctttttggagcatcattaactgggattgcctattcattgtttgctgggcaacctctaacaatattgagggagcacaggtccagttctagtgtttgaaaaaattttatataaattctgcagagattatcaactttcttatctgtctttaagaaccagtattggtctgtggacttcttttttgtgcattgttttggttgcaacagatgcaagcagccttgtgtgttatattactcgatttacagaagaggcttttgcagcccttatttgcatcatattcatctacgaggctttggagaagctctttgatttaggagaaacatatgcatttaatatgcacaacaacttagataaactgaccagctactctgttacttattcacatcatagccccttttgtgtatgaagaagctgatggccttggaggttaaaacttggagatgtgtatgtactgaacctccaaaccccagcaatgaaactctagcacaatggaagaaagataatataacagcacacaatatttcctggagaaatcttactgtttctgaatgtaaaaaacttcgtggtgtattcttggggtcagcttgtggtcatcatggaccttatattccagatgtgctcttttggtgtgtcatcttgtttttcacaacattttttctgtcttcattcctcaagcaatttaagaccaagcgttactttcctaccaaggtgcgatcgacaatcagtgattttgctgtatttctcacaatagtaataatggttacaattgactaccttgtaggagttccatctcctaaacttcatgttcctgaaaaatttgagcctactcatccagagagagggtggatcataagcccactgggagataatccttggtggaccttattaatagctgctattcctgctttgctttgtaccattctcatctttatggatcaacaaatcacagctgtaattataaacagaaaggaacacaaatttgaagaaaggagctggctatcaccttgatttgctcatggttggcgttatgttgggagtttgctc

SEQ ID NO: 187711 - DNA, 1134 bp, Homo Sapiens
attggaaaacagggtcccatttatttgtaagaaaaagctggatctcagcattcaccagagcaaaattcaatggcaacctgcacataagtctcaatttcacttcttgccaaaaacaaaatagagtttacataaaaatagatataacccagataaccatatacatcagtatatgaccagtgctatttacatgtaaaatgttgcattgcataattcaaggaataaaataccatcatgcatttcatttaacttttaaggtgaaaaatgcagttacagaactaagtttgcttaccatgattgtcccaatatttacttaagaaacaatacccaaaggtttcttgtttacatatctctttccacatctagctattcatctgtgtaacagattacaccactttagcaacaagaaacttttgaacaatatctattatactgacatattaaactgaagatatgaatacataatcacactgaaagttttgatgaaaatgtatgaaagaatcccaagaattagtttttccaatgtaaaaaactatttggaatatcgtaaaggagcagtgaagtcctttcaaagtttaatgtcactcttcagacaggtacagacataacacacttctaaaaggaacattctttatcattctgcacaaattaaaatacaatgcaataatcaaaaagggaaacattatataattgttacattagatgaagtttttgccatttcttcaggagaatggctctttacgacttctttgatgaactgttcaagtgcagtgaaatagccttggcactgccatgtgtcattgtgagtcccatctggaaaaatggctaatctcttagtccgagatggggagagttcataaagttgtttcatcattactggtggaattaattgatctgagagtccagagatgaaaagtgaaggcattctacactgagagatttttctgtaggacaaaaatttatttttgtagcaccataaaggaaggtaacgcatcggaaagaatgaaaataaagtgctggccatatgtggtatgcttaaaaatgtgttctccaccataatggctgaaatcctaggggaattttcagccaacttttttgtacaaagttggtttttatggaaaagcattgctcatcaat

SEQ ID NO: 187712 - DNA, 854 bp, Homo Sapiens
gctttgggggccacatatgatcctgacagggtgcccacgccactggtcaggtcaaagaggtcactcaggccactgccgatgggtgctccaagattggctggtactgctgctgttggaggtgccacgaagttggtgcccccaatcaggctgtcaaggccaccgccaagaaggtccacagctcccatctgcaccgaggaggtggccaggggtgggccgctcactggggggccgaggtccaggttgaggaggtcacccagcaggtcgccctgggcggggatgacatctggctgctccccaggaggtgctccagtaggggctgtctcagggctctctgcgctctcactcgaggccgtgcgaggtggcaggctcttgtgcacgacgccccggcccccctccacaaaggcactgggaggcttatggtagacggaagccagcgtgccgatgtagcagataagctcgtctaacagtgtgggctcgatgaggtccgtctcttcagagatgagtggcttctcagccaacaccacctccttggctgccaccgggtccgtggacagcaggcgccagtagatgtagccacggtcccgcaggtctgggttatctgagtcctgagtggccaaactgaggacctgctgcaccagctcctgggtctctgttggcttctttagaaagagtttcacaatggctgtcagcagctgcagctggacctgtgtgctctcgtcatggaagccctcgaggaagctctccagcagctcatctgcgttgtcgatccgttccgcgtactcgcccacaatccagatcatggcagcccgggcctcaggctcatccagggagtccagattctcacacagtgccaa

SEQ ID NO: 187713 - DNA, 1363 bp, Homo Sapiens
ttgggtctaggtggagccatctggttgtcagaaagcagaggcctgaaaaggcatctcaaaaggccaatcttaggttctacaatcgtgatgttatttaattggggaagttgcaaatcttgtgacctctggataatcatttcattatgcctgcatcttagcagaattcaggcccctctcatcctcctaacctagttgtctttaattagttttacaaaggcagtttagttttgggaagggttattatcattcaaactataaactaaatttctcccaaagctagcttggcccacacccaggaatgaccaacggcagtttggaggttaaaagcaagatggagttggttagatcctatctcttttagtgtcataatcttctcactgttaatggtttttgcaaaggcagttagccaggatggtctagatctatttctagtgttttggatccttggtgtagatttgtggagggagtaaaggaaagggataggaagtaaatcacaagaaccagagtgaaggaatgtttgataggtttatattgtctttttccatcctcttcagacatccttcaaagttgagccctttttttccgctgtgagtctctacacatgtctgacactctcatgtcccacggattacagaaagacattccttgcaggagaacatggcttcccagtgatgtgggaaagatggactctgatctccagggtagaagtggcaaccagagtaagccagttcgttgaagcaaatgatggctgcagtgaagagtaccgaggcacacccatcctcaaacaaggatcccacacagggccagaaatcagccctccagggtaacagccctgactccgaggcctcccgtcagcgcttcaggcagttttgctaccaggaggtaactggcccacatgaagcttttagcaaactctgggaactctgttgtcagtggctgaggccgaagacccactcaaaagaggaaatcctggagctgctggttttggagcagtttctgactatcttgccagaggacatccagacctgggtgagggagcagcatccagaaaacggcgaggaagctgtggctctggttgaggatgtacagagagctcctggacaacaggctagagtggtgctattttatcggtagcagcagctccagtgttgttacagggaccagccatgcgtgacaacagagctgtatccctctgtcagcaagaatggatgtgcccaggccctgcacaaagggccctctacaggggtgccacccagaggaaggacagtcacgtctcgctggcaacaggtgtgccctggggctatgaagagaccaagacgctcctggctattcttagtagttctcaattttatggaaaactcca

SEQ ID NO: 187714 - DNA, 3128 bp, Homo Sapiens
  misc_feature (2562)..(2570): n is a, c, g, or t
ttggctgagatgcctgtgatcaggagaatgcagttgaaactaattttgtggatagagaaactgttggaactgctttacaaagtattttaacagcccacctgaggatattgaccataaggactcatatctcattacaagaagcatcatggccgagccagactacatagaagatgacaatcctgaactcattaggcctcagaaactgatcaatcctgtaaaaacctcccggaaccatcaagatcttcacagagaacttcttatgaatcaaaaaaggggtcttgctcctcagaacaaaccagaattgcagaaggtgatggaaaaaagaaaacgagaccaagtaataaagcagaaggaagaagaagcacagaagaagaaatctgacttggaaatagagctattaaaacggcagcagaagttggagcagcttgaacttgagaagcagaaattgcaagaagagcaagaaaatgcccccgagtttgtgaaggtgaaaggcaatctcaggagaacaggccaagaagtcgcccaagcccaggagtcctaggctgaggctgcaccaagacctcgtgtgtcaccccacagagctgtctgtgggtgccttctcaatctcagggcaaaagcccctggagaatattccagccagcagagaattttgacttgcagtaggatttggtttgattttcctacgatctgggtggatgccttgcctgtgacagttgcagttcctattcgccaaatgaagggcagtgccccgcacgtaagttggaatgatggacctgtgttcagagacttaacagaaccaacaagcaaaacaagtgagaacaggaaaaaggaagaggacactggaatcaattcttgagagttgcactacttggtttttcttccattccaagtttcgtgggacccagagccttttttcttttaaaagctaaaaaacaagtgtttaattcctctttttgttatctgttagataattgagatcacctagaaatgcgtttaatctgttcactcactgtaaattttgaggacccagaattgtcttgtttaatttatactttcacccctgttgcagttaacaccagagaaggaacgtgaatgtcgagcacagccactacccttgttggcacttaatttagaaatagggtgagaagtttaaaagcccatcttgattttattttcattccttttggttctctgtgtaataatagcaggctacatagtgacattccagttccagaaggtacatcctgtccattcattaattgctttgattactaggagggtttctgttcgttttgtttttaaatgtcttgctgatctagttctttcagatggaataaccttccagtcccttagagagtggaactagtccatataacccagcttcagtagcaaaagtagaagccgccacatcttttcatttctccaagaggagagtggggaaggttctcatgaccagctgggcagtcaggatttctctaggcattctaatgtgaaataagtgtagactgctgtcaaggaggcttcattagaagatgtatagcatttgaatgtctaatgataatgcatatcattagaatccaagctttgaaaatttctgattaatgctcatgtatttctttatctttgtttttccttgtgaagaaagactttcaccactgtctgagtgatgatgctgttgataaggatgatgtcgatgactactatattgcatctctcaggaacagctgatgggaagggaggggctgctgagttcccttgttctagctagcagcacgctcctcagagagggggccgagttacagacagcagccgcattctcatgcaaaattagttttaaactgctagtgtgggcatcggtaccttttgcctgggtgataccgaagaattgttgaggatttagtatgctccgtagagacagttcagccagtcatttctgcattggagagacttctcatactttctttgaagactcatagaaagctggatctagagcttttgaatccttaattagcacagtagaaattagctttctatgggaatgctttagtgttagcagttgacaattaggcccatattcaatctgaatgggaacaaaagtaaatgcaatgataatatactgctagttagagaaacatgttagttgattatacctgaaatggattatttatctcatcagcaagtattatttgaataaaatgagaaatgcttaagaaaaattgttgctctacagtaatttggtttcgaagaatggaatggtaactattttttcccatcgttcttttgagagaaggaagtgtgatgactgatgatcttgaaaagcccatttctgattgcacgttgactggaattctttctttgtgtctgtggactagcgatgctgtttgtaaaatgaagattcgggactggctcatatctttttatctaactagatgtcagatcttgaaatctgtattctcgaagcaattctgccacttgatcgtattcacaggggccctggtaggctcctttagaaggaccatttctgttcctagagcttaactagaattcattcttcactgaggnnnnnnnnngttacttaagaaagcatttctttcctaatctcactcaaatctgcagaattatttgtaattagtaatacaaaatctggccaaaaggagacttgtaaatagcgtaaagtggtgtcttatgctaaacggtggaatgtataggcagagaagctctttgaagttgtcagatgagctgggctcacaagcctgattcaaacaggctgtcggtctcctctcaccccttaatactgtgcagcccaaactcctaggactcttgaacatctgagcagttttgtgctttgagccactttttgacaaaaatggctccatttttccacagcgtggttttcttaaaatagtttaatgttttatagtctcatagtagtagtgttgctttctaagctataacagtcgactttattcttctactctgaaaaatcttgacttgtttgagtgtatataatatatataaagggagccttaatggattggttttcataatttaatattttttgtatttgctcttgtataattgtttttaacggaaagtattaaagaattgagggtggaattcttagaacc

SEQ ID NO: 187715 - DNA, 959 bp, Homo Sapiens
ttggctggcactcccaggactcccggccggggtagctcttcactcctcagcgcgacgtcgtgtcgagttcccaaaaagctccgcaggggctgtagggaggcatacaagaattaaattctgaataagtctgcaggtaggatggacagttattttaaagcagctgtcagtgacttggacaaactccttgatgattttgaacagaacccagatgaacaagattatctccaagatgtacaaaatgcatatgattctaaccactgctcagtttcttcagagttggcttcctcacagcgaacttcattgctcccaaaagaccaagagtgcgttaatagttgtgcctcatcagaaacaagctatggaacaaatgagagttccctgaatgaaaaaacactcaagggacttacttctatacaaaatgaaaaaaatgtaacaggacttgatcttctttcttctgtggatggtggtacttcagatgaaatccagccgttatatatgggacgatgtagtaaacctatctgtgatctgataagtgacatgggtaacttagttcatgcaaccaatagtgaagaagatattaaaaaattattgccagatgattttaagtctaatgcagattccttgattggattggatttatcttcagtgtcagatactccctgtgtttcttcaacagaccatgatagtgatactgtcagagaacaacagaatgataccagttctgaattacaaaatagagaaatcggaggaatcaaagaattgggtataaaagtagatacaacactttcagattcctataattacagtggaacagaaaatttaaaagataaaaagatctttaatcagttagaatcaattgttgattttaacatgtcatctgctttgactcgacaaagttccaaaatgtttcatggccaagacaagctacaacacaagaagccagccatgtggattactaaaga

SEQ ID NO: 187716 - DNA, 1944 bp, Homo Sapiens
ttggacctctctctctccagcagagagtgtcacctcctgctttaggaccatcaagctctgctaactgaatctcatcctaattgcaggatcacattgcaaagctttcactctttcccaccttgcttgtgggtaaatctcttctgcggaatctcagaaagtaaagttccatcctgagaatatttcacaaagaatttccttaagagctggactgggtcttgacccctgaatttaagaaattcttaaagacaatgtcaaatatgatccaagagaaaatgtgatttgagactggagacaattgtgcattttatgttatacagcatatttcattttggcttaatgatggagaaaaagtgtaccctgtattttctggttctcttgcctttttttatgattcttgttacagcagaattagaagagagtcctgaggactcaattcagttgggagttactagaaataaaatcatgacagctcaatatgaatgttaccaaaagattatgcaagaccccattcaacaagcagaaggcgtttactgcaacagaacctgggatggatggctctgctggaacgatgttgcagcaggaactgaatcaatgcagctctgccctgattactttcaggactttgatccatcagaaaaagttacaaagatctgtgaccaagatggaaactggtttagacatccagcaagcaacagaacatggacaaattatacccagtgtaatgttaacacccacgagaaagtgaagactgcactaaatttgttttacctgaccataattggacacggattgtctattgcatcactgcttatctcgcttggcatattcttttatttcaagagcctaagttgccaaaggattaccttacacaaaaatctgttcttctcatttgtttgtaactctgttgtaacaatcattcacctcactgcagtggccaacaaccaggccttagtagccacaaatcctgttagttgcaaagtgtcccagttcattcatctttacctgatgggctgtaattacttttggatgctctgtgaaggcatttacctacacacactcattgtggtggccgtgtttgcagagaagcaacatttaatgtggtattattttcttggctggggatttccactgattcctgcttgtatacatgccattgctagaagcttatattacaatgacaattgctggatcagttctgatacccatctcctctacattatccatggcccaatttgtgctgctttactggtgaatctttttttcttgttaaatattgtacgcgttctcatcaccaagttaaaagttacacaccaagcggaatccaatctgtacatgaaagctgtgagagctactcttatcttggtgccattgcttggcattgaatttgtgctgattccatggcgacctgaaggaaagattgcagaggaggtatatgactacatcatgcacatccttatgcacttccagggtcttttggtctctaccattttctgcttctttaatggagaggttcaagcaattctgagaagaaactggaatcaatacaaaatccaatttggaaacagcttttccaactcagaagctcttcgtagtgcgtcttacacagtgtcaacaatcagtgatggtccaggttatagtcatgactgtcctagtgaacacttaaatggaaaaagcatccatgatattgaaaatgttctcttaaaaccagaaaatttatataattgaaaatagaaggatggttgtctcactgttttgtgcttctcctaactcaaggacttggacccatgactctgtagccagaagacttcaatattaaatgactttttgaatgtcataaagaagagccttcacatgaaattagtagtgtgttgataagagtgtaacatccagctctatgtgggaaaaagaaatcctgatttgtaatgtttgtcagtaaatactccc

SEQ ID NO: 187717 - DNA, 2091 bp, Homo Sapiens
  misc_feature (1979)..(1993): n is a, c, g, or t
ttgggtccatcctgagctcgctgggcgagaacccccagcggcaagggctgctcaagacgccctggagggcggcctcggccatgcagttcttcaccaagggctaccaggagaccatctcagatgtcctaaacgatgctatatttgatgaagatcatgatgagatggtgattgtgaaggacatagacatgttttccatgtgtgagcatcacttggttccatttgttggaaaggtccatattggttatcttcctaacaagcaagtccttggcctcagcaaacttgcgaggattgtagaaatctatagtagaagactacaagttcaggagcgccttacaaaacaaattgctgtagcaatcacggaagccttgcggcctgctggagtcggggtagtggttgaagcaacacacatgtgtatggtaatgcgaggtgtacagaaaatgaacagcaaaactgtgaccagcacaatgttgggtgtgttccgggaggatccaaagactcgggaagagttcctgactctcattaggagctgagcttcattcagtgtgtgtgcgttggttgccgatcgtactgccagtagcattgtctgtctgtccggtcttgtttgtacattccattttcaattgttacagatgtgaactttattccttgtcactaattatatttaaaattatttctaggaagtcaaataaatataataaagggttgagccctctactttcttcttgccacctttttgtggcaatattaaagtgaactgctaatagtgtaagtacgtgcacaaaaccactgccagataaccagaggggcctgggaagggagaagaattagtgtatttttttcaaatagtacagtaatttgcctcataagcataggagcattgggaatgagagggaactgtgcccagtatactgttttttttcttcctccaataaaagtggtgtagtgccgaaagtgctaaaatatttagtgcggtattgctctgtgaattcaagttcaacagacttcactttggtcatgtttattaaaccaccagtgacatttaaaaatatatttttagcagtcgtaatgttagtcaccaaagggaaggtggtggaatgtctatgtttttgattttactgtgagttaaaaaggcacatttctaccttctattgtttttaaattcaagaataaggggaattagttcctggtgttgtttacgagtgtattctcgtgtcaacatacagggatttagacatttaactctctgtgccttgataagaatatcatttagagtgtagatacttttgcctttttaaaaaagccattattttatgagacttagtactcacactgcaaataactagtcagctcagttttaactttataggtttattgagtttcctttgtgtgatccatgtagatgcctcaaaatgtttcttcttcttcttttttttaatcttataagatatttttctaagtatttccagaaacatttgagagtgcccatcattttcaggtctgcagaaccatagcttccacgcacctgaacgagcacagaatgaactgacggtggaagacattatgagctgtgtccaacgttttaaccaaagcgtatcgtaccaacgatctgtgaaaatgcactggaagcttctggtcccggtttcctttgtggtctatgtgggtcttgtcctcattgtaactccgtatagatggtataggtattttaatcctggaagctgttgccttattaatgattatcttaaaatttcctccattggggcagcgtgggccaaattaaaacaaacaaaaccgcaactcctccacagaaacacaaacacagttattccatgaagtttagtatttggttgacatagtgctcttcaaattcatctcattaccctaaaagtaataactttgatgcttgctttaactttagtcccatctctgccactttgatgctatttgggttatgatggggcaagatggcagaggtattgggnnnnnnnnnnnnnnnccattcctctctacttctgtttcctagctttttctttctggagtttaagtacagtgatggttggcttgagtacctttttaaatctagcccagtataaa

SEQ ID NO: 187718 - DNA, 2118 bp, Homo Sapiens
  misc_feature (925)..(973): n is a, c, g, or t
ttggcaaattatttatgataatttgccattggctatactgtaccagtgtcaaatgctgcagcctgccaagctgtgattttgtgaggcttgtccctatgtaggatgcaccgcaggcccctggccactgaaagagtgtgcagtggactgtgggtctcccatatgcggtgccgcccaaaggtggctttgcctcaagcaacctaccctgatgttttactcattggaatgtttttccccgattgtggatgacttcttttctgatggagagagtccaggagggatggaaaacgcctggatttaagctcagcatcccccacatgggcttttcgatcatcttcaggcctgaagctgcacgacctgaagttcgcctgcatttatcagccctctttgtgctgctccttgccaccttggggttcctgctggggaccatgtgtggttgtggcatgtgtgagcagaagggaggatgaggaaaaagagaagaaaccccggtactgacaagctgtttttgagtgccactgtttgccatcatctaagccactgaatcaagtgtatttcaggcttatttcaacattccaatgccctggttttcctgcttgaatctgttcgtggtcaaaggtttgggggaatttgtgaccctggaacatccccagagtgaaagatggagctgggccacatcagaataaggccttggccccatcctctcacagcctaggtgctctgcaggcatgctgactgtcctgattgcgatccagcccgaaattccctcctctgctttcaaaagtcaaatcccccattcttaggccacactggtgtcacaagctcctgtcagggagctggggtttgggaatgtgctttgtgaactctgctttaaagtgaggggccgaggaaaacttagaaacaggcagagttggaagcagccaaatcacannnnnnnnnnnnnnnnnnnnnnnnnnnnnnnnnnnnnnnnnnnnnnnnngtgaaagcaggtggaccattccactttttagctcctattgatgcaccaaaccaagtgcctcatttctgtgccaaatgtttgccttggtcgttgtggacctccttctctaacttgcggtggcatgactgtcaggaggtgctggcattttcagcagatcctcatgtgttgaccctgatgtctttagcagaggcctctagcatctcggtttttcatccactgcaggaatgtggccacagggagcagaggtttgtactttccccaagaggtcctcatcctgagacggtctctacccatgtttaacccaaagagtgcaggccaggttccttatccttctgatgaaggatgagagagctcatttagaagtcagagcaaactagggtctcagtattgagaaacgcagcctgccagggaatcacagagacatcggggtgcccgcgatggccctcatgaagccatgcctcgacggcattcaggaagccctgcaaacgtgctttttgaactcattggccaggtgtgatttttacacaaggtaaacgtggtcaagggcatcggggaatttgctccaagcagatagctccctctgaggaaccaaaggaagcaagtttccacgatttctgaagagctggtataggaagtttctttcttccttttgtgttacatgtgcattaaacagaacaagctgtgtgtcatcacagattgtactgtgggctcagaaaccgtgagagagcccccaccgtggacaccggctctagggccacaggaaaaggaacgtttccaggcattttgtctccagggctcccgctggacaggcacgtactgccctggggagtaaatgcggagagttcacgaactgtgcccaacgcatgttatagccagggtcctactaactactcagtaaaagaacgtattgttgtattcctcccgtgttaagctatagccatgttaaaagtcactgtgcatttattctcagcatcaaataccttgtaacgtcttctctgccttgttagtgcatatttttacttttctgatactgtaaagaatatatccagtatgtaaatgaatgttctataaatcttttgtatagtcattttctctgctccttaaatatcatctctattcagagtataataaaattatgaacttgg

SEQ ID NO: 187719 - DNA, 1445 bp, Homo Sapiens
  misc_feature (1160)..(1218): n is a, c, g, or t
ttggctactgtttaaagtgagctggcctgcctaattaattccttgtgaaaactaaatgattttttcagtttggggatcattctcacaacataactatgcatgtagaggacaagatttattttctttcctccctttgcccagtagccacatctggtttactcaggcagcatctactaagaaattcagcacctgcatatctctgtgacatggtcacttagagcttatcttccctatgaatctccagatctgtgagtcgagcagatttcatgttgcagattcacctttaatgcaaagactgtattatcctcacatgactttttttcttgtcttactgtaccttaaaaggtgatagagtaattctgtattttctaacgggaagattcaaaggagctgaatgtgttatgcttccaaacaactgaatgtaaaacactcctagccagttgttgcattccctatatttatttacttccaatattttactgtaaaagtagggagaaatattatgttgatagttgtttcatattctctcaggaactttaatgttcccgactcgggtgattccagctgtgttgctggcagtgttgtctcaaccctctccctaaaatgactgagccctgggttcatctaatgtggttttccttaggaagagatagaaggcacagaagatcacagctagagaattgagaattaactatactactagccattttagggcaccaaaacttgggattaaacacttcctacttcccactcccaactcctgaaatgaagtcttgctatctgtgactagttttatttttgtgcttttaatagtccgagcagtcttaccttgtttacacatgtattgacaccatttgcttcaggccatggagcactgtttctccctttttactatttataggattccgttttttcacaagacttttaataaaaagaaattgtagaaataaacacattaaaatttgcccagctgtcgtctaagccctcttgattgacttgcccaagtggcaatagagttctaatatctataataaagggagatttgctattattagtggaatgttgaccccgtatgtagagaaacagtacgtgcctttgcctctttatgcacacagagacccagggtgagggagtatttgttcccagtttttaagatagtnnnnnnnnnnnnnnnnnnnnnnnnnnnnnnnnnnnnnnnnnnnnnnnnnnnnnnnnnnngatattccacaggacatgccactttattataaaacctgacacaggcatagtaccaagtatttcctgcattgttgctaaaattgttttattgtagctccacattctggtgtagtttaaaatgcctttgggggcagtttgaagcagttcttcatgccacttagtttgaaaataaaattctagatatgcaaatgattttcttagaaaacttcacaaaataaaagatcttg

SEQ ID NO: 187720 - DNA, 2976 bp, Homo Sapiens
ttggcaaaaataatgatggaaaaattgaggcttcagaaattgtccagtctctccagacactgggtctgactatttctgaacaacaagcagagttgattcttcaaagcattgatgttgatgggacaatgacagtggactggaatgaatggagagactacttcttatttaatcctgttacagacattgaagaaattatccgtttctggaaacattctacaggaattgacataggggatagcttaactattccagatgaattcacggaagacgaaaaaaaatccggacaatggtggaggcagcttttggcaggaggcattgctggtgctgtctctcgaacaagcactgcccctttggaccgtctgaaaatcatgatgcaggttcacggttcaaaatcagacaaaatgaacatatttggtggctttcgacagatggtaaaagaaggaggtatccgctcgctttggaggggaaatggtacaaacgtcatcaaaattgctcctgagacagctgttaaattctgggcatatgaacagtacaagaagttacttactgaagaaggacaaaaaataggaacatttgagagatttatttctggttccatggctggagcaactgcacagacttttatatatccaatggaggttatgaaaaccaggctggctgtaggcaaaactgggcagtactctggaatatatgattgtgccaagaagattttgaaacatgaaggcttgggagctttttacaaaggctatgttcccaatttattaggtatcataccttatgcaggcatagatcttgctgtgtatgagctcttgaagtcctattggctggataattttgcaaaagattctgtaaaccctggagtcatggtgttgctgggatgcggtgccttatccagcacctgtggtcagctggccagctacccattggctttggtgagaactcgcatgcaggctcaagccatgttagaaggtttccccacagctgaatatggttggcctctttcgacgaattatttccaaagaaggaataccaggactttacagaggcatcaccccaaacttcatgaaggtgctccctgctgtaggcatcagttatgtggtttatgaaaatatgaagcaaactttaggagtaacccagaaatgatgttgcattttttgctttagcctgataattgaaactttcaacaatctctggagtgactttttctcctcgaattgaaacaagtctatggcaaaagaagctgcatttttttcacaaaagggaagatggaacaatggtcacttcaaacttttgggctaaattatatgtacacagaaatgttcaaaatcatagttttaatgtgttttgaaaaggccacacaattatactttatcttttcttaataatcctgcaaatctctgccctgaatccgaaatctgaaaatgtactggcttgaacaaaatttgttttgtgtgttagagttataaatcattaatctttatttcgggtggtttacgtttatgccagttcctttatatttaaatttcttgttttatatattttgaatgtctttatagatttctttaaatttccttatagaaccattaatagaaaatcattacatttaaaatataccttacagcaaaagcatccaaataagtatagggtttatgtccttatttttctttcagctgaatacgaatgaacacagtggtggaatttctgaagggaagtgatgaaattatatttatttcagtgggcacttttccattttaccactgtaccattatttggttcctggagttatacactaattttcagtatattactgttaaattaccaacacaaggcaatttatttgaaagattccgtttatcctgccattgctttgaaaagcagcaggaaacgaaatcctttgacttgtatcagcttctgcagagcatctttgttttcctttgtcctttgtttcctaccttttgaatcagattccgttttagtcaggaagacttcttgggaccattcttagtaacctgaaatttcttttttaattgcatgaagtggattgatcatgagcaaatgatgtgcttatttctccctcactgttgaatatctttgaacttgctgttttcaatatgggcagcacaaaggtgagagatacatattaatagtagtatgtattactcttatacattagatacctatatttaaatgaaaggcccaatttgtaaacatatacattcatattctctcttgccccaagttttaggaacatgttaggatataggagacttaatttataataatgagagcatttttttattttactaaagccatttttatagtcaactatcttttcttatttgtgtgattagaacttagaaaaatatttactagttgaagttattatcagtttttaatttagttcttaaactcatttcacttctaataatttctgttataaatttccagcattttaatgaaaatctaatgatgtaataggcattttctttatttgaacctacctcttttattttctgaaccaaagagaaagatggactggtgtttgtgaaacatttttaaaaatgtagtttcatttatattagttatgtttgataaatgtctcagtatttttataatatgataagcctgggattctacttttagggttatttgtacttttgagtaatatataaagtgacaatattaaggtacatgatcagctctttctatttttactcgtaaaaattatggaaatgaataattttgctaacaactttgaaatttcaaacttctggaaaatatgaaaatattcattgttcattatgaatttaaattgtaaggtatgaatgtgatttgtctgtacatcttgtatcttttccaaaaaatgattctgtatcttttggaaaaaagccgagagttgaagatagtatatttctggtagtactgaatatttacttacagtttctatcaaaaatatataatttggtttctaaaatt

SEQ ID NO: 187721 - DNA, 1619 bp, Homo Sapiens
  misc_feature (1439)..(1453): n is a, c, g, or t
ttggctactgtaagcagttttcactgtggcagctctagggatctgcatggcagccagggcagtcttgccttgagtgttgcagacagaagaggttctggtgggcacatttttcgaatgcctttgagtaatggacagatgggccagcctctcaggcctcaggcaaattatagtcaaatacatcacccccctcaggcatctgtggcaaggcatccctctagagaacaactaattgattacttgatgctgaaagtggcccaccagcctccatatacacagccccattgttctcctagacaaggccatgaactggcaaaacaagagattcgagtgagggttgaaaaggatccagaacttggatttagcatatcaggtggtgtcgggggtagaggaaacccattcagacctgatgatgatggtatatttgtaacaagggtacaacctgaaggaccagcatcaaaattactgcagccaggtgataaaattattcaggctaatggctacagttttataaatattgaacatggacaagcagtgtccttgctaaaaactttccagaatacagttgaactcatcattgtacgagaagtttcctcataagcactgtggacaaaaaaagcggggaagacagcaagatttattggaagatacttacaggggaaattaatattttgactatttttatatataaagaagaactcaaaaaattatgttcaaatttgtacattaatgaaataatggaacttgggttagagggaaagaaccactgtacagaatataaaggagactgttgaattcataccatataaaacttgttaggtttttaaacatagcaatcaaggctacaaaaacaaacctgtgttgtttttgtatagattgtaggtttatttttggatttcatatacatgactgaactgtgtgcaaggcaatagttagccttgattttagcccagagacagatggcagagctatctctctcatagcttttatgcccttatttttattcaactggtattaatgtttttctcctgaaactactttttttgatgtgggcaagagatttgaagtgttggcttttgctatgtgcatattgaattgaagagtgagtaggtgaaggtggtgctggtgggttcactttccaaggccagactaaaacagttattttctataaaaatctggaagcaaagaatggggatggggagagctacgtggtagtatgtttttattaggagaataatgcaataaaatatgtaatgtcttttttataaagcaaaaaagacaataattgcatttatgagctcggcaggatctgttcttgtcatagccattgactatacatttgctactggtgattcagtttttaattttttagtcacaggaaatttttaactctactgtagatgcatgtccatgcattttctgtgttatggaaatccactgannnnnnnnnnnnnnncaaatggtggtacttgcaatctgttttataattagtgctccatttaaatctaatttataatttttattttaagcagcaaatgaaacaaaaatggccagttttaagatttgtgttgcctgtaacacaaaatgttacgaaggtttaggaagcctctttgatttttgtt

SEQ ID NO: 187722 - DNA, 1735 bp, Homo Sapiens
ttggcgttatctggccattaataaggtgaagaagatgaaacgttatcatgttggaaaggtgtggcggcgagagagcccaaccatagtccaaggccgttatagggagttctgccagtgtgattttgacattgctggtcagtttgaccctatgatccccgatgcagagtgtttgaagatcatgtgtgaaatcctaagtggattgcagttgggagactttctcattaaggtgaggccagggctgagaactgtgggagaagtctggatttggcctaatactgtttatgcaagtcccaaacttgggtgactccaacccttaagcctgcaactgtaggactttcctagtaaagctgttgtatttcctatatgtctgtactcttcctgtgaaatttccatcctttttgtgtgtcaggaaagtaggtactgccattgttttgagtggaagggcattgacaagcacttgggtcactgacattgagttctcaggtaaatgaccggcggattgtggatgggatgtttgctgtctgtggtgttcctgaaagcaagttccgtgccatctgctcctccatagataaactagacaaggtaacaaagaagacatacttcagtagaccctatctagcttctgccctgccctcaaatccataccactagtgaaaaataaggagattgtggctggaagtgggctattttggggtggaaggtaaggaggcatactctgaaggaagatctgagtcatgctatacagtggggattgtgactggatttcttaagctgtctctgactttgctgagtatacagttagctacttgtgatgtatatactgaatggaagttgagttgtcctttttcagtttgagaaagaaagatcttggggctgggctaatgtttgggtgtttatgcagatggcttggaaagatgtgagacatgagatggtggtgaagaaaggcctggctcctgaggtggctgatcgaattggggactatgtccagtgtcatggtggggtatccctagtagagcaaatgtttcaggatcccagactatcccagaacaagcaggccctggagggcctgggagacctaaagctgctatttgaatacctgactttatttggaattgctgataagatctcctttgacctcagcctggctcggggcctagactactatacaggagtgatctatgaagcagtgctgctgcagaccccaactcaggctggggaggagcccctgaatgtgggcagtgtggctgctggtgggcgctatgatgggctggtgggcatgtttgaccccaagggccacaaggtgccatgtgtgggactcagcattggggttgagcgaatcttctacattgtggagcagaggatgaagaccaaaggtgagaaggtgcggactacagagactcaagtgtttgtggccacaccacagaagaactttctccaagaacggttgaagcttattgcagagctttgggattctggaatcaaggcagagatgctatacaagaacaaccccaaactattaacccagctgcactattgtgagagcacaggcattccactggtggtcattattggtgagcaagaactgaaagaaggggtcatcaagatccgttcagtggccagcagagaggaggtggccattaaacgggaaaattttgtggctgaaattcagaagcgactgtctgagtcttgatccttgcctgattcccatctgctgctctttgtagaaaaggtttcc

SEQ ID NO: 187723 - DNA, 1227 bp, Homo Sapiens
  misc_feature (392)..(443): n is a, c, g, or t
  misc_feature (758)..(785): n is a, c, g, or t
  misc_feature (968)..(1022): n is a, c, g, or t
ttggctcgtctgttctgtggacaactgttactgttcttccgtggccaaccatggcggccaccagccctacccccgctccggccactttccctggacagtgccctcgcaggagtactcacacccgctcccgcccacaccctccgtcccccagtcccttcccagcctggcggtcagagactggcttgacgcctcccagcagcccggccaccaggatttctacagggtgtatgggcagccgtccaccaaacactacgtgacgagctaacgccacgcaggcggcggggcgctggggaatcttcctccccagcccccgggctcgggagttatgcatccagagacctgcccttctaccttcctcgcctcccctcttcctcattccattgccccaggtnnnnnnnnnnnnnnnnnnnnnnnnnnnnnnnnnnnnnnnnnnnnnnnnnnnnattatgaatctcctggacgcagaggtgacagtgggagctggcctgggccaggacggcaggtggccctggagatgggaaagtgtctgtgtcgaggcgctgagctctctctctgtttctccttttttcctctactccttccccttcacacccccgtggctggaaggaacctcggcttccctgaaagcttgggggtcccacccttcttaccccacccgggaggaacgcccagggccccgggcttgtttctcctcttgttttccttttgggcagtttgatcactgatcgagtaaggaatgacctttagattgtgcgacnnnnnnnnnnnnnnnnnnnnnnnnnnnnaaaccaagaatgatttctcctgcttccttctcctcaccatcttcccagacggagttcaaaggccacttctcaagcagcttttggcaccttcagcctcagagtggaatcttttaaagacaggacccctatgtccaggaaaggggaaaaggaactttgccaatgatagtgaccacagcaaaagcnnnnnnnnnnnnnnnnnnnnnnnnnnnnnnnnnnnnnnnnnnnnnnnnnnnnnnncaatagcacagcccttgttgaagtcagcagggaggaggggctgcccggagttgggtccttgcctggattttgacacagcaacttcctgtagtgagcactttgtatgaatcgtggacttcctgttctcaaggcgcaggtatttattctgtatctgtctagagcacacaccaaaatccaaccttctaataaacatgatggcgcagtc

SEQ ID NO: 187724 - DNA, 767 bp, Homo Sapiens
gaagcctcaggcctctagactgctagtcgggctgcttgcagggtggctgagtcgggggcacaagtgggggcgaggtaaacctcccagaggccgagtccctgccgcagccctaggcgccgcggtggtggctgctatggcatcaccagacccgtgggctccggggcccaagcaacctggtcgatgggcagacctggcagctctcctgctctgtgggctcagacccgcctgacctccctactccccggcctcaccccaccttgcccccaagaggtcccacagagcttcggacctcctggagacaaggcagggtgctgaggggcgggcaagatgtcaccgagggagaggggagggttcctcaagtgtgcggaaggcggccaccctgccccagcctgatggaaccctctgtttacacacctgctagccccttcccctccggccagcctcaggccagccaggagccccctcctgtggcctccgagcaccctcctgacacctgaggagaccctgcccaacccccccctccgccctcaggacttctggggaccagccactgtccccagaagccaggccggacagtggccttctccactcccctctgacttctccaagggggctcagtggccagtgccccccaggaggctccaccctcaactcaacccaagcaacagggacagatgaaaaacaaaatccaatcagggcgataaatggcggggggcaggacgtggtggtctccaggctggcttcgtgcgttcttgcttttgtcccaa

SEQ ID NO: 187725 - DNA, 1791 bp, Homo Sapiens
ttggggcaatgggacactcatcaccttccactcaacatttcagtgctgtggaaaagaaagctccgaacaggtccaacctacatgcccaaaggagcttctaggacacaagaattgcatcgatgaaattgagaccataatcagtgttaagctccagctcattggaattgtcggtattggaattgcaggtctgacgatctttggcatgatattcagcatggtcctctgctgtgcgatacgaaactcacgagatgtgatatgaagctacttctacatgaaaattgcaatctaaagctttcataccaaatgtcacaggagctgtctcccagctcatttttaacactgaaatgacattaggatctaaaataatttgctgtcaattgtacatttgcatgagtacgtatgtttggctcattactggtttaccccttgagtgaatgcctgtttatgatgactgagagcatattcatgtgtgatctgcgtgtttctggaatatgctttatacgtaatgaaatctgtttgctgggaattcctgattcttgttatataagaagaacaacctatttcgctcccagaaaaaaaagatcaaagagctttcagaaactttgagaacttggctatttagaaaaagtgataatgggtcagtttctcagactgtagccattgaaaattagatgcagagaattcagagatttcttcttaatggaagtaataagctgtaagaattgagagatcacaatggagtgttaaaactgactgtctaagttgggtgtaagggtttcctgggtttttttatatacatgctctccccagaatacagtaaaccacagttttagaactaaacacatctgtaaaactaaatatagcatggaaaatccaatttgaataagtcatgctttcctagaatttaaaaataaaaaagtcttcctctggaaagagaagtcacacagacaatcatgtgccctataaaagtgagtgtttataggactaaaaaacttttaacaactttttaaggaaatatttttgttcttatacaaaaacatgtaaatattgctttattactttcattttctgaccctgctgtaaactactgcaaccctcacatcctcaaagggacttttatgtcaaactcttctgtttctccaaatataaggaaaaaagactaaagcaagagatctggcagttgaaaattgtgggaaagagaatttgtatgggcactgtatctgtgaaatacctcataacttacgtttacatgttttcctaactttttgtatttttcttgtatagccacctagagaattcttcatagattaagaactacagttttcaccacttaacataagtaaaacaaagtccttcataatttaaccattagcatctttggccaaaccaaaataaagaaaagcatcttctcctagttgtgtgtgggcaacagaaacaagttaaggaaacaaaaatacttatatatacacagaacaaaaataatgttctttttatgcaaatcccctgtgaaaataaaattttcaatgtttttttggtcttaacgcttcattttaacttagtaaacccaaatttaggatttacattggcaaatttttcagtgatttttaacgtgttacatttagtaaaccatagattttttaaaaactacattttgtaaggccacacataagtgaaaatacggaaggctttggaaacccccagatgaacttctatacatgtgaaaacacaagtctttgagtgtgcactaaaagtgtcacactcccaaaaactcacaaaacattttgctaaaaa

SEQ ID NO: 187726 - DNA, 897 bp, Homo Sapiens
ttggcaaaaaagcagaccagacagcttgtatgccgaagtacagaaacaccggatgcagcagcagcagcgcgaccaccagcagcagcctggagaggctgagccgctgacgcccacctacaacatctcggccaacgggctgacggaacttcacgacgacctcagtaactacattgacgggcacacccctgaggggagtaaggcagactccgccgtcagcagcttctacctggacatacagccttccccagaccagtcaggtcttgatatcaatggaatcaaaccagaaccaatatgtgactacacaccagcatcaggcttctttccctactgttcgttcaccaacggcgagacttccccaactgtgtccatggcagaattagaacaccttgcacagaatatatctaaatcgcatctggaaacctgccaatacttgagagaagagctccagcagataacgtggcagacctttttacaggaagaaattgagaactatcaaaacaagcagcgggaggtgatgtggcaattgtgtgccatcaaaattacagaagctatacagtatgtggtggagtttgccaaacgcattgatggatttatggaactgtgtcaaaatgatcaaattgtgcttctaaaagcaggttctctagaggtggtgtttatcagaatgtgccgtgcctttgactctcagaacaacaccgtgtactttgatgggaagtatgccagccccgacgtcttcaaatccttaggttgtgaagactttattagctttgtgtttgaatttggaaagagtttatgttctatgcacctgactgaagatgaatttgcattattttctgcatttgtactgatgtcagcagatcgctcatgggctgcaagaaaaggaaaaattgaaaaactgca

SEQ ID NO: 187727 - DNA, 1576 bp, Homo Sapiens
  misc_feature (884)..(916): n is a, c, g, or t
  misc_feature (1467)..(1476): n is a, c, g, or t
ttggtgtctcgtcctcgctccctctctttctctcctccctctgccttcccagtgcataaagtctctgtcgctcccggaacttgttggcaatgcctattttttggctttcccccgcgttctctaaactaactatttaaaggtctgcggtcgcaaatggtttgactaaacgtaggatgggacttaagttgaacggcagatatatttcactgatcctcgcggtgcaaatagcgtatctggtgcaggccgtgagagcagcgggcaagtgcgatgcggtcttcaagggcttttcggactgtttgctcaagctgggcgacagcatggccaactacccgcagggcctggacgacaagacgaacatcaagaccgtgtgcacatactgggaggatttccacagctgcacggtcacagcccttacggattgccaggaaggggcgaaagatatgtgggataaactgagaaaagaatccaaaaacctcaacatccaaggcagcttattcgaactctgcggcagcggcaacggggcggcggggtccctgctcccggcgttcccggtgctcctggtgtctctctcggcagctttagcgacctggctttccttctgagcgtggggccagctccccccgcgcgcccacccacactcactccatgctcccggaaatcgagaggaagatccattagttctttggggacgttgtgattctctgtgatgctgaaaacactcatataggattgtgggaaatcctgattctcttttttatttcgtttgatttcttgtgttttatttgccaaatgttaccaatcagtgagcaagcaagcacagccaaaatcggacctcagctttagtccgtcttcacacacaaataagaaaacggcaaacccacccnnnnnnnnnnnnnnnnnnnnnnnnnnnnnnnnngttggcaaaagaatctcaggaacggccctgggccacctactatattaatcatgctagtaacatgaaaaatgatgggctcctcctaataggaaggcgaggagaggagaaggccaggggaatgaattcaagagagatgtccacggacgaaacatacggtgaataattcacgctcacgtcgttcttccacagtatcttgttttgatcatttccactgcacatttctcctcaagaaaagcgaaaggacagactgttggctttgtgtttggaggatttgatggagagagggaaggggctgaggaaatctctggggtaagagtaaaggcttccagaagacatgctgctatggtcactgaggggttagctttatctgctgttgttgatgcatccgtccaagttcactgcctttattttccctcctccctcttgttttagctgttacacacacagtaatacctgaatatccaacggtatagatcacaagggggggatgttaaatgttaatctaaaatatagctaaaaaaagattttgacatataagagccttgattttnnnnnnnnnngagagagagatgtaatttaaaaagtttattataaattaaattcagcaaaaaaagatttgctacaaagtatagagaagtataaaataaaagttattgtttg

SEQ ID NO: 187728 - DNA, 1003 bp, Homo Sapiens
  misc_feature (886)..(918): n is a, c, g, or t
aactttgtacaaaaaagttggctctctttctctcctccctctgccttcccagtgcataaagtctctgtcgctcccggaacttgttggcaatgcctattttttggctttcccccgcttctctaaactaactatttaaaggtctgcggtcgcaaatggtttgactaaacgtaggatgggacttaagttgaacggcagatatatttcactgatcctcgcggtgcaaatagcgtatctggtgcaggccgtgagagcagcgggcaagtgcgatgcggtcttcaagggcttttcggactgtttgctcaagctgggcgacagcatggccaactacccgcagggcctggacgacaagacgaacatcaagaccgtgtgcacatactgggaggatttccacagctgcacggtcacagcccttacggattgccaggaaggggcgaaagatatgtgggataaactgagaaaagaatccaaaaacctcaacatccaaggcagcttattcgaactctgcggcagcggcaacggggcggcggggtccctgctcccggcgttcccggtgctcctggtgtctctctcggcagctttagcgacctggctttccttctgagcgtggggccagctccccccgcgcgcccacccacactcactccatgctcccggaaatcgagaggaagatccattagttctttggggacgttgtgattctctgtgatgctgaaaacactcatataggattgtgggaaatcctgattctcttttttatttcgtttgatttccttgtgttttatttgccaaatgtttaccaatcagtgagcaagcaagcacagccaaaatcgggacctcagcattagtccgtcttcacacacaaataagaaaacgccaacccaccccnnnnnnnnnnnnnnnnnnnnnnnnnnnnnnnnnggtgggcaaaagaatctccagaacgggcctgggccactactatatatatcatgctactaacatgaaaaatgatgggctcctccta

SEQ ID NO: 187729 - DNA, 1078 bp, Homo Sapiens
gagcaatgcttttttataatgccaactttgtacaaaaaagttggcttcgggtttggggaggaggaatttatgagcaggatgaattctatgaactctgtgatgaactaggaataatggtatggcaggattttatgtttgcctgtgccctttatccaactgatcagggcttcctggattcagtgacagcagaagttgcctaccagatcaagagactgaaatctcatccttctatcatcatatggagtggcaataatgaaaatgaggaggcgctgatgatgaattggtatcatatcagtttcactgaccggccaatctacatcaaggactatgtgacactctatgtgaaaaacatcagagagctcgtactggcaggagacaagagtcgtccttttattacgtccagtcctacaaatggggctgaaactgttgcagaagcctgggtctctcaaaaccctaatagcaattattttggtgatgtacatttttatgactatatcagtgattgctggaactggaaagttttcccaaaagctcgatttgcatctgaatatggatatcagtcctggccgtccttcagtacattagaaaaggtctcgtctacagaggactggtctttcaatagcaagttttcacttcatcgacaacatcacgaaggtggtaacaaacaaatgctttatcaggctggacttcatttcaaactcccccaaagcacagatccattacgcacatttaaagataccatctaccttactcaggtgatgcaggcccagtgtgtcaaaacagaaactgaattctaccgccgtagtcgcagcgagatagtggatcagcaagggcacacgatgggggcactttattggcagttgaatgacatctggcaagctccttcctgggcttctcttgagtacggaggaaagtgaaaatgcttcattactttgctcagaatttctttgctccactgttgccagtaggctttgagaatgaaaacatgttctatatctatggtgtgtcagatctttcactcggattattccgatgacactcagtgtgagagtccatacatggagctccctggaagccc

SEQ ID NO: 187730 - DNA, 1665 bp, Homo Sapiens
  misc_feature (1251)..(1273): n is a, c, g, or t
ttttttgttttgacacactgggcatgcatcacctgagtaaggtagatggtatcttaaaatgtgcgtaatggatctgtgctttgggggagtttgaaatgaagtccagcctgataaagcatttgtttgttaccaccttcgtgatgttgtcgatgaagtgaaaacttgctattgaaagaccagtcctctgtagacgagaccttttctaatgtactgaaggacggccaggactgatatccatattcagatgcaaatcgagcttttgggaaaactttccagttccagcaatcactgatatagtcataaaaatgtacatcaccaaaataattgctattagggttttgagagacccaggcttctgcaacagtttcagccccatttgtaggactggacgtaataaaaggacgactcttgtctcctgccagtacgagctctctgatgtttttcacatagagtgtcacatagtccttgatgtagattggccggtcagtgaaactgatatgataccaattcatcatcagcgcctcctcattttcattattgccactccatatgatgatagaaggatgagatttcagtctcttgatctggtaggcaacttctgctgtcactgaatccaggaagccctgatcagttggataaagggcacaggcaaacataaaatcctgccataccattattcctagttcatcacagagttcatagaattcatcctgctcataaattcctcctccccaaacccgaagagtattcatattagcatccacaacagactgtaaaaggagccgtaacaactcagaggttactcggtcctggaatgaatctgctgggatccagtttgagcttttagaaatatgggaaatccattaattttgaaatagaaactcaaaccaggagacccttttataggctcttctataagttccactgtcgtaaaataaaccttagctgatttttcaatatttaagcctccatccagttcaaaaagaacagtcatgttgtacccagtctggtttccatgtccatgaggccaccaagtttctacagtaatattcttgctaatgttcacaaatagctcaacaatccttttcccaggttgaagttcaatgctgtatgtctgttgtgtttgcaacttagggatggctacgatcacttgaccaccaactggctttgagctgacaacatcaaatgtagactctatttccagattccactcctgggcactcttatctaaaatataaaaagaaaaagaannnnnnnnnnnnnnnnnnnnnnngctaagcattatcactgcatttctcaggattcattgaaggtaatactaaagcagcttcaaacccagtacgtgctccacaatgctgtcataatcaaaacttcgtggaaattttcttttaatcttcagtttaatccttcattctgaagaagaataacaaaaatgatatattttacatagacttccactctaaaaatgttatgattgtaagtcataaaaactttatggagcataaacagaaaatgacaaatggaaagataaaataaattttccaagaataatacacatttgttcctttttaattaagtaaaaatactttataaagtaaaaagtaatagtattttactttataatgtaaatgggttttaaagttatgtaataaggtataaatccaa
